United States Patent Application Publication US 2021/0260178 A1 - sequence listing, part 6

SEQ ID NO: 8656 - RNA, 1710 nt, Artificial Sequence
  derived and/or modified CDS sequence (opt3) from LASV(LASV042-NIG-2009;Clade II)__AIT17593__NP
augagcgccuccaaggaggugaaaucuuuccuguggacccagucacucagaagggaacuuaguggcuacugcagcuccaucaagcugcaagucguuaaagacgcucaggcauuguuacacgggcuggauuuuucugaggugucgaacguacagcggcuaaugcgcaagcagaaacgagacgauggagaccucaagcgucugagagaucuuaaucaagccgugaacaaucuggucgaauugaagucaacacagcagaaaagcauucucaggguggguacucugacgagugacgaucugcucaccuuagcggcugaccuggagaaacuuaaguccaagguuauacggacagaacgccccuugucuagcggcguguauauggggaaccuguccucacagcaacuagagcagagaagggcccuccugaauaugaucggaauggucggcggugcacaggggacucagccuggacgggauggcgugguacgcguuugggacgugaaaaacccagaucuucugaauaaccaauucggcaccaugccgaguuugacacucgccugucugaccaagcaggggcaggucgacuuaaaugaugcugugcuggcacucacugaccuuggacugauuuacacagccaaguaucccaacagcucugacuuggaucgacuaucccaaucacauccuauccugaauaugguggacaccaaaaagagcagucucaacauuucugguuacaauuuuucccugggcgcugccgucaaagcgggggcaugcaugcuugauggaggcaacaugcuggagacgaucaagguuacuccacagaccauggacgguauauugaaaagcauccucaaggugaaaagaucgcuggggauguucguaucugauacacccggagaaaggaauccuuaugagaacauuuuauacaagaucugucuguccggcgacggcuggccauauauugccucacggaccaguaucguggggcgugcuugggaaaacaccacagucgaucuagagagcgacggaaagccccagaaagugggugccgcaggcuccaccaagucucuccagagcgcuggguuuccuacgggacugacuuacucacaacuuaugacauugaaagauaguaugaugcagcuggacccauccgccaagaccuggauagauauugagggccgcccggaagaccccguugagaucgcgcucuaccagccuaugagcgguugcuauauucacuucuuuagagaaccaacugaccugaaacaguucaagcaagaugccaaguacucucaugggaucgacguggcagaucuuuuucccgcucagccuggccugacaucagccgucaucgaggcuuugccaaggaauauggugcucaccugucagggaagugacgauauuaaacggcuguuagacagccagggccgacgcgauauaaagcugaucgacauugcccuauccaaaguagauucuagaagguucgaaaacgcaguuugggaccaaugcaaggaucucugucacaugcauacggggguggucguggagaaaaagaagcggggagguaaagaggaaaucacuccccacugcgcccugauggacuguauaauguaugaugcugcggucucgggcgggcuuaauauuccgguguugcgcgcaguucugccuagagacaugguguuuaggacaagcucccccaagguaguccucuga

SEQ ID NO: 8657 - RNA, 1710 nt, Artificial Sequence
  derived and/or modified CDS sequence (opt3) from LASV(LASV049-NIG-2009;Clade II)__AIT17605__NP
augagcgccuccaaggaggugaaaucuuuccuguggacccagucacucagaagggaacuuaguggcuacugcagcuccaucaagcugcaagucguuaaagacgcucaggcauuguuacacgggcuggauuuuucugaggugucgaacguacagcggcuaaugcgcaagcagaaacgagacgauucagaccucaagcgucugagagaucuuaaucaagccgugaacaaucuggucgaacuuaagagcacacagcagaaaaguauucucagggugggaacucugacguccgacgaucugcucaccuuagcggcugaccuggagaaacuuaagucuaagguuauacggacagaacgccccuugagcuccgguguguauaugggcaaccugucaacucagcaacuagagcagagaagggcccuccugaauaugaucgggauggcaggaggcgcccaggguacccagccugggcgggauggagucgugcgcguaugggacguuaaaaacccagaucuucugaauaaccaauucggcacaaugccgaguuugacccucgcuugucugacuaagcagggccagguggacuuaaaugaugcaguccuggcccucacagaccuugggcugauuuacaccgcuaaguaucccaacagcucugacuuggaucgacuaucccaaucacauccuauccugaauaugguggacacgaaaaagagcagucucaacauuucuggauacaauuuuucccugggugccgcggugaaagcaggcgccugcaugcuugaugggggaaacaugcuggagacuaucaaggucaccccacagacaauggacggcauauugaaaagcauccucaagguuaaaaagucgcuggguauguucgugucugauacucccggggaaagaaauccuuaugagaacauuuuauacaagaucugucuguccggagacggcuggccauauauugcuucaaggaccaguaucguaggccgggccugggaaaacacaaccguggaucuagagagcgacgggaaaccccagaaggucggaacggcagguuccaauaaaucucuccagagcgcuggcuuuccuacugggcugacauacucacaacuuaugaccuugaaggauaguaugaugcagcuggacccauccgccaaaacuuggauagauauugagggacguccggaagaccccguggagaucgcgcucuaccagccuaugagcggcugcuauauucacuucuuucgcgaaccaacagaccugaagcaguucaagcaagaugccaaauacucucaugguaucgacguugcagauuuguuuucagcucagcccgggcugaccagugccgugaucgaggcuuugccuagaaacaugguccucacgugucagggcagcgacgauauuaagaggcuguuagacucccagggacggcgagauauaaaacugaucgacauugcccuaucuaaggcagauucgcgcagauucgaaaaugccgugugggaccaaugcaaagaucucugucacaugcauaccggcguaguuguggagaagaagaaaaggggagggaaggaggaaaucacaccacacugcgcucugauggacuguauaauguaugaugcggcagucagcgguggccuuaacauucccguguugcgggccguccugccgcgcgacaugguguuuagaacuuccucaccuaaaguugugcucuga

SEQ ID NO: 8658 - RNA, 1710 nt, Artificial Sequence
  derived and/or modified CDS sequence (opt3) from LASV(LASV052-NIG-2008;Clade II)__AIT17609__NP
augagcgccuccaaggaggugaaaucuuuccuguggacccagucacucagaagggaacuuaguggcuacugcagcuccaucaagcugcaagucguuaaagacgcucaggcauuguuacacgggcuggauuuuucugaggugucgaacguacagcggcuaaugcgcaagcagaaacgagacgauucagaccucaagcgucugagagaucuuaaucaagccgugaacaaucuggucgaacuuaagagcacacagcagaaaaguauucucagggugggaacucugacguccgacgaucugcucaccuuagcggcugaccuggagaaguugaaaucuaagguuauacggacagaacgccccuugagcuccgguguguauaugggcaaccugucaacucagcaacuagagcagagaagggcccuccugaauaugaucgggauggcaggaggcgcccaggguacccagccugggcgggauggagucgugcgcguaugggacguuaaaaacccagaucuucugaauaaccaauucggcacaaugccgaguuugacccucgcuugucugacuaagcagggccagguggacuuaaaugaugcaguccuggcccucacagaccuugggcugauuuacaccgcuaaguaucccaacagcucugacuuggaucgacuaucccaaucacauccuauccugaauaugguggacacgaaaaagagcagucucaacauuucuggauacaauuuuucccugggugccgcggugaaagcaggcgccugcaugcuugaugggggaaacaugcuggagacuaucaaggucaccccacagacaauggacggcauauugaaaagcauccucaagguuaaaagaucgcuggguauguucgugucugauacucccggggaaaggaauccuuaugagaacauuuuauacaagaucugucuguccggagacggcuggccauauauugcuucacggaccaguaucguaggccgugccugggaaaacacaaccguggaucuagagagcgacgggaagccccagaaagucggagcagcugguuccaauaagucucuccagagcgccggcuuuccuacggggcugacuuacucacaacuuaugacauugaaagauaguaugaugcagcuggacccauccgcgaagaccuggauagauauugagggacgcccggaagaccccguggagaucgcccucuaccagccuaugagcggcugcuauauucacuucuuuagagaaccaacugaccugaaacaguucaagcaagaugcaaaguacucucaugguaucgacguugcugaucuuuuucccgcccagccugggcugacaucagcugugaucgaggccuugccaaggaacaugguccucaccugucagggcagugacgauauuaaacggcuguuagacagccagggacgacgcgauauaaagcugaucgacauugcacuauccaaagccgauucuagaagguucgaaaaugcugugugggaccaaugcaaggaucucugucacaugcauacgggcguaguuguggagaaaaagaagcgcgggggaaaagaggaaaucacaccccacugcgcgcugauggacuguauaauguaugaugcagccgucucggguggccuuaacauuccgguguugcgggcuguccugccuagagacaugguguuuaggaccagcucccccaagguugugcucuga

SEQ ID NO: 8659 - RNA, 1710 nt, Artificial Sequence
  derived and/or modified CDS sequence (opt3) from LASV(LASV056-NIG-2008;Clade II)__AIT17613__NP
augagcgccuccaaggaggugaaaucuuuccuguggacccagucacucagaagggaacuuaguggcuacugcagcaacaucaagcugcaagucguuaaagacgcucaggcauuguuacacgggcuggauuuuuccgaggugucuaauguacagcggcuaaugcgcaagcagaaacgagacgauucggaccucaagcgucugagagaucuuaaccaagccgugaauaaccuggucgaauugaagucaacacagcagaaaagcauucucagggugggaacucugacgagugacgaucugcucaccuuagcggcugaccuggagaaacuuaaguccaagguuauacggacagaacgccccuugucuagcgguguguauaugggcaaucuguccacucagcaacuagagcagagaagggcccuccugaacaugaucgggauggucggaggcgcacaggguacccagccugggcgggauggagugguacgcguuugggacgugaaaaauccagaucuucugaacaaucaauucggcacaaugccgucauugacccucgccugucugacuaagcagggccaggucgacuuaaacgaugcugugcuggcacucacagaccuugggcugauuuacaccgccaaguaucccaauaguagcgacuuggaucgacuaucucaaucccauccuauccugaacaugguggacacgaaaaagucaagccucaauauuaguggauacaacuuuucucugggugcugccgucaaagcgggcgcaugcaugcuugaugggggaaauaugcuggagacuaucaagguuaccccacagacaauggacggcauauugaaauccauccucaaggugaaaagaagccuggguauguucguaucggauacucccggggaaaggaacccuuaugagaacauuuuauacaagaucugucugucuggagacggcuggccauauauugccucccggaccucaaucgugggccgugcuugggaaaauacaaccgucgaucuagagagugacgggaagccccagaaagugggaacggccgguagcaacaagucccuccagucugcaggcuuuccuacugggcugacauacagccaacuuaugaccuugaaagauucaaugaugcagcuggacccaagugcuaagacuuggauagauauugagggacgcccggaagaccccguugagaucgcccucuaccagccuauguccggcugcuauauucacuucuuuagagaaccaacagaccugaaacaguucaagcaagaugcgaaguacagccaugguaucgacguggccgaucuuuuucccgcacagccugggcugaccucugcugucaucgaggccuugccaaggaauauggugcucacgugucagggcucagacgauauuaaacggcuguuagacagucagggacgacgcgauauaaagcugaucgacauugcucuaagcaaaaccgauuccagaagguucgaaaacgccguaugggaccaaugcaaggaucucugucacaugcauacaggcguuguggucgagaaaaagaagcgcgggggaaaagaggaaaucacuccccacugcgcacugauggacuguauaauguaugaugccgcugugucugguggccuuaauauuccggucuugcgggcggugcugccuagagacaugguuuuuaggaccucgagccccaaggugguacucuga

SEQ ID NO: 8660 - RNA, 1710 nt, Artificial Sequence
  derived and/or modified CDS sequence (opt3) from LASV(LASV058-NIG-2008;Clade II)__AIT17617__NP
augagcgccuccaaggaggugaaaucuuuccuguggacccagucacucagaagggaacuuaguggcuacugcagcuccaucaagcugcaagucguuaaagacgcucaggcauuguuacacgggcuggauuuuucugaggugucgaacguacagcggcuaaugcgcaagcagaaacgagacgauucagaccucaagcgucugagagaucuuaaucaagccgugaacaaucuggucgaacuuaagagcacacagcagaaaaguauucucagggugggaacucugacguccgacgaucugcucaccuuagcggcugaccuggagaaguugaaaucuaagguuauacggacagaacgccccuugagcuccgguguguauaugggcaaccugucagcccagcaacuagagcagagaagggcacuccugaauaugaucgggauggucggaggcgcccaggguacucagccugggcgggauggagugguacgcguuugggacgugaaaaacccagaucuucugaauaaccaauucggcaccaugccgaguuugacacucgcuugucugaccaagcagggccaggucgacuuaaaugaugcagugcuggcccucacugaccuugggcugauuuacacagcuaaguaucccaacagcucugacuuggaucgacuaucccaaucacauccuauccugaauaugguggacaccaaaaagagcagucucaacauuucuggauuuaauuucucccugggugccgcggucaaagcaggcgccugcaugcuugaugggggaaacaugcuggagacgaucaagguuacuccacagaccauggacggcauauugaaaagcauccucaaggugaaaagaucgcuggguauguuuguaucugauacacccggggaaaggaauccuuacgagaacauuuuauauaagaucugucuguccggagacggcuggccauacauugcuucacggaccaguaucgugggccgugccugggaaaacaccacagucgaucuagagagcgacgggaagccccagaaagugggaaccgcagguuccaauaagucucuccagagcgcuggcuucccuacggggcugacuuauucacaacuuaugacauugaaagauaguaugaugcagcuggacccauccgccaagaccuggauagauauugagggacgcccggaagaccccguugagaucgcgcucuaccagccuaugagcggcugcuacauucacuuuuucagagaaccaacugaccugaaacaguuuaagcaagaugccaaguauucucaugguaucgacguggcagaucuuuuccccgcucagccugggcugacaucagccgucaucgaggcuuugccaaggaacauggugcucaccugucagggcagugacgauauuaaacggcuguuagacagccagggacgacgcgauauaaagcugaucgacauugcccuauccaaagcagauucuagaagguuugaaaaugccguaugggaccaaugcaaggaucucugucacaugcauacgggcguuguggucgagaaaaagaagcgcgggggaaaagaggaaaucacuccccacugcgcucugauggacuguauaauguacgaugcggcagugucggguggccuuaacauuccggucuugcgggccgugcugccuagagacaugguuuucaggacaagcucccccaaggugguacucuga

SEQ ID NO: 8661 - RNA, 1710 nt, Artificial Sequence
  derived and/or modified CDS sequence (opt3) from LASV(LASV063-NIG-2009;Clade II)__AIT17621__NP
augagcgccuccaaggaggugaaaucuuuccuguggacccagucacucagaagggaacuuaguggcuacugcagcuccaucaagcugcaagucguuaaagacgcucaggcauuguuacacgggcuggauuuuucugaggugacaaacguacagcggcuaaugcgcaagcagaaacgagacgauucggaccucaagcgucugagagaucuuaaucaagccgugaacaaucuggucgaauugaagucaacucagcagaaaagcauucucagggugggaacgcugaccagugacgaucugcucacauuagcggcugaccuggagaaacuuaaguccaagguuauacggacugaacgccccuugucuagcgguguguauaugggcaaccuguccacccagcaacuagagcagagaagggcccuccugaauaugaucgggauggucggaggcgcacaggguacacagccugggcgggauggagugguacgcguuugggacgugaaaaacccagaucuucugaauaaccaauucggcaccaugccgucauugacucucgccugucugacaaagcagggccaggucgacuuaaaugaugcugugcuggcacucaccgaccuugggcugauuuacacggccaaguaucccaacaguagcgacuuggaucgacuaucucaaucccauccuauccugaauaugguggacacuaaaaagucaagccucaacauuaguggauacaauuuuucucugggugcugccgucaaagcgggcgcaugcaugcuugaugggggaaacaugcuggagaccaucaagguuacaccacagacuauggacggcauauugaaauccauccucaaggugaaaagaagccuggguauguucguaucggauacccccggggaaaggaauccuuaugagaacauuuuauacaagaucugucugucuggagacggcuggccauauauugccucccggacaucaaucgugggccgugcuugggaaaacaccacggucgaucuagagagugacgggaagccccagaaagugggaauagccgguagcaauaagucccuccagucugcaggcuuuccuacugggcugacauacagccaacuuaugaccuugaaagauucaaugaugcagcuggacccaagugcuaagacuuggauugauaucgagggacgcccggaagaccccguugagauugcccucuaccagccuauguccggcugcuauauccacuucuuuagagaaccaacagaccugaaacaguucaagcaagaugcgaaguacagccaugguaucgacguggccgaucuuuuucccgcacagccugggcugaccucugcugucauugaggccuugccaaggaacauggugcucacgugucagggcucagacgauauaaaacggcuguuagacagucagggacgacgcgauaucaagcugauugacaucgcucuaagcaaagccgauuccagaaaguucgaaaaugcaguaugggaccaaugcaaagaucucugucacaugcauaccggcguuguggucgagaagaagaaaaggggagggaaggaggaaauaacaccccacugcgcccugauggacuguauuauguaugaugcugcggugucugguggccuuaacaucccggucuugcgggcagugcugccucgcgacaugguuuuuagaacuucgagccccaaagugguacucuga

SEQ ID NO: 8662 - RNA, 1710 nt, Artificial Sequence
  derived and/or modified CDS sequence (opt3) from LASV(LASV1000-NIG-2009;Clade II)__AIT17783__NP
augagcgccuccaaggaggugaaaucuuuccuguggacccagucacucagaagggaacuuaguggcuacugcagcaacaucaagcugcaagucguuaaagacgcucaggcauuguuacacgggcuggauuuuuccgaggugucuaauguacagcggcuaaugcgcaagcagaaacgagacgauucggaccucaagcgucugagagaucuuaaccaagccgugaauaaccuggucgaauugaagucaacacagcagaaaagcauucucagggugggaacucugacgagugacgaucugcucaccuuagcggcugaccuggagaaacuuaaguccaagguuauacggacagaacgccccuugucuagcgguguguauaugggcaaucuguccacucagcaacuagagcagagaagggcccuccugaacaugaucgggauggucggaggcgcacaggguacccagccugggcgggauggagugguacgcguuugggacgugaaaaauccagaucuucugaacaaucaauucggcacaaugccgucauugacccucgccugucugacuaagcagggccaggucgacuuaaacgauguggugcuggcucucacagaccuugggcugauuuacaccgcaaaguaucccaauaguagcgacuuggaucgacuaucucaaucccauccuauccugaacauggucgacacgaaaaagucaagccucaauauuaguggauacaacuuuucucugggugccgcuguuaaagccggcgcgugcaugcuugaugggggaaauaugcuggagacuaucaaggugaccccacagacaauggacggcauauugaaauccauccucaaggugaaaaagagccuggguauguucguaucggauacucccggggaaagaaacccuuaugagaacauuuuauacaagaucugucugucuggagacggcuggccauauauugcauccaggaccucaaucgucggccgggccugggaaaauacaaccguggaucuagagagugacgggaaaccccagaagguuggaacggcugguagcaacaaaucccuccagucugccggcuuuccuacugggcugacauacagccaacuuaugaccuugaaggauucaaugaugcagcuggacccaagugcaaaaacuuggauagauauugagggacguccggaagaccccguggagaucgcucucuaccagccugucuccggcugcuauauucacuucuuucgcgaaccaacagaccugaagcaguucaagcaagaugccaaauacagccaugguaucgacguggcggaucuuuuucccgcccagccugggcugaccucugcaguaaucgaggcuuugccaagaaauaugguucucacgugucagggcucagacgauauuaagaggcuguuagacagucagggacggcgagauauaaaacugaucgacauugcccuaagcaaggcugauucccgcagauucgaaaacgccgugugggaccaaugcaaagaucucugucacaugcauaccggcgucguggucgagaagaagaaaaggggagggaaggaggaaaucacaccccacugcgcacugauggacuguauaauguaugaugccgcugugucugguggccuuaauauuccgguuuugcgggcggugcugccucgcgacaugguauuuagaacuucgagccccaaagucgugcucuga

SEQ ID NO: 8663 - RNA, 1710 nt, Artificial Sequence
  derived and/or modified CDS sequence (opt3) from LASV(LASV1008-NIG-2009;Clade II)__AIT17787__NP
augagcgccuccaaggaggugaaaucuuuccuguggacccagucacucagaagggaacuuaguggcuacugcagcaacaucaagcugcaagucguuaaagacgcucaggcauuguuacacgggcuggauuuuuccgaggugucuaauguacagcggcuaaugcgcaagcagaaacgagacgauggagaccucaagcgucugagagaucuuaaccaagccgugaauaaccuggucgaauugaagucgacacagcagaaaucaauucucaggguggguacucugacgagcgacgaucugcucaccuuagcggcugaccuggagaaacuuaagaguaagguuauacggacagaacgccccuuguccucuggcguguauauggggaaucugagcacucagcaacuagagcagagaagggcccuccugaacaugaucggaauggucggcggugcacaggggacccagccuggacgggauggcgugguacgcguuugggacgugaaaaauccagaucuucugaacaaucaauucggcacaaugccguccuugacccucgccugucugacuaagcaggggcaggucgacuuaaacgaugcugugcuggcacucacagaccuuggacugauuuacaccgccaaguaucccaauucaagugacuuggaucgacuaagccaaucucauccuauccugaacaugguggacacgaaaaaguccucacucaauauuagcgguuacaacuuuagucugggcgcugccgucaaagcgggggcaugcaugcuugauggaggcaauaugcuggagacuaucaagguuaccccacagacaauggacgguauauugaaaucuauccucaaggugaaaaagucccuggggauguucguaagcgauacucccggagaaagaaacccuuaugagaacauuuuauacaagaucugucugucgggcgacggcuggccauauauugccucuaggaccuccaucguggggcgggcuugggaaaauacaaccgucgaucuagagucagacggaaaaccccagaagguggguacggccggcaguaacaaaagccuccaguccgcaggguuuccuacuggacugacauacucucaacuuaugaccuugaaggauagcaugaugcagcuggacccaucagcuaaaacuuggauagauauugagggccguccggaagaccccguugagaucgcccucuaccagccuaugagugguugcuauauucacuucuuucgcgaaccaacagaccugaagcaguucaagcaagaugcgaaauacucccaugggaucgacgugaccgaucuuuuuagcgcccagcccggccugacgucugcagucaucgaggcuuugccuagaaauauggugcucaccugucagggaucagacgauauuaagaggcuguuagacagucagggccggcgagauauaaaacugaucgacauugcccuaagcaagguagauucccgcagauucgaaaacgcuguuugggaccaaugcaaagaucucugucacaugcauacagggguggucguggagaagaagaaaaggggagguaaggaggaaaucacuccacacugcgcccugauggacuguauaauguaugaugcagccgucucuggcgggcuuaauauucccguguugcgggcuguucugccgcgcgacaugguguuuagaaccucgagcccuaaaguaguccucuga

SEQ ID NO: 8664 - RNA, 1710 nt, Artificial Sequence
  derived and/or modified CDS sequence (opt3) from LASV(LASV1015-NIG-2009;Clade II)__AIT17795__NP
augagcgccuccaaggaggugaaaucuuuccuguggacccagucacucagaagggaacuuaguggcuacugcagcuccaucaagcugcaagucguuaaagacgcucaggcauuguuacacgggcuggauuuuucugaggugucgaacguacagcggcuaaugcgcaagcagaaacgagacgauucagaccucaagcgucugagagaucuuaaucaagccgugaacaaucuggucgaacuuaagagcacacagcagaaaaguauucucagggugggaacucugacguccgacgaucugcucaccuuagcggcugaccuggagaaguugaaaucuaagguuauacggacagaacgccccuugagcuccgguguguauaugggcaaccugucaacucagcaacuagagcagagaagggcccuccugaauaugaucgggauggucggaggcgcacaggguacccagccugggcgggauggagugguacgcguuugggacgugaaaaacccagaucuucugaauaaccaauucggcacaaugccgaguuugacccucgccugucugacuaagcagggccaggucgacuuaaaugaugcugugcuggcacucacagaccuugggcugauuuacaccgccaaguaucccaacagcucugacuuggaucgacuaucccaaucacauccuauccugaauaugguggacacgaaaaagagcagucucaacauuucuggauacaauuuuucccugggugcugccgucaaagcgggcgcaugcaugcuugaugggggaaacaugcuggagacuaucaagguuaccccacagacaauggacggcauauugaaaagcauccucaaggugaaaagaucgcuggguauguucguaucugauacucccggggaaaggaauccuuaugagaacauuuuauacaagaucugucuguccggagacggcuggccauauauugccucacggaccaguaucgugggccgugcuugggaaaacacaaccgucgaucuagagagcgacgggaagccccagaaagugggaacggccgguuccaauaagucucuccagagcgcaggcuuuccuacugggcugacauacucacaacuuaugaccuugaaagauaguaugaugcagcuggacccauccgcuaagacuuggauagauauugagggacgcccggaagaccccguugagaucgcccucuaccagccuaugagcggcugcuauauucacuucuuuagagaaccaacagaccugaaacaguucaagcaagaugcgaaguacucucaugguaucgacguggccgaucuuuuucccgcacagccugggcugaccucagcugucaucgaggccuugccaaggaacauggugcucacgugucagggcagugacgauauuaaaaagcuguuagacagccagggacggcgagauauaaaacugaucgacauugcucuauccaaggccgauucucgcagauucgaaaaugcaguaugggaccaaugcaaagaucucugucacaugcauaccggcguuguggucgagaagaagaaaaggggagggaaggaggaaaucacaccccacugcgcccugauggacuguauaauguaugaugcugcggugucggguggccuuaacauuccggucuugcgggcagugcugccucgcgacaugguuuuuagaacuagcucccccaaagugguacucuga

SEQ ID NO: 8665 - RNA, 1710 nt, Artificial Sequence
  derived and/or modified CDS sequence (opt3) from LASV(LASV1016-NIG-2009;Clade II)__AIT17799__NP
augagcgccuccaaggaggugaaaucuuuccuguggacccagucacucagaagggaacuuaguggcuacugcagcaacaucaagcugcaagucguuaaagacgcucaggcauuguuacacgggcuggauuuuuccgaggugucuaauguacagcggcuaaugcgcaagcagaaacgagacgauucggaccucaagcgucugagagaucuuaaccaagccgugaauaaccuggucgaauugaagucaacacagcagaaaagcauucucagggugggaacucugacgagugacgaucugcucaccuuagcggcugaccuggagaaacuuaaguccaagguuauacggacagaacgccccuugucuagcgguguguauaugggcaaucuguccgcccagcaacuagagcagagaagggcacuccugaacaugaucgggauggucggaggcgcccaggguacucagccugggcgggauggagugguacgcguuugggacgugaaaaauccagaucuucugaacaaucaauucggcaccaugccgucauugacacucgcuugucugaccaagcagggccaggucgacuuaaacgaugcagugcuggcccucacugaccuugggcugauuuacacagcuaaguaucccaauaguagcgacuuggaucgacuaucucaaucccauccuauccugaacaugguggacaccaaaaagucaagccucaauauuaguggauacaacuuuucucugggugccgcggucaaagcaggcgccugcaugcuugaugggggaaauaugcuggagacgaucaagguuacuccacagaccauggacggcauauugaaauccauccucaaggugaaaaagagccuggguauguucguaucggauacacccggggaaagaaacccuuaugagaacauuuuauacaagaucugucugucuggagacggcuggccauauauugcuuccaggacuucaaucgugggccgggccugggaaaauaccacagucgaucuagagagugacgggaaaccccagaaggugggaaccgcagguagcaacaaaucccuccagucugcuggcuuuccuacggggcugacuuacagccaacuuaugacauugaaggauucaaugaugcagcuggacccaagugccaaaaccuggauagauauugagggacguccggaagaccccguugagaucgcgcucuaccagccuauguccggcugcuauauucacuucuuucgcgaaccaacugaccugaagcaguucaagcaagaugccaaauacagccaugguaucgacguggcagaucuuuuucccgcucagccugggcugacaucugccgucaucgaggcuuugccaagaaauauggugcucaccugucagggcucagacgauauuaagaggcuguuagacagucagggacggcgagauauaaaacugaucgacauugcccuaagcaaggcagauucccgcagauucgaaaacgccguaugggaccaaugcaaagaucucugucacaugcauacgggcguuguggucgagaagaagaaaaggggagggaaggaggaaaucacaccccacugcgcucugauggacuguauaauguaugaugcggcagugucugguggccuuaauauuccggucuugcgggccgugcugccucgcgacaugguuuuuagaaccucgagccccaaagugguacucuga

SEQ ID NO: 8666 - RNA, 1710 nt, Artificial Sequence
  derived and/or modified CDS sequence (opt3) from LASV(LASV221-NIG-2010;Clade II)__AIT17625__NP
augagcgccuccaaggaggugaaaucuuuccuguggacccagucacucagaagggaacuuaguggcuacugcagcuccaucaagcugcaagucguuaaagacgcucaggcauuguuacacgggcuggauuuuucugaggugucgaacguacagcggcuaaugcgcaagcagcgacgugacgauucagaccucaaaagacugagggaucuuaaucaagccgugaacaaucuggucgaacucaagagcacacagcagaagaguauuuugcgggugggaacucugacguccgacgaucugcucaccuuagcggcugaccuggagaaacuuaagucuaaaguuauacgcacagaaagacccuugagcuccgguguguauaugggcaaccugucaacucagcaacuagagcagaggcgggcccuccugaauaugaucgggauggucggaggcgcacaggguacccagccugggcgcgauggagugguacgaguuugggacgugaagaacccagaucuucugaauaaccaauucggcacaaugccgaguuugacccucgccugucugacuaaacagggccaggucgacuuaaaugaugcugugcuggcacucacagaccuugggcugauuuacaccgccaaguaucccaacagcucugacuuggauagacuaucccaaucacauccuauccugaauaugguggacacgaagaaaagcagucucaacauuucuggauacaauuuuucccugggugcugccgucaaggcgggcgcaugcaugcuugaugggggaaacaugcuggagacuaucaaaguuaccccacagacaguggacggcauacucaagagcaucuugaaaguaaagaggucgcuggguauguucgugucugauacucccggggaacggaauccuuaugagaacauuuuauacaaaaucugucuguccggagacggcuggccauauauugccucacguaccaguaucgucggccgcgcuugggaaaacacaaccguggaucuagagagcgacgggaagccccagaagguuggaacggccgguuccaauaaaucucuccagagcgcaggcuuuccuacugggcugacauacucacaacuuaugaccuugaaggauaguaugaugcagcuggacccauccgcuaaaacuuggauagauauugagggaagaccggaagaccccguggagaucgcccucuaccagccuaugagcggcugcuauauucacuucuuuagggaaccaacagaccugaagcaguucaaacaagaugcgaaguacucucaugguaucgacgucgccgaucuuuuucccgcacagccugggcugaccucagcugugaucgaggccuugccacggaacaugguacucacgugucagggcagugacgauauuaagcgacuguuagacagccagggacgcagagauauaaaacugaucgacauugcucuauccaaggccgauucuaggaaauucgaaaaugcaguuugggaccaaugcaaggaucucugucacaugcauaccggcguggucguggagaaaaagaagcgcgggggaaaagaggaaaucacaccccacugcgcccugauggacuguauaauguaugaugcugcggucucggguggccuuaacauuccgguguugcgggcaguucugccuagagacaugguguuuaggacuagcucccccaagguaguccucuga

SEQ ID NO: 8667 - RNA, 1710 nt, Artificial Sequence
  derived and/or modified CDS sequence (opt3) from LASV(LASV224-NIG-2010;Clade II)__AIT17627__NP
augagcgccuccaaggaggugaaaucuuuccuguggacccagucacucagaagggaacuuaguggcuacugcagcuccaucaagcugcaagucguuaaagacgcucaggcauuguuacacgggcuggauuuuucugaggugucgaacguacagcggcuaaugcgcaagcagaaacgagacgauucagaccucaagcgucugagagaucuuaaucaagccgugaacaaucuggucgaacuuaagagcacacagcagaaaaguauucucagggugggaacucugacguccgacgaucugcucaccuuagcggcugaccuggagaaguugaaaucuaagguuauacggacagaacgccccuugagcuccgguguguauaugggcaaccugucaagucagcaacuagagcagagaagggcccuccugaauaugaucgggauggucggaggcgcacaggguacucagccugggcgggauggagugguacgcguuugggacgugaaaaacccagaucuucugaauaaccaauucggcaccaugccgagcuugacacucgccugucugaccaagcagggccaggucgacuuaaaugaugcugugcuggcacucacugaccuugggcugauuuacacagccaaguaucccaacucuuccgacuuggaucgacuaucacaaagccauccuauccugaauaugguggacaccaaaaagaguucucucaacauuuccggauacaauuuuagccugggugcugccgucaaagcgggcgcaugcaugcuugaugggggaaacaugcuggagacgaucaagguuacuccacagaccauggacggcauauugaaaucgauccucaaggugaaaagaucucuggguauguucguauccgauacacccggggaaaggaauccuuaugagaacauuuuauacaagaucugucugucaggagacggcuggccauauauugccagucggacuagcaucgugggccgugcuugggaaaacaccacagucgaucuagaguccgacgggaagccccagaaagugggaucugccgguagcaauaagucacuccagagugcaggcuuuccuaccgggcugacguacucccaacuuaugacuuugaaagauagcaugaugcagcuggacccaucugcuaagacauggauagauauugagggacgcccggaagaccccguugagaucgcccucuaccagccuaugucaggcugcuauauucacuucuuuagagaaccaaccgaccugaaacaguucaagcaagaugcgaaguacagucaugguaucgacguggccgaucuuuuucccgcacagccugggcugacuagcgcugucaucgaggccuugccaaggaacauggugcucacaugucagggcuccgacgauauuaaacggcuguuagacucucagggacgacgcgauauaaagcugaucgacauugcucuaucgaaagccgauagcagaagguucgaaaaugcaguaugggaccaaugcaaggaucucugucacaugcauaccggcguuguggucgagaaaaagaagcgcgggggaaaagaggaaaucacgccccacugcgcccugauggacuguauaauguaugaugcugcgguguccgguggccuuaacauuccggucuugcgggcagugcugccuagagacaugguuuuuaggaccucaagucccaaggugguacucuga

SEQ ID NO: 8668 - RNA, 1710 nt, Artificial Sequence
  derived and/or modified CDS sequence (opt3) from LASV(LASV225-NIG-2010;Clade II)__AIT17631__NP
augagcgccuccaaggagaucaaaucuuuccuguggacccagucacucagaagggaacuuaguggcuacugcagcuccauuaagcugcaaguggucaaagacgcucaggcauuguuacacgggcuggauuuuucugagguuucgaacgugcagcggcuaaugcgcaagcagaaacgagacgauucagaccucaagcgucugagagaucuuaaucaagccguaaacaaucugguggaacuuaagagcacacagcagaaaaguauacucagggucggaacucugacguccgacgaucugcucaccuuagcggcugaccuggagaaguugaaaucuaaggugauccggacagaacgccccuugagcuccgguguuuauaugggcaaccugucaacucagcaacuagagcagagaagggcccuccugaauaugauugggauggugggaggcgcacaggguacccagccugggcgggauggagucgugcgcguaugggacguuaaaaacccagaucuucugaauaaccaauucggcacaaugccgaguuugacccucgccugucugacuaagcagggccagguggacuuaaaugaugcuguccuggcacucacagaccuugggcugaucuacaccgccaaguaucccaacagcucugacuuggaucgacuaucccaaucacauccuauucugaauaugguggacacgaaaaagagcagucucaacaucucuggauacaauuuuucccugggugcugccgugaaagcgggcgcaugcaugcuugaugggggaaacaugcuggagacuauaaaggucaccccacagacaauggacggcaucuugaaaagcauucucaagguuaaaagaucgcuggguauguucgugucugaugcccccggggaaaggaauccuuaugagaacaucuuauacaagauuugucuguccggagacggcuggccauauaucgcuucacggaccaguauaguaggccgugccugggaaaacaccacaguggaucuagagagcgacgggaagccccagaaagucggaaccgcagguuccaauaagucucuccagagcgcuggcuuuccuacggggcugacuuacucacaacuuaugacauugaaagauaguaugaugcagcuggacccauccgccaagaccuggauugauaucgagggacgcccggaagaccccguggagauugcgcucuaccagccuaugagcggcugcuauauccacuucuuuagagaaccaacugaccugaaacaguucaagcaagaugccaaguacucucaugguaucgacguugcagaucuuuuucccgcucagccugggcugacaucagccgugauugaggcuuugccaaggaacaugguccucaccugucagggcagugacgauauaaaacggcuguuagacagccagggacgacgcgauaucaagcugauugacaucgcccuauccaaagcagauucuagaagguucgaaaaugccgugugggaccaaugcaaggaucucugucacaugcauacgggcguaguuguggagaaaaagaagcgcgggggaaaagaggaaauaacuccccacugcgcucugauggacuguauuauguaugaugcggcagucucggguggccuuaacaucccgguguugcgggccguccugccuagagacaugguguuuaggacaagcucccccaagguugugcucuga

SEQ ID NO: 8669 - RNA, 1710 nt, Artificial Sequence
  derived and/or modified CDS sequence (opt3) from LASV(LASV229-NIG-2010;Clade II)__AIT17635__NP
augagcgccuccaaggaggugaaaucuuuccuguggacccagucacucagaagggaacuuaguggcuacugcagcaacaucaagcugcaagucguuaaagacgcucaggcauuguuacacgggcuggauuuuuccgaggugucuaauguacagcggcuaaugcgcaagcagaaacgagacgauaacgaccucaagcgucugagagaucuuaaucaagccgugaacaaucuggucgaauugaagucgacacagcagaaaucaauucucagggugggaacucugacgagcgacgaucugcucaccuuagcggcugaccuggagaaacuuaagaguaagguuauacggacagaacgccccuuguccucugguguguauaugggcaaccugaauacucagcaacuagagcagagaagggcccuccugaacaugaucgggauggucggaggcgcacaggguacccagccugggcgggauggagugguacgcguuugggacgugaaaaauccagaucuucugaacaaucaauucggcacaaugccgagcuugacccucgccugucugacuaagcagggccaggucgacuuaaacgaugcugugcuggcacucacagaccuugggcugauuuacaccgccaaguaucccaauuccucagacuuggaucgacuaagucaaagccauccuauccugaacaugguggacacgaaaaagucuucccucaauauuucaggauacaacuuuagccugggugcugccgucaaagcgggcgcaugcaugcuugaugggggaaacaugcuggagacuaucaagguuaccccacagacaauggacggcauauugaaaaguauccucaaggugaaaaagucucuggguauguucguauccgauacucccggggaaagaaauccuuaugagaacauuuuauacaagaucugucugagcggagacggcuggccauauauugccucgaggaccucuaucgugggccgggcuugggaaaauacaaccgucgaucuagaguccgacgggaaaccccagaaggugggaacggccgguucaaacaaaagucuccagagcgcaggcuuuccuacugggcugacauacucccaacuuaugaccuugaaggauucuaugaugcagcuggacccaagcgcuaaaacuuggauagauauugagggacguccggaagaccccguugagaucgcccucuaccagccuaugucaggcugcuauauucacuucuuucgcgaaccaacagaccugaagcaguucaagcaagaugcgaaauacagucaugguaucgacguggccgaucuuuuucccgcacagccugggcugaccuccgcugucaucgaggccuugccaagaaauauggugcucacgugucagggcagcgacgauauuaagaggcuguuagacucucagggacggcgagauauaaaacugaucgacauugcucuaucaaaggccgauagucgcagauucgaaaacgcaguaugggaccaaugcaaagaucucugucacaugcauaccggcguuguggucgagaagaagaaaaggggagggaaggaggaaaucacaccccacugcgcccugauggacuguauaauguaugaugcugcggugagcgguggccuuaauauuccggucuugcgggcagugcugccucgcgacaugguuuuuagaacuuccucucccaaagugguacucuga

SEQ ID NO: 8670 - RNA, 1710 nt, Artificial Sequence
  derived and/or modified CDS sequence (opt3) from LASV(LASV237-NIG-2010;Clade II)__AIT17639__NP
augagcgccuccaaggaggugaaaucuuuccuguggacccagucacucagaagggaacuuaguggcuacugcagcaacaucaagcugcaagucguuaaagacgcucaggcauuguuacacgggcuggauuuuuccgaggugucuaauguacagcggcuaaugcgcaagcagaaacgagacgauucggaccucaagcgucugagagaucuuaaccaagccgugaauaaccuggucgaauugaagucaacacagcagaaaagcauucucagggugggaacucugacgagugacgaucugcucaccuuagcggcugaccuggagaaacuuaaguccaagguuauacggacagaacgccccuugucuagcgguguguauaugggcaaucuguccacucagcaacuagagcagagaagggcccuccugaacaugaucgggauggucggaggcgcacaggguacccagccugggcgggauggagugguacgcguuugggacgugaaaaauccagaucuucugaacaaucaauucggcacaaugccgucauugacccucgccugucugacuaagcagggccaggucgacuuaaacgaugcugugcuggcacucacagaccuugggcugauuuacaccgccaaguaucccaauaguagcgacuuggaucgacuaucucaaucccauccuauccugaacaugguggacauuaaaaagucaagccucaauaucaguggauacaacuuuucucugggugcugccgucaaagcgggcgcaugcaugcuugaugggggaaauaugcuggagacgauaaagguuacuccacagaccauggacggcaucuugaaauccauucucaaggugaaaagaagccuggguauguucguaucggauacacccggggaaaggaacccuuaugagaacaucuuauacaagauuugucugucuggagacggcuggccauauaucgccucccggacuucaauagugggccgugcuugggaaaauaccacagucgaucuagagagugacgggaagccccagaaagugggaagcgccgguuccaacaagucucuccagagcgcaggcuuuccuaccgggcugacguacucacaacuuaugacuuugaaagauaguaugaugcagcuggacccauccgcuaagacauggauugauaucgagggacgcccggaagaccccguugagauugcccucuaccagccuaugagcggcugcuauauccacuucuuuagagaaccaaccgaccugaaacaguucaagcaagaugcgaaguacucucaugguaucgacguggccgaucuuuuucccgcacagccugggcugacuucagcugucauugaggccuugccaaggaauauggugcucacaugucagggcagugacgauauaaaacggcuguuagacagccagggacgacgcgauaucaagcugauugacaucgcucuauccaaagccgauucuagaagguucgaaaacgcaguaugggaccaaugcaaggaucucugucacaugcauaccggcguuguggucgagaaaaagaagcgcgggggaaaagaggaaauaacgccccacugcgcccugauggacuguauuauguaugaugcugcggugucggguggccuuaauaucccggucuugcgggcagugcugccuagagacaugguuuuuaggaccagcucccccaaggugguacucuga

SEQ ID NO: 8671 - RNA, 1710 nt, Artificial Sequence
  derived and/or modified CDS sequence (opt3) from LASV(LASV242-NIG-2010;Clade II)__AIT17651__NP
augagcgccuccaaggaggugaaaucuuuccuguggacccagucacucagaagggaacuuaguggcuacugcagcuccaucaagcugcaagucguuaaagacgcucaggcauuguuacacgggcuggauuuuucugaggugucgaacguacagcggcuaaugcgcaagcagaaacgagacgauucagaccucaagcgucugagagaucuuaaucaagccgugaacaaucuggucgaacuuaagagcacacagcagaaaagugugcucaggguuggaacucugacguccgacgaucugcucaccuuagcggcugaccuggagaaguugaaaucuaaggugauucggacagaacgccccuugagcuccggugucuauaugggcaaccugucagcccagcaacuagagcagagaagggcacuccugaauaugauagggauggugggaggcgcccaggguacucagccugggcgggauggaguaguucgcgugugggacgucaaaaacccagaucuucugaauaaccaauucggcaccaugccgaguuugacacucgcuugucugaccaagcagggccagguggacuuaaaugaugugguccuggcacucacugaccuugggcugaucuacacagccaaguaucccaacagcucugacuuggaucgacuaucccaaucacauccuauucugaauaugguugacaccaaaaagagcagucucaacaucucuggauacaauuuuucccugggugcugccgugaaagcgggcgcaugcaugcuugaugggggaaacaugcuggagacgauuaagguaacuccacagaccauggacggcaucuugaaaagcauacucaaggugaaaaagucgcuggguauguucgucucugauacacccggggaaagaaauccuuaugagaacaucuuauacaagauuugucuguccggagacggcuggccauauaucgccucaaggacuucaauugugggccgggcuugggaaaacaccacaguugaucuagagagcgacgggaaaccccagaaggugggaaccgccgguuccaauaaaucucuccagagcgcaggcuuuccuacggggcugacuuacucacaacuuaugacauugaaggauaguaugaugcagcuggacccauccgcuaaaaccuggaucgauauagagggacguccggaagaccccgucgagauugcccucuaccagccuaugagcggcugcuauauccacuucuuucgcgaaccaacugaccugaagcaguucaagcaagaugcgaaauacucucaugguauugacgugacagaucuuuuuagugcccagcccgggcugaccagugcaguaaucgaggcuuugccuagaaacaugguucucacgugucagggcagcgacgauaucaagaggcuguuagacucccagggacggcgagauauuaaacugauagacaucgcccuaucuaaggcugauucgcgcagauucgaaaaugccgugugggaccaaugcaaagaucucugucacaugcauaccggcgucguggucgagaagaagaaaaggggagggaaggaggaaauuacaccacacugcgcacugauggacuguaucauguaugaugccgcugugagcgguggccuuaacauacccguuuugcgggcggugcugccgcgcgacaugguauuuagaacuuccucaccuaaagucgugcucuga

SEQ ID NO: 8672 - RNA, 1710 nt, Artificial Sequence
  derived and/or modified CDS sequence (opt3) from LASV(LASV245-NIG-2011;Clade II)__AIT17655__NP
augagcgccuccaaggaggugaaaucuuuccuguggacccagucacucagaagggaacuuaguggcuacugcagcaacaucaagcugcaagucguuaaagacgcucaggcauuguuacacgggcuggauuuuuccgaggugucuaauguacagcggcuaaugcgcaagcagaaacgagacgauucggaccucaagcgucugagagaucuuaaccaagccgugaauaaccuggucgaauugaagucaacacagcagaaaagcauucucagggugggaacucugacgagugacgaucugcucaccuuagcggcugaccuggagaaacuuaaguccaagguuauacggacagaaaaacccuugucuagcgguguguauaugggcaaucuguccacucagcaacuagagcagcgcagagcccuccugaacaugaucgggauggucggaggcgcacaggguacccagccugggagggauggagugguacggguuugggacgugaagaauccagaucuucugaacaaucaauucggcacaaugccgucauugacccucgccugucugacuaagcagggccaggucgacuuaaacgaugcugugcuggcacucacagaccuugggcugauuuacaccgccaaauuucccaauaguagcgacuuggaucgccuaucucaaucccauccuauccugaacaugguggacacgaagaaaucaagccucaauauuaguggauauaacuucucucugggugcugccgucaaggcgggcgcaugcaugcuugaugggggaaauaugcuggagacuaucaaaguuaccccacagacaauggacggcauauugaaguccauccucaaagugaaaaagagccuggguauguuuguaucggauacucccggggaacgaaacccuuacgagaacauuuuauauaagaucugucugucuggagacggcuggccauacauugccuccagaaccucaaucgugggcagggcuugggaaaauacaaccgucgaucuagagagugacgggaagccccagaaagugggaacgacugguagcaacaagucccuccagucugccggcuucccuacagggcugaccuauagccaacuuaugacuuugaaagauucaaugaugcagcuggacccaagugcaaagacauggauagauauugagggacggccggaagaccccguugagaucgcucucuaccagccuauguccggcugcuacauucacuuuuuccgugaaccaaccgaccugaagcaguuuaaacaagaugccaaguauagccaugguaucgacguggcggaucuuuuccccgcccagccugggcugacgucugcagucaucgaggcuuugccacgcaauauggugcucaccugucagggcucagacgauauuaaaagacuguuagacagucagggaaggcgggauauaaagcugaucgacauugcccuaagcaaagcugauucccgacgcuuugaaaacgccguaugggaccaaugcaaggaucucugucacaugcauacaggcguuguggucgagaagaaaaagagagggggaaaagaggaaaucacuccccacugcgcacugauggacuguauaauguacgaugccgcugugucugguggccuuaauauuccggucuugagggcggugcugccucgggacaugguuuuccgcaccucgagccccaaggugguacucuga

SEQ ID NO: 8673 - RNA, 1710 nt, Artificial Sequence
  derived and/or modified CDS sequence (opt3) from LASV(LASV246-NIG-2010;Clade II)__AIT17659__NP
augagcgccuccaaggaggugaaaucuuuccuguggacccagucacucagaagggaacuuaguggcuacugcagcuccaucaagcugcaagucguuaaagacgcucaggcauuguuacacgggcuggauuuuucugaggugucgaacguacagcggcuaaugcgcaagcagaaacgagacgauucagaccucaagcgucugagagaucuuaaucaagccgugaacaaucuggucgaacuuaagagcacacagcagaaaagugugcucaggguuggaacucugacguccgacgaucugcucaccuuagcggcugaccuggagaaguugaaaucuaaggugauucggacagaacgccccuugagcuccggugucuauaugggcaaccugucaacucagcaacuagagcagagaagggcccuccugaguaugauagggauggugggaggcgcacaggguacccagccugggcgggauggaguaguucgcgugugggacgucaaaaauccagaucuucugaacaaucaauucggcacaaugccgagcuugacccucgccugucugacuaagcagggccagguggacuuaaacgaugcugugcuggcacucacagaccuugggcugaucuacaccgccaaguaucccaauucuuccgacuuggaucgacuaucacaaagccauccuauucugaacauggucgacacgaaaaagaguucucucaauaucuccggauacaacuuuagccugggugcugccguuaaagcgggcgcaugcaugcuugaugggggaaauaugcuggagacuauuaaggugaccccacagacaauggacggcaucuugaaaucgauacucaagguaaaaagaucucuggguauguucguguccgauacucccggggaaaggaacccuuaugagaauaucuuauacaagauuugucugucaggagacggcuggccauauaucgccagucggaccagcauugucggccgugcuugggaaaacacaaccguggaucuagaguccgacgggaagccccagaaaguuggaacggccgguucuaacaagagccuccagucagcaggcuuuccuacugggcugacauacagucaacuuaugaccuugaaagauuccaugaugcagcuggacccaagcgcuaagacuuggaucgauauagagggacgcccggaagaccccguggagauugcccucuaccagccuaugucuggcugcuauauccacuucuuuagagaaccaacagaccugaaacaguucaagcaagaugcgaaguacucacaugguauugacgucgccgaucuuuuucccgcacagccugggcugaccagugcugugaucgaggccuugccaaggaauaugguacucacgugucagggcagcgacgauaucaaacggcuguuagacucccagggacgacgcgauauuaagcugauagacaucgcucuaaacaaagccgauucuagaagguucgaaaaugcaguuugggaccaaugcaaggaucucugucacaugcauaccggcguggucguggagaaaaagaagcgcgggggaaaagaggaaauuacaccccacugcgcccugauggacuguaucauguaugaugcugcggucucggguggccuuaacauaccgguguugcgggcaguucugccuagagacaugguguuuaggacuagcucccccaagguaguccucuga

SEQ ID NO: 8674 - RNA, 1710 nt, Artificial Sequence
  derived and/or modified CDS sequence (opt3) from LASV(LASV251-NIG-2010;Clade II)__AIT17667__NP
augagcgccuccaaggaggugaaaucuuuccuguggacccagucacucagaagggaacuuaguggcuacugcagcuccaucaagcugcaagucguuaaagacgcucaggcauuguuacacgggcuggauuuuucugaggugucgaacguacagcggcuaaugcgcaagcagaaacgagacgauucagaccucaagcgucugagagaucuuaaucaagccgugaacaaucuggucgaacuuaagagcacacagcagaaaaguauucucagggugggaacucugacguccgacgaucugcucaccuuagcggcugaccuggagaaguugaaaucuaagguuauacggacagaacgccccuugagcuccgguguguauaugggcaaccugucaacucagcaacuagagcagagaagggcccuccugaauaugaucgggauggucggaggcgcacaggguacccagccugggcgggauggagugguacgcguuugggacgugaaaaacccagaucuucugaauaaccaauucggcacaaugccgaguuugacccucgccugucugacuaagcagggccaggucgacuuaaaugaugcugugcuggcacucacagaccuugggcugauuuacaccgccaaguaucccaacagcucugacuuggaucgacuaucccaaucacauccuauccugaauaugguggacacgaaaaagagcagucucaacauuucuggauacaauuuuucccugggugcugccgucaaagcgggcgcaugcaugcuugaugggggaaacaugcuggagacuaucaagguuaccccacagacaauagacggcaucuugaaaagcauucucaaggugaaaaagucgcuggguauguucguaucugauacucccggggaaagaaauccuuaugagaacaucuuauacaagauuugucuguccggagacggcuggccauauaucgccucaaggaccaguauagugggccgggcuugggaaaacacaaccgucgaucuagagagcgacgggaaaccccagaaggugggaacgacugguuccaauaaaucucuccagagcgccggcuuuccuacagggcugaccuacucacaacuuaugacuuugaaggauaguaugaugcagcuggacccauccgcaaaaacauggauugauaucgagggacguccggaagaccccguugagauugcucucuaccagccuaugagcggcugcuauauccacuucuuucgcgaaccaaccgaccugaagcaguucaagcaagaugccaaauacucucaugguaucgacgugacggaucuuuuucccgcgcagccugggcugaccucagccgucauugaggcauugccaagaaacauggugcucacaugucagggcagugaagacauaaagaggcuguuagauagccagggacggcgagacaucaaacugauugauaucgcucuauccaaggccgacucucgcagauucgagaaugcuguaugggaucaaugcaaagaccucugucacaugcauacuggcguuguggucgagaagaagaaaaggggagggaaggaagagauaacaccccacugcgcccugauggauuguauuauguaugacgcagccgugucggguggccuuaacaucccggucuugcgggcugugcugccucgcgauaugguuuuuagaaccagcucccccaaagugguacucuga

SEQ ID NO: 8675 - RNA, 1710 nt, Artificial Sequence
  derived and/or modified CDS sequence (opt3) from LASV(LASV253-NIG-2011;Clade II)__AIT17671__NP
augagcgccuccaaggaggugaaaucuuuccuguggacccagucacucagaagggaacuuaguggcuacugcagcuccaucaagcugcaagucguuaaagacgcucaggcauuguuacacgggcuggauuuuucugaggugucgaacguacagcggcuaaugcgcaagcagaaacgagacgauucagaccucaagcgucugagagaucuuaaucaagccgugaacaaucuggucgaacuuaagagcacacagcagaaaagugugcucaggguuggaacucugacguccgacgaucugcucaccuuagcggcugaccuggagaaguugaaaucuaaggugauucggacagaacgccccuugagcuccggugucuauaugggcaaccugucaacucagcaacuagagcagagaagggcccuccugaauaugauagggauggugggaggcgcacaggguacccagccugggcgggauggaguaguucgcgugugggacgucaaaaacccagaucuucugaauaaccaauucggcacaaugccgaguuugacccucgccugucugacuaagcagggccagguggacuuaaaugaugugguccuggcucucacagaccuugggcugaucuacaccgcaaaguaucccaacagcucugacuuggaucgacuaucccaaucacauccuauucugaauaugguugacacgaaaaagagcagucucaacaucucuggauacaauuuuucccugggugccgcugugaaagccggcgcgugcaugcuugaugggggaaacaugcuggagacuauuaagguaaccccacagacaauggacggcaucuugaaaagcauacucaaggugaaaaagucgcuggguauguucgucucugauacucccggggaaagaaauccuuaugagaacaucuuauacaagauuugucuguccggagacggcuggccauauaucgcaucaaggaccaguauugugggccgggccugggaaaacacaaccguugaucuagagagcgacgggaaaccccagaaggugggaacggcugguuccaauaaaucucuccagagcgccggcuuuccuacugggcugacauacucacaacuuaugaccuugaaggauaguaugaugcagcuggacccauccgcaaaaacuuggaucgauauagagggacguccggaagaccccgucgagauugcucucuaccagccuaugagcggcugcuauauccacuucuuucgcgaaccaacagaccugaagcaguucaagcaagaugccaaauacucucaugguauugacgugaccgaucuuuuucccgcgcagccugggcugacgucagccguaaucgaggcauugccaagaaacaugguucucaccugucagggcagugacgauaucaagaggcuguuagacagccagggacggcgagauauuaaacugauagacaucgcucuauccaaggccgauucucgcagauucgaaaaugcugugugggaccaaugcaaagaucucugucacaugcauacaggcgucguggucgagaagaagaaaaggggagggaaggaggaaauuacuccccacugcgcccugauggacuguaucauguaugaugcagccgugucggguggccuuaacauaccgguuuugcgggcugugcugccucgcgacaugguauuuagaaccagcucccccaaagucgugcucuga

SEQ ID NO: 8676 - RNA, 1710 nt, Artificial Sequence
  derived and/or modified CDS sequence (opt3) from LASV(LASV254-NIG-2011;Clade II)__AIT17675__NP
augagcgccuccaaggaggugaaaucuuuccuguggacccagucacucagaagggaacuuaguggcuacugcagcuccaucaagcugcaagucguuaaagacgcucaggcauuguuacacgggcuggauuuuucugaggugucgaacguacagcggcuaaugcgcaagcagaaacgagacgauucagaccucaagcgucugagagaucuuaaucaagccgugaacaaucuggucgaacucaagagcacacagcagaaaaguguguugaggguuggaacucugacguccgacgaucugcucaccuuagcggcugaccuggagaaacuuaaaucuaaggugauucggacagaacgccccuugagcuccggugucuauaugggcaaccugucaacucagcaacuagagcagagaagggcccuccugaauaugauagggauggugggaggcgcacaggguacccagccugggcgggauggaguaguucgcgugugggacgucaaaaacccagaucuucugaauaaccaauucggcacaaugccgaguuugacccucgccugucugacuaagcagggccagguggacuuaaaugaugcugugcuggcacucacagaccuugggcugaucuacaccgccaaguaucccaacagcucugacuuggaucgacuaucccaaucacauccuauucugaauauggucgacacgaaaaagagcagucucaacaucucuggauacaauuuuucccugggugcugccguuaaagcgggcgcaugcaugcuugaugggggaaacaugcuggagacuauuaaggugaccccacagacaauggacggcaucuugaaaagcauacucaagguaaagaagucgcuggguauguucgugucugauacucccggggaaagaaauccuuaugagaacaucuuauacaagauuugucuguccggagacggcuggccauauaucgccucaaggaccaguauugucggccgggcuugggaaaacacaaucguggaucuagagagcgacgggaaaccccagaagguuggaaccgccgguuccaauaaaucucuccagagcgcaggcuuuccuacggggcugacuuacucacaacuuaugacauugaaggauaguaugaugcagcuggacccauccgcuaaaaccuggauagauauugagggacguccggaagaccccguggagaucgcccucuaccagccuaugagcggcugcuauauucacuucuuucgcgaaccaacugaccugaagcaguucaagcaagaugcgaaauacucucaugguaucgacgucgccgaucuuuuucccgcacagccugggcugacaucagcugugaucgaggccuugccaagaaacaugguacucaccugucagggcagugacgauauuaagaggcuguuagacagccagggacggcgagauauaaaacugaucgacauugcucuauccaaggccgauucucgcagauucgaaaaugcaguuugggaccaaugcaaagaucucugucacaugcauacgggcguggucguggagaagaagaaaaggggagggaaggaggaaaucacaccccacugcgcccugauggacuguauaauguaugaugcugcggucucggguggccuuaacauuccgguguugcgggcaguucugccucgcgacaugguguuuagaaccagcucccccaaaguaguccucuga

SEQ ID NO: 8677 - RNA, 1710 nt, Artificial Sequence
  derived and/or modified CDS sequence (opt3) from LASV(LASV256-NIG-2010;Clade II)__AIT17679__NP
augagcgccuccaaggaggugaaaucuuuccuguggacccagucacucagaagggaacuuaguggcuacugcagcuccaucaagcugcaagucguuaaagacgcucaggcauuguuacacgggcuggauuuuucugaggugucgaacguacagcggcuaaugcgcaagcagaaacgagacgauucagaccucaagcgucugagagaucuuaaucaagccgugaacaaucuggucgaacuuaagagcacacagcagaaaaguauucucagggugggaacucugacguccgacgaucugcucaccuuagcggcugaccuggagaaguugaaaucuaagguuauacggacagaacgccccuugagcuccgguguguauaugggcaaccugucaacucagcaacuagagcagagaagggcccuccugaauaugaucgggauggucggaggcgcacagaguacccagccuggucgggauggggugguacgcguuugggacgugaaaaacccagaucuucugaauaaccaauucggaacaaugccgagcuugacccucgccugucugacuaagcagggccaggucgacuuaaaugaugcugugcuggcacucacagaccuuggccugauuuacaccgccaaguaucccaacucuuccgacuuggaucgacuaucacaaagccauccuauccugaauaugguggacacgaaaaagaguucucucaacauuuccggguacaauuuuagccugggagcugccgucaaagcgggugcaugcaugcuugauggcgggaacaugcuggagacuaucaagguuaccccacagacaauggacggaauauugaaaucgauccucaaggugaaaagaucucugggcauguucguauccgauacucccggugaaaggaauccuuaugagaacauuuuauacaagaucugucugucaggggacggauggccauauauugccagucggaccagcaucgugggccgugcuugggaaaacacaaccgucgaucuagaguccgacggcaagccccagaaaguggggacggccggaucuaauaagagccuccagucagcagguuuuccuacuggccugacauacagucaacuuaugaccuugaaagauuccaugaugcagcuggacccaagcgcuaagacuuggauagauauugaggggcgcccggaagaccccguugagaucgcccucuaccagccuaugucuggaugcuauauucacuucuuuagagaaccaacagaccugaaacaguucaagcaagaugcgaaguacucacauggcaucgacguggccgaucuuuuucccgcacagccuggucugaccagugcugucaucgaggccuugccaaggaacauggugcucacgugucaggggagcgacgauauuaaacggcuguuagacucccagggccgacgcgauauaaagcugaucgacauugcucuaucuaaagccgauucgagaagguucgaaaaugcaguaugggaccaaugcaaggaucucugucacaugcauaccggaguuguggucgagaaaaagaagcggggcgggaaagaggaaaucacaccccacugcgcccugauggacuguauaauguaugaugcugcggugagcggaggucuuaacauuccggucuugcgcgcagugcugccuagagacaugguuuuuaggacuuccucacccaaggugguacucuga

SEQ ID NO: 8678 - RNA, 1710 nt, Artificial Sequence
  derived and/or modified CDS sequence (opt3) from LASV(LASV263-NIG-2011;Clade II)__AIT17683__NP
augagcgccuccaaggaggugaaaucuuuccuguggacccagucacucagaagggaacuuaguggcuacugcagcaacaucaagcugcaagucguuaaagacgcucaggcauuguuacacgggcuggauuuuuccgaggugucuaauguacagcggcuaaugcgcaagcagaaacgagacgauucggaccucaagcgucugagagaucuuaaccaagccgugaauaaccuggucgaauugaagucaacacagcagaaaagcauucucagggugggaacucugacgagugacgaucugcucaccuuagcggcugaccuggagaaacuuaaguccaagguuauacggacagaacgccccuugucuagcgguguguauaugggcaaucuguccacucagcaacuagagcagagaagggcccuccugaacaugaucgggauggucggaggcgcacaggguacccagccugggcgggauggagugguacgcguuugggacgugaaaaauccagaucuucugaacaaucaauucggcacaaugccgucauugacccucgccugucugacuaagcagggccaggucgacuuaaacgaugcugugcuggcacucacagaccuugggcugauuuacaccgccaaguaucccaauaguagcgacuuggaucgacuaucucaaucccauccuauccugaacaugguggacacgaaaaagucaagccucaauauuaguggauuuaacuucucucugggugcugccgucaaagcgggcgcaugcaugcuugaugggggaaauaugcuggagacuaucaagguuaccccacagacaauggacggcauauugaaauccauccucaaggugaaaaagagccuggguauguuuguaucggauacucccggggaaagaaacccuuacgagaacauuuuauauaagaucugucugucuggagacggcuggccauacauugccuccaggaccucaaucgugggccgggcuugggaaaauacaaccgucgaucuagagagugacgggaaaccccagaaggugggaacggccgguagcaacaaaucccuccagucugcaggcuucccuacugggcugacauauagccaacuuaugaccuugaaggauucaaugaugcagcuggacccaagugcuaaaacuuggauagauauugagggacguccggaagaccccguugagaucgcccucuaccagccuauguccggcugcuacauucacuuuuuccgcgaaccaacagaccugaagcaguuuaagcaagaugcgaaauauagccaugguaucgacguggccgaucuuuuccccgcacagccugggcugaccucugcugucaucgaggccuugccaagaaauauggugcucacgugucagggcucagacgauauuaagaggcuguuagacagucagggacggcgagauauaaaacugaucgacauugcucuaagcaaggccgauucccgcagauuugaaaacgcaguaugggaccaaugcaaagaucucugucacaugcauaccggcguuguggucgagaagaagaaaaggggagggaaggaggaaaucacaccccacugcgcccugauggacuguauaauguacgaugcugcggugucugguggccuuaauauuccggucuugcgggcagugcugccucgcgacaugguuuucagaacuucgagccccaaagugguacucuga

SEQ ID NO: 8679 - RNA, 1710 nt, Artificial Sequence
  derived and/or modified CDS sequence (opt3) from LASV(LASV267-NIG-2010;Clade II)__AIT17687__NP
augagcgccuccaaggaggugaaaucuuuccuguggacccagucacucagaagggaacuuaguggcuacugcagcuccaucaagcugcaagucguuaaagacgcucaggcauuguuacacgggcuggauuuuucugaggugucgaacguacagcggcuaaugcgcaagcagaaacgagacgauucagaccucaagcgucugagagaucuuaaucaagccgugaacaaucuggucgaacuuaagagcacacagcagaaaaguauucucagggugggaacucugacguccgacgaucugcucaccuuagcggcugaccuggagaaguugaaaucuaagguuauacggacagaacgccccuugagcuccgguguguauaugggcaaccugucagcccagcaacuagagcagagaagggcacuccugaauaugaucgggauggucggaggcgcccaggguacucagccugggcgggauggagugguacgcguuugggacgugaaaaacccagaucuucugaauaaccaauucggcaccaugccgaguuugacacucgcuugucugaccaagcagggccaggucgacuuaaaugaugcagugcuggcccucacugaccuugggcugauuuacacagcuaaguaucccaacagcucugacuuggaucgacuaucccaaucacauccuauccugaauaugguggacaccaaaaagagcagucucaacauuucuggauacaauuuuucccugggugccgcggucaaagcaggcgccugcaugcuugaugggggaaacaugcuggagacgaucaagguuacuccacagaccauggacggcauauugaaaagcauccucaaggugaaaagaucgcuggguauguucguaucugauacacccggggaaaggaauccuuaugagaacauuuuauacaagaucugucuguccggagacggcuggccauauauugcuucacggaccaguaucgugggccgugccugggaaaacaccacagucgaucuagagagcgacgggaagccccagaaagugggaaccgcagguuccaauaagucucuccagagcgcuggcuuuccuacggggcugacuuacucacaacuuaugacauugaaagauaguaugaugcagcuggacccauccgccaagaccuggauagauauugagggacgcccggaagaccccguugagaucgcgcucuaccagccuaugagcggcugcuauauucacuucuuuagagaaccaacugaccugaaacaguucaagcaagaugccaaguacucucaugguaucgacguggcagaucuuuuucccgcucagccugggcugacaucagccgucaucgaggcuuugccaaggaacauggugcucaccugucagggcagugacgauauuaaacggcuguuagacagccagggacgacgcgauauaaagcugaucgacauugcccuauccaaagcagauucuagaagguucgaaaaugccguaugggaccaaugcaaggaucucugucacaugcauacgggcguuguggucgagaaaaagaagcgcgggggaaaagaggaaaucacuccccacugcgcucugauggacuguauaauguaugaugcggcagugucggguggccuuaacauuccggucuugcgggccgugcugccuagagacaugguuuuuaggacaagcucccccaaggugguacucuga

SEQ ID NO: 8680 - RNA, 1710 nt, Artificial Sequence
  derived and/or modified CDS sequence (opt3) from LASV(LASV274-NIG-2010;Clade II)__AIT17695__NP
augagcgccuccaaggaggugaaaucuuuccuguggacccagucacucagaagggaacuuaguggcuacugcagcaacaucaagcugcaagucguuaaagacgcucaggcauuguuacacgggcuggauuuuuccgaggugucuaauguacagcggcuaaugcgcaagcagaaacgagacgauucggaccucaagcgucugagagaucuuaaccaagccgugaauaaccuggucgaauugaagucaacacagcagaaaagcauucucagggugggaacucugacgagugacgaucugcucaccuuagcggcugaccuggagaaacuuaaguccaagguuauacggacagaacgccccuugucuagcgguguguauaugggcaaucuguccacucagcaacuagagcagagaagggcccuccugaaccuuaucgggauggucggaggcgcacaggguacccagccugggcgggauggagugguacgcguuugggacgugaaaaauccagaucuguugaacaaucaauucggcacaaugccgucacucacccuggccuguuuaacuaagcagggccaggucgaccugaacgauguggugcucgcucuuacagaccugggguugauuuacaccgcaaaguaucccaauaguagcgaccuagaucgacugucucaaucccauccuauccucaacauggucgacacgaaaaagucaagccugaauauuaguggauuuaacuucucucuuggugccgcuguuaaagccggcgcgugcaugcuggaugggggaaauauguuggagacuaucaaggugaccccacacacaauggacggcauacucaaauccauccugaaggugaaaaagagcuuagguauguuuguaucggauacucccggggaaagaaacccuuacgagaacauucuguauaagaucugucuaucuggagacggcuggccauacauugcauccaggaccucaaucgucggccgggccugggaaaauacaaccguggaucucgagagugacgggaaaccccauaagguuggaacggcugguagcaacaaaucccugcagucugccggcuucccuacugggcuuacauauagccaguugaugacccugaaggauucaaugaugcagcucgacccaagugcaaaaacuuggauagauauugagggacguccggaagaccccguggagaucgcucuguaccaaccuauguccggcugcuacauucacuuuuuccgcgaaccaacagaccuuaagcaguuuaagcaggaugccaaauauagccaugguaucgacgucgcggaucuguuccccgcccagccuggguugaccucugcagugaucgaggcucucccaagaaauaugguacugacgugucaaggcucagacgauauuaagagguuacuggacagucagggacggcgagauauaaaacuaaucgacauugcccucagcaaggcugauucccgcagauuugaaaacgccguuugggaccagugcaaagaucugugucacaugcacaccggcguggucguggagaagaagaaaaggggagggaaggaggaaaucacaccccauugcgcacuuauggacuguauaauguacgaugccgcugucucugguggcuugaauauuccggugcugcgggcgguucucccucgcgacaugguguucagaacuucgagccccaaaguaguccuguga

SEQ ID NO: 8681 - RNA, 1710 nt, Artificial Sequence
  derived and/or modified CDS sequence (opt3) from LASV(LASV719-NIG-2009;Clade II)__AIT17705__NP
augagcgccuccaaggaggugaaaucuuuccuguggacccagucacucagaagggaacuuaguggcuacugcagcaacaucaagcugcaagucguuaaagacgcucaggcauuguuacacgggcuggauuuuuccgaggugucuaauguacagcggcuaaugcgcaagcagaaacgagacgauucggaccucaagcgucugagagaucuuaaccaagccgugaauaaccuggucgaauugaagucaacacagcagaaaagcauucucagggugggaacucugacgagugacgaucugcucaccuuagcggcugaccuggagaaacuuaaguccaagguuauacggacagaacgccccuugucuagcgguguguauaugggcaaucuguccacucagcaacuagagcagagaagggcccuccugaaccuuaucgggauggucggaggcgcacaggguacccagccugggcgggauggagugguacgcguuugggacgugaaaaauccagaucuguugaacaaucaauucggcacaaugccgucacucacccuggccuguuuaacuaagcagggccaggucgaccugaacgaugcugugcucgcacuuacagaccugggguugauuuacaccgccaaguaucccaauaguagcgaccuagaucgacugucucaaucccauccuauccucaacaugguggacacgaaaaagucaagccugaauauuaguggauuuaacuucucucuuggugcugccgucaaagcgggcgcaugcaugcuggaugggggaaauauguuggagacuaucaagguuaccccacagacaauggacggcauacucaaauccauccugaaggugaaaaagagcuuagguauguuuguaucggauacucccggggaaagaaacccuuacgagaacauucuguauaagaucugucuaucuggagacggcuggccauacauugccuccaggaccucaaucgugggccgggcuugggaaaauacaaccgucgaucucgagagugacgggaaaccccacaaggugggaacggccgguagcaaccguucccugcagucugcaggcuucccuacugggcuuacauauagccaguugaugacccugaaagauucaaugaugcaacucgacccaagugcuaagacuuggauagauauugagggacgcccggaagaccccguugagaucgcccuguaccagccuauguccggcugcuacauucacuuuuucagagaaccaacagaccuuaaacaguuuaagcaggaugcgaaguauagccaugguaucgacguggccgaucuguuccccgcacaaccuggguugaccucugcugucaucgaggcccucccaaggaauauggugcugacgugucagggcucagacgauauuaaacgguuacuggacagucagggacgacgcgauauaaagcuaaucgacauugcucucagcaaagccgauuccagaagguuugaaaacgcaguaugggaccagugcaaggaucugugucauaugcacaccggcguuguggucgagaaaaagaagcgcgggggaaaagaggaaaucacaccccacugcgcccuuauggacuguauaauguacgaugcugcggugucugguggcuugaauauuccgguccugcgggcagugcucccuagagacaugguuuucaggacuucgagccccaaggugguacuguga

SEQ ID NO: 8682 - RNA, 1710 nt, Artificial Sequence
  derived and/or modified CDS sequence (opt3) from LASV(LASV737-NIG-2009;Clade II)__AIT17711__NP
augagcgccuccaaggaggugaaaucuuuccuguggacccagucacucagaagggaacuuaguggcuacugcagcaacaucaagcugcaagucguuaaagacgcucaggcauuguuacacgggcuggauuuuuccgaggugucuaauguacagcggcuaaugcgcaagcagaaacgagacgauucggaccucaagcgucugagagaucuuaaccaagccgugaauaaccuggucgaauugaagucaacacagcagaaaagcauucucagggugggaacucugacgagugacgaucugcucaccuuagcggcugaccuggagaaacuuaaguccaagguuauacggacagaacgccccuugucuagcgguguguauaugggcaaucuguccacucagcaacuagagcagagaagggcccuccugaaccuuaucgggauggucggaggcgcacaggguacccagccugggcgggauggagugguacgcguuugggacgugaaaaauccagaucuguugaacaaucaauucggcacaaugccgucacucacccuggccuguuuaacuaagcagggccaggucgaccugaacgaugcugugcucgcacuuacagaccugggguugauuuacaccgccaaguaucccaauaguagcgaccuagaucgacugucucaaucccauccuauccucaacaugguggacacgaaaaagucaagccugaauauuaguggauuuaacuucucucuuggugcugccgucaaagcgggcgcaugcaugcuggaugggggaaauauguuggagacuaucaagguuaccccacagacaauggacggcauacucaaauccauccugaaggugaaaaagagcuuagguauguuuguaucggauacucccggggaaagaaacccuuacgagaacauucuguauaagaucugucuaucuggagacggcuggccauacauugccuccaggaccucaaucgugggccgggcuugggaaaauacaaccgucgaucucgagagugacgggaaaccccacaaggugggaacggccgguagcuccaaaucucugcagagcgcaggcuucccuacugggcuuacauauucacaguugaugacccugaaggauaguaugaugcaacucgacccauccgcuaaaacuuggauagauauugagggacguccggaagaccccguugagaucgcccuguaccagccuaugagcggcugcuacauucacuuuuuccgcgaaccaacagaccuuaagcaguuuaagcaggaugcgaaauauucucaugguaucgacguggccgaucuguuccccgcacaaccuggguugaccucagcugucaucgaggcccucccaagaaacauggugcugacgugucagggcagugacgauauuaagagguuacuggacagccagggacggcgagauauaaaacuaaucgacauugcucucuccaaggccgauucucgcagauuugaaaaugcaguaugggaccagugcaaagaucugugucauaugcacaccggcguuguggucgagaagaagaaaaggggagggaaggaggaaaucacaccccacugcgcccuuauggacuguauaauguacgaugcugcggugucggguggcuugaacauuccgguccugcgggcagugcucccucgcgacaugguuuucagaacuagcucccccaaagugguacuguga

SEQ ID NO: 8683 - RNA, 1710 nt, Artificial Sequence
  derived and/or modified CDS sequence (opt3) from LASV(LASV738-NIG-2009;Clade II)__AIT17713__NP
augagcgccuccaaggaggugaaaucuuuccuguggacccagucacucagaagggaacuuaguggcuacugcagcaacaucaagcugcaagucguuaaagacgcucaggcauuguuacacgggcuggauuuuuccgaggugucuaauguacagcggcuaaugcgcaagcagaaacgagacgauucggaccucaagcgucugagagaucuuaaccaagccgugaauaaccuggucgaauugaagucaacacagcagaaaagcauucucagggugggaacucugacgagugacgaucugcucaccuuagcggcugaccuggagaaacuuaaguccaagguuauacggacagaacgccccuugucuagcgguguguauaugggcaaucuguccacucagcaacuagagcagagaagggcccuccugaacaugaucgggauggucggaggcgcacaggguacccagccugggcgggauggagugguacgcguuugggacgugaaaaauccagaucuucugaacaaucaauucggcacaaugccgucauugacccucgccugucugacuaagcagggccaggucgacuuaaacgaugcugugcuggcacucacagaccuugggcugauuuacaccgccaaguaucccaauaguagcgacuuggaucgacuaucucaaucccauccuauccugaacaugguggacauuaaaaagucaagccucaauaucaguggauacaacuuuucucugggugcugccgucaaagcgggcgcaugcaugcuugaugggggaaauaugcuggagacgauaaagguuacuccacagaccauggacggcaucuugaaauccauucucaaggugaaaaagagccuggguauguucguaucggauacacccggggaaagaaacccuuaugagaacaucuuauacaagauuugucugucuggagacggcuggccauauaucgccuccaggacuucaauagugggccgggcuugggaaaauaccacagucgaucuagagagugacgggaaaccccagaaggugggaaccgccgguagcaacaaaucccuccagucugcaggcuuuccuacggggcugacuuacagccaacuuaugacauugaaggauucaaugaugcagcuggacccaagugcuaaaaccuggauugauaucgagggacguccggaagaccccguugagauugcccucuaccagccuauguccggcugcuauauccacuucuuucgcgaaccaacugaccugaagcaguucaagcaagaugcgaaauacagccaugguaucgacguggccgaucuuuuucccgcacagccugggcugacaucugcugucauugaggccuugccaagaaauauggugcucaccugucagggcucagacgauauaaagaggcuguuagacagucagggacggcgagauaucaaacugauugacaucgcucuaaacaaggccgauagccgcagauucgaaaaugcaguaugggaccaaugcaaagaucucugucacaugcauacgggcguuguggucgagaagaagaaaaggggagggaaggaggaaauaacaccccacugcgcccugauggacuguauuauguaugaugcugcgguguccgguggccuuaacaucccggucuugcgggcagugcugccucgcgacaugguuuuuagaaccucuucgcccaaagugguacucuga

SEQ ID NO: 8684 - RNA, 1710 nt, Artificial Sequence
  derived and/or modified CDS sequence (opt3) from LASV(LASV966-NIG-2009;Clade II)__AIT17719__NP
augagcgccuccaaggaggugaaaucuuuccuguggacccagucacucagaagggaacuuaguggcuacugcagcuccaucaagcugcaagucguuaaagacgcucaggcauuguuacacgggcuggauuuuucugaggugucgaacguacagcggcuaaugcgcaagcagaaacgagacgauucagaccucaagcgucugagagaucuuaaucaagccgugaacaaucuggucgaacuuaagagcacacagcagaaaaguauucucagggugggaacucugacguccgacgaucugcucaccuuagcggcugaccuggagaaguugaaaucuaagguuauacggacagaacgccccuugagcuccgguguguauaugggcaaccugucaacucagcaacuagagcagagaagggcccuccugaauaugaucgggauggucaguggagcacagggcacccagccuggucgggauggggugguacgcguuugggacgugaaaaacccagagcuucugaauaaccaauucggaacaaugccgagcuugacccucgccugucugacuaagcagggccaggucgauuuaaaugacgcugugcuggcacucacagaucuuggccugauuuacaccgccaaguaucccaacucuuccgacuuggaccgacuaucacaaagccauccuauccugaauaugguggauacgaaaaagaguucucucaacauuuccggguacaauuuuagccugggagcugccgucaaagcgggugcaugcaugcuugacggcgggaacaugcuggaaacuaucaagguuaccccacagacaauggauggaauauugaaaucgauccucaaggugaaaaagucucugggcauguucguauccgacacucccggugagagaaauccuuaugaaaacauuuuauacaagaucugucugucaggggauggauggccauauauugccaguaggaccagcaucgugggccgggcuugggagaacacaaccgucgaccuagaguccgauggcaaaccccagaagguggggacggccggaucuaauaaaagccuccagucagcagguuuuccuacuggccugacauacagucaacuuaugaccuugaaggacuccaugaugcagcuggauccaagcgcuaaaacuuggauagacauugaagggcguccggaggaucccguugaaaucgcccucuaccagccuaugucuggaugcuauauucacuucuuucgcgagccaacagaccugaagcaguucaagcaagacgcgaaauacucacauggcaucgauguggccgaccuuuuucccgcacagccuggucugaccagugcugucaucgaagccuugccaagaaacauggugcucacgugucaggggagcgaugacauuaagaggcuguuagauucccagggccggcgagacauaaaacugaucgauauuucucuaucgaaggcugacagccgcagauucgagaaugccguaugggaucaaugcaaagaccucugucacaugcauaccggaguuguggucgagaagaagaaaaggggcgggaaggaagagaucacaccccacugcgcacugauggauuguauaauguaugacgccgcuguguccggaggucuuaacauuccggucuugcgggcggugcugccucgcgauaugguuuuuagaacuucaagucccaaagugguacucuga

SEQ ID NO: 8685 - RNA, 1710 nt, Artificial Sequence
  derived and/or modified CDS sequence (opt3) from LASV(LASV969-NIG-2009;Clade II)__AIT17725__NP
augagcgccuccaaggaggugaaaucuuuccuguggacccagucacucagaagggaacuuaguggcuacugcagcaacaucaagcugcaagucguuaaagacgcucaggcauuguuacacgggcuggauuuuuccgaggugucuaauguacagcggcuaaugcgcaagcagaaacgagacgauucggaccucaagcgucugagagaucuuaaccaagccgugaauaaccuggucgaauugaagucaacacagcagaaaagcauucucagggugggaacucugacgagugacgaucugcucaccuuagcggcugaccuggagaaacuuaaguccaagguuauacggacagaacgccccuugucuagcgguguguauaugggcaaucuguccgcccagcaacuagagcagagaagggcacuccugaacaugaucgggauggucggaggcgcccaggguacucagcuugggcgggauggagugguacgcguuugggacgugaaaaauccugaucuguugaacaaucaauucggcaccaugccaucacucacacuggcuuguuuaaccaagcagggccaggucgaccugaacgaugcagugcucgcccuuacugaccugggguugauuuacacagcuaaguauccgaauaguagcgaccuagaucgacugucucaaucccaucccauccucaacaugguggacaccaaaaagucaagccugaauauuaguggauacaacuuuucucuuggugccgcggucaaagcaggcgccugcaugcuggaugggggaaauauguuggagacgaucaagguuacuccucagaccauggacggcauacucaaauccauccugaaggugaaaaagagcuuagguauguucguaucggauacaccaggggaaagaaaccccuaugagaacauucuguacaagaucugucuaucuggagacggcuggccuuauauugcuuccaggacuucaaucgugggccgggccugggaaaauaccacagucgaucucgagagugacgggaaaccacagaaggugggaaccgcagguagcaacaaaucccugcagucugcuggcuuucccacggggcuuacuuacagccaauugaugacacugaaggauucaaugaugcagcucgacccuagugccaaaaccuggauagauauugagggacguccagaagacccgguugagaucgcgcuguaccagcccauguccggcugcuauauucacuucuuucgcgaaccuacugaccuuaagcaguucaagcaagaugccaaauacagccaugguaucgacguggcagaucuguuuccagcucagcccggguugacaucugccgucaucgaggcucucccuagaaauauggugcugaccugucagggcucagaagacauuaagagguuacuggauagucagggacggcgagacauaaaacuaaucgauauugcccucagcaaggcagacucccgcagauucgagaacgccguaugggaucaaugcaaagaccugugucacaugcauacgggcguuguggucgagaagaagaaaaggggagggaaggaagagaucaccccacacugcgcucuuauggauuguauaauguaugacgcggcagugucugguggcuugaauauucccguccugcgggccgugcucccgcgcgauaugguuuuuagaacaucgagcccuaaagugguacuguga

SEQ ID NO: 8686 - RNA, 1710 nt, Artificial Sequence
  derived and/or modified CDS sequence (opt3) from LASV(LASV971-NIG-2009;Clade II)__AIT17729__NP
augagcgccuccaaggaggugaaaucuuuccuguggacccagucacucagaagggaacuuaguggcuacugcagcuccaucaagcugcaagucguuaaagacgcucaggcauuguuacacgggcuggauuuuucugaggugucgaacguacagcggcuaaugcgcaagcagcgacgugacgauucagaccucaaaagacugagggaucuuaaucaagccgugaacaaucuggucgaacucaagagcacacagcagaagaguauuuugcgggugggaacucugacguccgacgaucugcucaccuuagcggcugaccuggagaaacuuaagucuaaaguuauacgcacagaaagacccuugagcuccgguguguauaugggcaaccugucaacucagcaacuagagcagaggcgggcccuccugaauaugaucgggauggucggaggcacccaggguacacagccugggcgcgauggagugguacgaguuugggacgugaagaacccagaucuucugaauaaccaauucggcaccaugccgaguuugacucucgcaugucugacaaaacagggccaggucgacuuaaaugaugccgugcuggcucucaccgaccuugggcugauuuacacggcaaaguaucccaacagcucugacuuggauagacuaucccaaucacauccuauccugaauaugguggacacuaagaaaagcagucucaacauuucuggauacaauuuuucccugggugccgcugucaaggccggcgcgugcaugcuugaugggggaaacaugcuggagaccaucaaaguuacaccacagacuauggacggcauacucaagagcaucuugaaagugaagaggucgcuggguauguucguaucugauacccccggggaacggaauccuuaugagaacauuuuauacaaaaucugucuguccggagacggcuggccauauauugcaucacguacaaguaucgugggccgcgccugggaaaacaccacggucgaucuagagagcgacgggaagccccagaaggugggaacugcugguuccaauaaaucucuccagagcgccggcuuuccuacagggcugaccuacucacaacuuaugacuuugaaggauaguaugaugcagcuggacccauccgcaaaaacauggauagauauugagggaagaccggaagaccccguugagaucgcucucuaccagccuaugagcggcugcuauauucacuucuuuagggaaccaaccgaccugaagcaguucaaacaagaugccaaguacucucaugguaucgacguggcggaucuuuuucccgcccagccugggcugacgucagcagucaucgaggcuuugccacggaacauggugcucaccugucagggcagugacgauauuaagcgacuguuagacagccagggacgcagagauauaaaacugaucgacauugcccuauccaaggcugauucuaggaaauucgaaaaugccguaugggaccaaugcaaggaucucugucacaugcauacaggcguuguggucgagaaaaagaagcgcgggggaaaagaggaaaucacuccccacugcgcacugauggacuguauaauguaugaugccgcugugucggguggccuuaacauuccggucuugcgggcggugcugccuagagacaugguuuuuaggaccagcucccccaaggugguacucuga

SEQ ID NO: 8687 - RNA, 1710 nt, Artificial Sequence
  derived and/or modified CDS sequence (opt3) from LASV(LASV975-NIG-2009;Clade II)__AIT17733__NP
augagcgccuccaaggaggugaaaucuuuccuguggacccagucacucagaagggaacuuaguggcuacugcagcaacaucaagcugcaagucguuaaagacgcucaggcauuguuacacgggcuggauuuuuccgaggugucuaauguacagcggcuaaugcgcaagcagaaacgagacgauucggaccucaagcgucugagagaucuuaaccaagccgugaauaaccuggucgaauugaagucaacacagcagaaaagcauucucagggugggaacucugacgagugacgaucugcucauauuagcggcugaccuggagaaacuuaaguccaagguuauccggaccgaacgccccuugucuagcgguguguauaugggcaaucuguccacacagcaacuagagcagagaagggcccuccugaacaugauugggauggucggaggcgcacaggguacucagccugggcgggauggagugguacgcguuugggacgugaaaaauccagaucuucugaacaaucaauucggcaccaugccgucauugacacucgccugucugaccaagcagggccaggucgacuuaaacgaugcugugcuggcacucacugaccuugggcugaucuacacagccaaguaucccaauaguagcgacuuggaucgacuaucucaaucccauccuauucugaacaugguggacaccaaaaagucaagccucaauaucaguggauacaacuuuucucugggugcugccgucaaagcgggcgcaugcaugcuugaugggggaaauaugcuggagacgauaaagguuacuccacagaccauggacggcaucuugaaauccauucucaaggugaaaaagagccuggguauguucguaucggauacacccggggaaagaaacccuuaugagaacaucuuauacaagauuugucugucuggagacggcuggccauauaucgccuccaggacuucaauagugggccgggcuugggaaaauaccacagucgaucuagagagugacgggaaaccccagaaggugggaaccgccgguagcaacaaaucccuccagucugcaggcuuuccuacggggcugacuuacagccaacuuaugacauugaaggauucaaugaugcagcuggacccaagugcuaaaaccuggauugauaucgagggacguccggaagaccccguugagauugcccucuaccagccuauguccggcugcuauauccacuucuuucgcgaaccaacugaccugaagcaguucaagcaagaugcgaaauacagccaugguaucgacguggccgaucuuuuucccgcacagccugggcugacaucugcugucauugaggccuugccaagaaauauggugcucaccugucagggcucagacgauauaaagaggcuguuagacagucagggacggcgagauaucaaacugauugacaucgcucuaagcaaggccgauucccgcagauucgaaaacgcaguaugggaccaaugcaaagaucucugucacaugcauacgggcguuguggucgagaagaagaaaaggggagggaaggaggaaauaacaccccacugcgcccugauggacuguauuauguaugaugcugcggugucugguggccuuaauaucccggucuugcgggcagugcugccucgcgacaugguuuuuagaaccucgagccccaaagugguacucuga

SEQ ID NO: 8688 - RNA, 1710 nt, Artificial Sequence
  derived and/or modified CDS sequence (opt3) from LASV(LASV978-NIG-2009;Clade II)__AIT17745__NP
augagcgccuccaaggagaucaaaucuuuccuguggacccagucacucagaagggaacuuaguggcuacugcagcuccauuaagcugcaaguggucaaagacgcucaggcauuguuacacgggcuggauuuuucugagguuucgaacgugcagcggcuaaugcgcaagcagaaacgagacgauucagaccucaagcgucugagagaucuuaaucaagccguaaacaaucugguggaacuuaagagcacacagcagaaaaguauacucagggucggaacucugacguccgacgaucugcucaccuuagcggcugaccuggagaaguugaaaucuaaggugauccggacagaacgccccuugagcuccgguguuuauaugggcaaccugucaacucagcaacuagagcagagaagggcccuccugaauaugauugggauggugggaggcgcacaggguacccagccugggcgggauggagucgugcgcguaugggacguuaaaaacccagaucuucugaauaaccaauucggcacaaugccgaguuugacccucgccugucugacuaagcagggccagguggacuuaaaugaugcuguccuggcacucacagaccuugggcugaucuacaccgccaaguaucccaacagcucugacuuggaucgacuaucccaaucacauccuauucugaauaugguggacacgaaaaagagcagucucaacaucucuggauacaauuuuucccugggugcugccgugaaagcgggcgcaugcaugcuugaugggggaaacaugcuggagacuauaaaggucaccccacagacaauggacggcaucuugaaaagcauucucaagguuaaaagaucgcuggguauguucgugucugaugcccccggggaaaggaauccuuaugagaacaucuuauacaagauuugucuguccggagacggcuggccauauaucgcuucacggaccaguauaguaggccgugccugggaaaacaccacaguggaucuagagagcgacgggaagccccagaaagucggaaccgcagguuccaauaagucucuccagagcgcuggcuuuccuacggggcugacuuacucacaacuuaugacauugaaagauaguaugaugcagcuggacccauccgccaagaccuggauugauaucgagggacgcccggaagaccccguggagauugcgcucuaccagccuaugagcggcugcuauauccacuucuuuagagaaccaacugaccugaaacaguucaagcaagaugccaaguacucucaugguaucgacguugcagaucuuuuucccgcucagccugggcugacaucagccgugauugaggcuuugccaaggaacaugguccucaccugucagggcagugacgauauaaaacggcuguuagacagccagggacgacgcgauaucaagcugauugacaucgcccuauccaaaguggauucuagaagguucgaaaaugcaguaugggaccaaugcaaggaucucugucacaugcauacgggcguuguggucgagaaaaagaagcgcgggggaaaagaggaaauaacuccccacugcgcccugauggacuguauuauguaugaugcugcggugucggguggccuuaacaucccggucuugcgggcagugcugccuagagacaugguuuuuaggacaagcucccccaaggugguacucuga

SEQ ID NO: 8689 - RNA, 1710 nt, Artificial Sequence
  derived and/or modified CDS sequence (opt3) from LASV(LASV981-NIG-2009;Clade II)__AIT17753__NP
augagcgccuccaaggaggugaaaucuuuccuguggacccagucacucagaagggaacuuaguggcuacugcagcuccaucaagcugcaagucguuaaagacgcucaggcauuguuacacgggcuggauuuuucugaggugucgaacguacagcggcuaaugcgcaagcagaaacgagacgauucagaccucaagcgucugagagaucuuaaucaagccgugaacaaucuggucgaacuuaagagcacacagcagaaaaguauucucagggugggaacucugacguccgacgaucugcucaccuuagcggcugaccuggagaaguugaaaucuaagguuauacggacagaacgccccuugagcuccgguguguauaugggcaaccugucaacucagcaacuagagcagagaagggcccuccugaauaugaucgggauggucggaggcgcacaggguacccagccugggcgggauggagugguacgcguuugggacgugaaaaacccagaucuucugaauaaccaauucggcacaaugccgaguuugacccucgccugucugacuaagcagggccaggucgacuuaaaugaugcugugcuggcacucacagaccuugggcugauuuacaccgccaaguaucccaacagcucugacuuggaucgacuaucccaaucacauccuauccugaauaugguggacacgaaaaagagcagucucaacauuucuggauacaauuuuucccugggugcugccgucaaagcgggcgcaugcaugcuugaugggggaaacaugcuggagacuaucaagguuaccccacagacaauggacggcauauugaaaagcauccucaaggugaaaagaucgcuggguauguucguaucugauacucccggggaaaggaauccuuaugagaacauuuuauacaagaucugucuguccggagacggcuggccauauauugccucacggaccaguaucgugggccgugcuugggaaaacacaaccgucgaucuagagagcgacgggaagccccagaaagugggaacgacugguuccaauaagucucuccagagcgccggcuuuccuacagggcugaccuacucacaacuuaugacuuugaaagauaguaugaugcagcuggacccauccgcaaagacauggauagauauugagggacgcccggaagaccccguugagaucgcucucuaccagccuaugagcggcugcuauauucacuucuuuagagaaccaaccgaccugaaacaguucaagcaagaugccaaguacucucaugguaucgacguggcggaucuuuuucccgcccagccugggcugacgucagcagucaucgaggcuuugccaaggaacauggugcucaccugucagggcagugacgauauuaaacggcuguuagacagccagggacgacgcgauauaaagcugaucgacauugcccuauccaaagcugauucuagaagguucgaaaaugccguaugggaccaaugcaaggaucucugucacaugcauacaggcguuguggucgagaaaaagaagcgcgggggaaaagaggaaaucacuccccacugcgcacugauggacuguauaauguaugaugccgcugugucggguggccuuaacauuccggucuugcgggcggugcugccuagagacaugguuuuuaggaccagcucccccaaggugguacucuga

SEQ ID NO: 8690 - RNA, 1710 nt, Artificial Sequence
  derived and/or modified CDS sequence (opt3) from LASV(LASV988-NIG-2009;Clade II)__AIT17759__NP
augagcgccuccaaggaggugaaaucuuuccuguggacccagucacucagaagggaacuuaguggcuacugcagcaacaucaagcugcaagucguuaaagacgcucaggcauuguuacacgggcuggauuuuuccgaggugucuaauguacagcggcuaaugcgcaagcagaaacgagacgauucggaccucaagcgucugagagaucuuaaccaagccgugaauaaccuggucgaauugaagucaacacagcagaaaagcauucucagggugggaacucugacgagugacgaucugcucaccuuagcggcugaccuggagaaacuuaaguccaagguuauacggacagaacgccccuugucuagcgguguguauaugggcaaucugaacacucagcaacuagagcagagaagggcccuccugaauaugaucgggauggcaggaggcgcccaggguacccagccugggcgggauggagucgugcgcguaugggacguuaaaaacccagaucuucugaauaaccaauucggcacaaugccguccuugacccucgcuugucugacuaagcagggccagguggacuuaaaugaugcaguccuggcccucacagaccuugggcugauuuacaccgcuaaguaucccaacucaagugacuuggaucgacuaagccaaucucauccuauccugaauaugguggacacgaaaaaguccucacucaacauuagcggauacaauuuuagucugggugccgcggugaaagcaggcgccugcaugcuugaugggggaaacaugcuggagacuaucaaggucaccccacagacaauggacggcauauugaaaucuauccucaagguuaaaaagucccuggguauguucgugagcgauacucccggggaaagaaacccuuaugagaauauuuuauacaagaucugucugucgggagacggcuggccauauauugcuucuaggaccuccaucguaggccgggccugggaaaacacaaccguggaucuagagucagacgggaaaccccagaaggucggaacggcagguaguaauaaaagccuccaguccgcuggcuuuccuacugggcugacauacucucaacuuaugaccuugaaggauagcaugaugcagcuggacccaucagccaaaacuuggauagauauugagggacguccggaagaccccguggagaucgcgcucuaccagccuaugaguggcugcuauauucacuucuuucgcgaaccaacagaccugaagcaguucaagcaagaugccaaauacucccaugguaucgacguugcagaucuuuuucccgcucagccugggcugaccagcgccgugaucgaggcuuugccaagaaacaugguccucacgugucagggcucugacgauauuaagaggcuguuagacucacagggacggcgagauauaaaacugaucgacauugcccuaaguaaggcagauagccgcagauucgaaaaugccgugugggaccaaugcaaagaucucugucacaugcauaccggcguaguuguggagaagaagaaaaggggagggaaggaggaaaucacaccccacugcgcucugauggacuguauaauguaugaugcggcagucuccgguggccuuaacauuccgguguugcgggccguccugccucgcgacaugguguuuagaacuucuucgcccaaaguugugcucuga

SEQ ID NO: 8691 - RNA, 1710 nt, Artificial Sequence
  derived and/or modified CDS sequence (opt3) from LASV(LASV989-NIG-2009;Clade II)__AIT17763__NP
augagcgccuccaaggaggugaaaucuuuccuguggacccagucacucagaagggaacuuaguggcuacugcagcuccaucaagcugcaagucguuaaagacgcucaggcauuguuacacgggcuggauuuuucugaggugucgaacguacagcggcuaaugcgcaagcagaaacgagacgauucagaccucaagcgucugagagaucuuaaucaagccgugaacaaucuggucgaacuuaagagcacacagcagaaaaguauucucagggugggaacucugacguccgacgaucugcucaccuuagcggcugaccuggagaaguugaaaucuaagguuauacggacagaacgccccuugagcuccgguguguauaugggcaaccugucaacucagcaacuagagcagagaagggcccuccugaauaugaucgggauggucggaggcgcacaggguacccagccugggcgggauggagugguacgcguuugggacgugaaaaacccagaucuucugaauaaccaauucggcacaaugccgaguuugacccucgccugucugacuaagcagggccaggucgacuuaaaugaugcugugcuggcacucacagaccuugggcugauuuacaccgccaaguaucccaacagcucugacuuggaucgacuaucccaaucacauccuauccugaauaugguggacacgaaaaagagcagucucaacauuucuggauacaauuuuucccugggugcugccgucaaagcgggcgcaugcaugcuugaugggggaaacaugcuggagacuaucaagguuaccccacagacaguggacggcauauugaaaagcauccucaagguaaaaagaucgcuggguauguucgugucugauacucccggggaaaggaauccuuaugagaacauuuuauacaagaucugucuguccggagacggcuggccauauauugccucacggaccaguaucgucggccgugcuugggaaaacacaaccguggaucuagagagcgacgagaagccccagaaaguuggggccgcaggauccaauaagucucuccagagcgcugguuuuccuacgggccugacuuacucacaacuuaugacauugaaagauaguaugaugcagcuggacccauccgccaagaccuggauagauauugaagggcgcccggaggaccccguggaaaucgcgcucuaccagccuaugagcggaugcuauauucacuucuuuagagagccaacugaccugaaacaguucaagcaagaugccaaguacucucauggcaucgacgucacagaucuuuuucccgcacagccuggucugaccucagcugugaucgaagccuugccaaggaacaugguacucacgugucaggggagugacgauauuaaacggcuguuagacagccagggccgacgcgauauaaagcugaucgacauugcucuauccaaagccgauucuagaagguucgagaaugcaguuugggaccaaugcaaggaucucugucacaugcauaccggaguggucguggagaaaaagaagcggggcgggaaagaagagaucacaccccacugcgcccugauggacuguauaauguaugaugcugcggucucgggaggucuuaacauuccgguguugcgcgcaguucugccuagagacaugguguuuaggacuagcucccccaagguaguccucuga

SEQ ID NO: 8692 - RNA, 1710 nt, Artificial Sequence
  derived and/or modified CDS sequence (opt3) from LASV(LASV991-NIG-2009;Clade II)__AIT17771__NP
augagcgccuccaaggaggugaaaucuuuccuguggacccagucacucagaagggaacuuaguggcuacugcagcuccaucaagcugcaagucguuaaagacgcucaggcauuguuacacgggcuggauuuuucugaggugucgaacguacagcggcuaaugcgcaagcagaaacgagacgauucagaccucaagcgucugagagaucuuaaucaagccgugaacaaucuggucgaacuuaagagcacacagcagaaaaguauucucagggugggaacucugacguccgacgaucugcucaccuuagcggcugaccuggagaaguugaaaucuaagguuauacggacagaacgccccuugagcuccgguguguauaugggcaaccugucaacucagcaacuagagcagagaagggcccuccugaauaugaucgggauggucggaggcgcacaggguacccagccugggcgggauggagugguacgcguuugggacgugaaaaacccagaucuucugaauaaccaauucggcacaaugccgaguuugacccucgccugucugacuaagcagggccaggucgacuuaaaugaugcugugcuggcacucacagaccuugggcugauuuacaccgccaaguaucccaacagcucugacuuggaucgacuaucccaaucacauccuauccugaauaugguggacacgaaaaagagcagucucaacauuucuggauacaauuuuucccugggugcugccgucaaagcgggcgcaugcaugcuugaugggggaaacaugcuggagacuaucaagguuaccccacagacaauggacggcauauugaaaagcauccucaaggugaaaagaucgcuggguauguucguaucugauacucccggggaaaggaauccuuaugagaacauuuuauacaagaucugucuguccggagacggcuggccauauauugccucacggaccaguaucgugggccgugcuugggaaaacacaaccgucgaucuagagagcgacgggaagacgcagaaaguguccacugccggaucuaauaagagccuccagucagcagguuuucccacaggccugaccuacagucaacuuaugacuuugaaagauuccaugaugcagcuggacccuagcgcuaagacauggauagauauugaggggcgcccagaagacccgguugagaucgcccucuaccagcccaugucuggaugcuauauucacuucuuuagagaaccuaccgaccugaaacaguucaagcaagaugcgaaguacucacauggcaucgacgugacggaucuuuuuccagcccagcccggucugaccagugcagucaucgaggcuuugccuaggaacauggugcucacaugucaggggagcgacgauauuaaacggcuguuagacucccagggccgacgcgauauaaagcugaucgacauugcccuaucuaaagcugauucgagaagguucgaaaaugccguaugggaccaaugcaaggaucucugucacaugcauacuggaguuguggucgagaaaaagaagcggggcgggaaagaggaaaucaccccacacugcgcacugauggacuguauaauguaugaugccgcugugagcggaggucuuaacauucccgucuugcgcgcggugcugccgagagacaugguuuuuaggacauccucaccuaaggugguacucuga

SEQ ID NO: 8693 - RNA, 1710 nt, Artificial Sequence
  derived and/or modified CDS sequence (opt3) from LASV(LASV993-NIG-2009;Clade II)__AIT17779__NP
augagcgccuccaaggaggugaaaucuuuccuguggacccagucacucagaagggaacuuaguggcuacugcagcaacaucaagcugcaagucguuaaagacgcucaggcauuguuacacgggcuggauuuuuccgaggugucuaauguacagcggcuaaugcgcaagcagaaacgagacgauggagaccucaagcgucugagagaucuuaaccaagccgugaauaaccuggucgaauugaagucgacacagcagaaaucaauucucaggguggguacucugacgagcgacgaucugcucaccuuagcggcugaccuggagaaacuuaagaguaagguuauacggacagaacgccccuuguccucuggcguguauauggggaaucugagcacucagcaacuagagcagagaagggcccuccugaacaugaucggaauggucggcggugcacaggggacccagccuggacgggauggcgugguacgcguuugggacgugaaaaauccagaucuucugaacaaucaauucggcacaaugccguccuugacccucgccugucugacuaagcaggggcaggucgacuuaaacgaugcugugcuggcacucacagaccuuggacugauuuacaccgccaaguaucccaauucaagugacuuggaucgacuaagccaaucucauccuauccugaacaugguggacacgaaaaaguccucacucaauauuagcgguuacaacuuuagucugggcgcugccgucaaagcgggggcaugcaugcuugauggaggcaauaugcuggagacuaucaagguuaccccacagacaauggacgguauauugaaaucuauccucaaggugaaaaagucccuggggauguucguaagcgauacucccggagaaagaaacccuuaugagaacauuuuauacaagaucugucugucgggcgacggcuggccauauauugccucuaggaccuccaucguggggcgggcuugggaaaauacaaccgucgaucuagagucagacggaaaaccccagaagguggguacggccggcaguaacaaaagccuccaguccgcaggguuuccuacuggacugacauacucucaacuuaugaccuugaaggauagcaugaugcagcuggacccaucagcuaaaacuuggauagauauugagggccguccggaagaccccguugagaucgcccucuaccagccuaugagugguugcuauauucacuucuuucgcgaaccaacagaccugaagcaguucaagcaagaugcgaaauacucccaugggaucgacgugaccgaucuuuuuagcgcccagcccggccugacgucugcagucaucgaggcuuugccuagaaauauggugcucaccugucagggaucagacgauauuaagaggcuguuagacagucagggccggcgagauauaaaacugaucgacauugcccuaagcaagacagauucccgcagauucgaaaacgcuguaugggaccaaugcaaagaucucugucacaugcauacugggguuguggucgagaagaagaaaaggggagguaaggaggaaaucaccccacacugcgcccugauggacuguauaauguaugaugcagccgugucuggcgggcuuaauauucccgucuugcgggcugugcugccgcgcgacaugguuuuuagaacaucgagcccuaaagugguacucuga

SEQ ID NO: 8694 - RNA, 1710 nt, Artificial Sequence
  derived and/or modified CDS sequence (opt3) from LASV(Nig08-04;Clade II)__ADU56611__NP
augagcgccuccaaggaggugaaaucuuuccuguggacccagucacucagaagggaacuuaguggcuacugcagcaacaucaagcugcaagucguuaaagacgcucaggcauuguuacacgggcuggauuuuuccgaggugucuaauguacagcggcuaaugcgcaagcagaaacgagacgauggagaccucaagcgucugagagaucuuaaccaagccgugaauaaccuggucgaauugaagucgacacagcagaaaucagugcucaggguugguacucugacgagcgacgaucugcucaccuuagcggcugaccuggagaaacuuaagaguaaggugauucggacagaacgccccuuguccucuggcgucuauauggggaaucugagcacucagcaacuagagcagagaaaagcccuccuguccaugauaggaauggugggcggugcacaggggacccagccuggaagggauggcguaguucgggugugggacgucaagaacccagaucuucugaauaaccaauucggcacaaugccgucauugacccucgccugucugacuaagcagggacagguggacuuaaaugaugcugugcuggcacucacagaccuugggcugaucuacaccgccaaauaucccaacaguagcgacuuggaucgccuaucucaaucccauccuauucugaauauggucgacacgaagaaaucaagccucaacaucagugguuacaauuuuucucugggcgcugccguuaaggcgggggcaugcaugcuugauggaggcaacaugcuggagacuauuaaagugaccccacagacaauggacgguaucuugaaguccauacucaaaguaaagcgaagccuggggauguucgugucggauacucccggagaaagaaauccuuaugagaacaucuuauacaagauuugucugucuggcgacggcuggccauauaucgccuccaggaccucaauugucgggcgggcuugggaaaacacaaccguggaucuagagagugacggaaaaccccagaagguugguacggccggcagcaauaaaucccuccagucugcaggguuuccuacuggacugacauacagccaacuuaugaccuugaaggauucaaugaugcagcuggacccaagugcuaaaacuuggaucgauauagagggccguccggaagaccccguggagauugcccucuaccagccuauguccgguugcuauauccacuucuuucgcgaaccaacagaccugaagcaguucaagcaagaugcgaaauacagccaugggauugacgucaccgaucuguuuucugcccagcccggccuuacgucagcagugaucgaggcuuugccuagaaacaugguacucaccugucagggaagugacgauaucaagaaacuguuagacagccagggcaggcgggauauuaagcugauagacaucucccuaaauaaagccgauucucgacgcuucgaaaacgcuguuugggaccaaugcaaggaucucugucacaugcauacagggguggucguggagaagaaaaagagaggagguaaagaggaaauuacuccacacugcgcccugauggacuguaucauguuugaugcagccgucucgggcgggcuuaauauacccauuuugagggcugugcugccgcgggacaugguuuuccgcaccagcuccccuaaggugguacucuga

SEQ ID NO: 8695 - RNA, 1710 nt, Artificial Sequence
  derived and/or modified CDS sequence (opt3) from LASV(Nig08-A47;Clade II)__ADU56631__NP
augagcgccuccaaggaggugaaaucuuuccuguggacccagucacucagaagggaacuuaguggcuacugcagcaacaucaagcugcaagucguuaaagacgcucaggcauuguuacacgggcuggauuuuuccgaggugucuaauguacagcggcuaaugcgcaagcagaaacgagacgauucggaccucaagcgucugagagaucuuaaccaagccgugaauaaccuggucgaauugaagucaacacagcagaaaagcauucucagggugggaacucugacgagugacgaucugcucaccuuagcggcugaccuggagaaacuuaaguccaagguuauacggacagaacgccccuugucuagcgguguguauaugggcaaucuguccacucagcaacuagagcagagaagggcccuccugaacaugaucgggauggucggaggcgcacaggguacccagccugggcgggauggagugguacgcguuugggacgugaaaaauccagaucuucugaacaaucaauucggcacaaugccgucauugacccucgccugucugacuaagcagggccaggucgacuuaaacgaugcugugcuggcacucacagaccuugggcugauuuacaccgccaaguaucccaauaguagcgacuuggaucgacuaucucaaucccauccuauccugaacaugguggacacgaaaaagucaagccucaauauuaguggauacaacuuuucucugggugcugccgucaaagcgggcgcaugcaugcuugaugggggaaauaugcuggagacuaucaagguuaccccacagacaauggacggcauauugaaauccauccucaaggugaaaaagagccuggguauguucguaucggauacucccggggaaagaaacccuuaugagaacauuuuauacaagaucugucugucuggagacggcuggccauauauugccuccaggaccucaaucgugggccgggcuugggaaaauacaaccgucgaucuagagagugacgggaaaccccagaaggugggaacggccgguagcaacaaaucccuccagucugcaggcuuuccuacugggcugacauacagccaacuuaugaccuugaaggauucaaugaugcagcuggacccaagugcuaaaacuuggauagauauugagggacguccggaagaccccguugagaucgcccucuaccagccuauguccggcugcuauauucacuucuuucgcgaaccaacagaccugaagcaguucaagcaagaugcgaaauacagccaugguaucgacgugaccgaucuuuuucccgcccagccugggcugacgucugcagucaucgaggcuuugccaagaaauauggugcucaccugucagggcucagacgauauuaagaggcuguuagacagucagggacggcgagauauaaaacugaucgacauugcccuaagcaaggcugauucccgcagauucgaaaacgccguaugggaccaaugcaaagaucucugucacaugcauacaggcguuguggucgagaagaagaaaaggggagggaaggaggaaaucacuccccacugcgcacugauggacuguauaauguaugaugccgcugugucugguggccuuaauauuccggucuugcgggcggugcugccucgcgacaugguuuuuagaaccucgagccccaaagugguacucuga

SEQ ID NO: 8696 - RNA, 1713 nt, Artificial Sequence
  derived and/or modified CDS sequence (opt3) from LASV(GA391;Clade III)__AAA46284__NP
augagcgccuccaaggaggugagaucuugccuguggacccagucacucaggcgggaacuuaguggcuacuguagcaacaucaaacugcaagucguuaaggacgcucaggcauuguuacacgggcuggauuucuccgaggugucuaauguacagcgccuaaugcgaaaacagaagcgugacgauggagaccucaaaagacugagggaucuuaaccaagccgugaauaaccuggucgaauugaagucgacacagcagaagucagugcuccggguugguacucugagcagugacgaucugcucauuuuagcggcugaccuggagaaacuuaaguccaaagugacgcgcaccgaaagacccuugucuagcggcgucuauauggggaaucuguccucacagcaacuagaucagaggcgggcccuccugaacaugauaggaaugacaggcgugaguggugggggaaagggcgcaagcaauggcaucguacgcguuugggacgugaaaaacgccgagcuucugaauaaccaguuugggacuaugccuucuuugacccucgcuugccugacaaagcagggacaagucgauuuaaaugacgcagugcaggcccugaccgaucucggucuuauuuacacugcuaaguauccaaacuccucagaccuggaccgauugagccagagucauccgauccuaaauaugauugauaccaaaaagucuucccugaacaucagcggcuacaauuucucgcucggggccgcggugaaagcaggagccuguaugcuggacggcgguaacaugcuugagacaauaaaggucucuccccaaacgauggaugggauccugaaauccauuuugaagguuaaaaagucacucggaauguuugugagugacacuccuggcgaaagaaacccauaugagaauauccuguacaagauuugcuuaagcggcgaugggugguccuauaucgcuucuaggaccagcauaguaggacgggccugggaaaacacaguggucgaccuggagcaggauaauaaaccccagaagauugguaacggcgggucaaauaaaagucuacaguccgcaggauucgcugccggccucaucuacagccaacugaugacucuuaaggacuuuaaauguuucaacuugauuccuaaugcgaagaccuggauggauaucgagggucguccagaagaccccguggagaucgcccuguaccagccuucuucagggugcuauguucacuuuuuccgcgaaccaacagaucucaagcaguuuaaacaggacgcaaaguacagucauggcagagacgugaccgaucuguucgcugcccaaccgggacuuacgagcgcugucauugaggcccugcccaggaacauggugauaacuugucagggcuccgaagacauccggaaauugcucgagucucaggggcgacgcgauauuaagcugaucgacauaacauuaucgaaagcagauagcagaaaguuugagaaugccguaugggaccaguucaaggaucugugccacaugcauaccggaguuguggucgagaaaaagaaaagggguggcaaggaagaaauuacuccucacugugcucuaauggacugcaucauguuugaugcggcaguguccgggggacucgacgccaaaguccugcgggugguucuuccacgcgauaugguguucagaacaucaacccccaagguagucuuguga

SEQ ID NO: 8697 - RNA, 1710 nt, Artificial Sequence
  derived and/or modified CDS sequence (opt3) from LASV(ISTH2121-NIG-2012;Clade III)__AIT17541__NP
augagcgccuccaaggaggugaaaucuuuccuguggacccagucacucagaagggaacuuaguggcuacugcagcaacaucaagcugcaagucguuaaagacgcucaggcauuguuacacgggcuggauuuuuccgaggugucuaauguacagcggcuaaugcgcaagcagaaacgagacgauggagaccucaagcgucugagagaucuuaaccaagccgugaauaaccuggucgaauugaagucgacacagcagaaaucagugcucaggguugguacucugagcagugacgaucugcucacguuagcggcugaccuggagaaacuuaaguccaaggugauucggaccgaacgccccuugucuagcggcgucuauauggggaaucuguccucacagcaacuagaucagagaagggcccuccugaacaugauaggaaugacaagugaccggcagggcgcaagcacuggucgcgaugggaucgugcgaguaugggacguuaaaaaugccgagcuucugaacaaucaguucggaaccgugccuucuuugacacucgcuugucugaccaagcaaggccaggucgauuuaaacgacgcagugcaggcccugacugaccucggccuuauuuacacagcuaaguauccaaauuccucagaucuggacagauugagccaaagucauccgauccuaaacaugauugauaccaaaaagucuucccugaauaucagcggguacaacuuuucgcucggagccgcggugaaagcuggugccugcaugcuggacggcgggaauaugcuugagacgauaaaggucucuccccagacuauggauggaauccugaaauccauuuugaagguuaaaaggucacucggcauguucgugagugacaucccuggugaacggaacccauaugagaacauucuguacaagaucuguuuaagcggggauggauggcccuauauagcuucccguaccucuauuacaggccgcgccugggaaaauacuaucguagaccuggagagcgauucaaagccucagaaaccaggcaacaguggguccaauagaagccuacagucugcaggauuucccgcuggucucaccuacucacaacugaugacacuuaaggacaguauguugcagcuggauccuaacgccaaaaccuggauggacauugagggcaggccagacgauccgguggaaaucgcgcucuaccagcccagcuccgggugcuauauccacuucuuucgggagccuacggaccugaagcaguucaaacaagaugccaaguacucucauggaauugacgucggcgaucuuuuugcagcucagccaggucugacuucggccgugauagaagcauugccccgaaauaugguuaucacaugucaggggagcgaggacauuaagaaacuccuggaaucccagggccgcaaggauaucaaauuaguggacauaucaaugaguaagccugauucuagaaaauucgagaacgccgucugggaccaauauaaggaucugugccacaugcauaccggaauugugguagagaagaaaaagaggggcgggaaagaagagaucacuccacacugugcacuaauggacugcaucauguuugaugccgcuguugugggaggucucgacgcgcggauucugcgcgcaguccuucccagagacaugguguucaggacaagcaccccgaaggucguguuguga

SEQ ID NO: 8698 - RNA, 1710 nt, Artificial Sequence
  derived and/or modified CDS sequence (opt3) from LASV(Nig08-A18;Clade III)__ADU56615__NP
augagcgccuccaaggaggugaaaucuuuccuguggacccagucacucagaagggaacuuaguggcuacugcagcaacaucaagcugcaagucguuaaagacgcucaggcauuguuacacgggcuggauuuuuccgaggugucuaauguacagcggcuaaugcgcaagcagaaacgagacgauucggaccucaagcgucugagagaucuuaaccaagccgugaauaaccuggucgaauugaagucaacacagcagaaaagcgugcucaggauuggaacucugaguuccgacgaucugcucauauuagcggcugaccuggagaaacuuaagucuaagguugugcggacggaacgccccuugagcuccgguaucuauaugggcaaucugucaagucagcaacuagaucagagaaaagcccuccugaacaugauugggaugaccggaggcaauggugggaggaacgcaacaagcgacggaaucguccgggugugggauguaaagaaugccgagcuucugaacaaucaguucggcacuaugccuucuuugacccucgcuugucugacaaagcagggccaaguugacuuaaacgaugcagugcaggcccugaccgaccucgggcuuauuuacacugcuaaauauccaaauuccucagaccuggaucgcuuggcccagagccauccgauccuaaacaugauagacacaaagaaaaguucucugaauaucuccggauacaacuuuagccucggugcggcagucaaggccggcgcuugcaugcuggaugggggaaacaugcuugagaccauuaaagugucgccccaaacgauggacggcauccugaagucuauuuugaaagugaagcgaucccucgguauguucaucucagauacuccuggggaaagaaauccauaugagaacauacuguacaagauuuguuuaaguggagacggcuggcccuauaucgccagcaggaccuccauugucggccgggcaugggaaaauacaguuguggaucuggagacugacaacaaaccucagaagaccgggaauggagguucuaacaaaagccuacagucagcuggcuuugccgcggggcucacauacagucagcugaugacccuuaaggauuccauguugcaacuggacccaaaugccaaaacguggauggauaucgagggacgucccgaagacccuguagagaucgcacucuaccagccagugagcggcugcuauauucacuucuuucgcgaaccgacugaccugaagcaguucaagcaggaugcuaaauacucucaugguauagacgucacagaucuuuuugccgcucaacccgggcugaccucagccgugaucgaggcauugccuagaaacaugguuauuacuugucagggcagugaagacaucaggaagcuccuggagagccagggacggcgagauauaaaauuaauugacaucucccugucuaagguggauucgcgcaaauucgagaaugccgucugggaccaguuuaaggaucuaugccacaugcauacaggcaucgugguagaaaagaaaaagagagggggaaaagaggaaauuaccccacacugugcucucauggacugcaucauguucgaugcggcaguuagcgguggcguggacgccaagguccugagggcugugcuuccccgggauauggucuuucgcacguccaccccuaaagugguuuuguga

SEQ ID NO: 8699 - RNA, 1710 nt, Artificial Sequence
  derived and/or modified CDS sequence (opt3) from LASV(Nig08-A19;Clade III)__ADU56619__NP
augagcgccuccaaggaggugaaaucuuuccuguggacccagucacucagaagggaacuuaguggcuacugcagcaacaucaagcugcaagucguuaaagacgcucaggcauuguuacacgggcuggauuuuuccgaggugucuaauguacagcggcuaaugcgcaagcagaaacgagacgauggagaccucaagcgucugagagaucuuaaccaagccgugaauaaccuggucgaauugaagucgacacagcagaaaucagugcucaggguugguacucugagcagugacgaucugcucguguuagcggcugaccuggagaaacuuaaguccaaggucgugcggacggaacgccccuugucuagcggcauuuauauggggaaucuguccucacagcaacuagaucagagaaaagcccuccugaacaugauaggaaugaccggcgguaaugggggaaggaacacaaccagugacggcaucguacggguuugggaugugaagaaugcagagcuucugaacaaucaguucggcacuaugccuagcuugacacucgccugucugaccaagcaggggcaagucgacuuaaacgaugcugugcaggcacugacugaccucggacuuauuuacacagccaaauauccaaauucuuccgaccuggaucgcuuggcucagucacauccgauccuaaacaugauugacaccaagaaaagcagucugaauaucucugguuacaacuuuucccucggcgccgcggugaaggcaggggccugcaugcuggauggaggcaacaugcuugagacgauaaaagucagcccccaaacuauggacgguauccugaagucgauuuugaaaguuaagcgaucucucgggauguucaucuccgauaccccuggagaaagaaauccauaugagaacauucuguacaagaucuguuuaucaggcgacggcuggcccuauauagcuaguaggacaagcauuguggggcgggccugggaaaauacuguaguggaucuggaguccgacaacaaaccucagaagaccggaaaugguggcucuaacaaaagccuacagucagcaggguuugcugccggacucacauacagucagcugaugacccuuaaggauuccauguugcaacuggacccaaaugcgaaaacguggauggauaucgagggccgucccgaagacccugucgagauugcccucuaccagccaagcucugguugcuauauccacuucuuucgcgaaccgacugaccugaagcaguucaagcaggaugcaaaauacucacaugggaucgacgugacagaucuuuuugcugcccaacccggccugaccagugcuguuauugaggccuugccuagaaacauggugauaacuugucagggaagcgaagacaucaggaagcuccuggagucccagggccggcgagauauuaaauuaaucgacauaucucugucgaaggucgauagccgcaaauucgagaaugcagugugggaccaguuuaaggaucuaugccacaugcauacagggauuguaguugaaaagaaaaagagaggagguaaagaggaaaucaccccacacugugcccucauggacugcaucauguucgaugcugcgguguccggcggggucgacgcaaaggugcugagggccguccuuccccgggauaugguguuucgcacgucaaccccuaaaguuguguuguga

SEQ ID NO: 8700 - RNA, 1710 nt, Artificial Sequence
  derived and/or modified CDS sequence (opt3) from LASV(ONM-299;Clade III)__ANH09735__NP
augagcgccuccaaggaggugaaaucuuuccuguggacccagucacucagaagggaacuuaguggcuacugcagcaacaucaagcugcaagucguuaaagacgcucaggcauuguuacacgggcuggauuuuuccgaggugucuaauauucagcggcuaaugcgcaaggaacgacgugacgauucggaccucaaaagacugagggaucuuaaccaggccguaaauaaccugguggaguugaagucaacacaacagaaguccguccuccgggugggaacucugaguuccgacgaucugcucacguuagcggcugaccuggaaaaacuuaagucuaaaguuauacgcaccgagagacccuugagcuccgguguguauaugggcaaucugucaacacagcagcuagaucaaaggcgggcccuccugaacaugaucgggaugacuaauggaggccagggugcaaacgccgggcgcgacggaauuguccgagugugggauguaaagaaugcugagcuucugaacaaucaguucggcaccaugccuaguuugacacucgcaugucugaccaaacagggccaaguugacuuaaacgaugccgugcaggcucugacugaccucgggcuuaucuacacagccaaguauccaaauagcucugaccuggauagauugucccagaaccauccgauucuaaauaugaucgacaccaagaaaucaagccugaacauaaguggauacaacuuuucucucggugcggcagucaaggccggcgcuugcaugcuggaugggggaaauaugcuugaaacgaucaaagugagcccccaaacuauggacggcauucugaaaagcaucuugaaggugaagaggucgcucgguauguucgucucugauaccccuggggagcggaacccauaugaaaauauucuguacaaaaucuguuuauccggagacggcuggcccuauguugccucacguacaaguauaauuggccgcgcaugggagaacacugugguagaucuggagagcgacuccaagccucagagaccagggucuaaggaaagcaauaggucacuacagaccgcuggauuucccgccggucucacauacagucagcugaugacccuuaaagauuccauguugcaacuggacccuaacgcgaagacguggauggauaucgagggccggccagacgacccgguggaaauugcccucuaccagcccagcucugggugcuauauccacuucuuucgagagccuacugaucugaaacaguucaagcaggacgcaaaauacucacauggaaucgauauuggcgaccuuuuugcugcccaaccaggucugacaagugcugucauagaagccuugccccgcaauauggugaucaccugucaggggagcgaggauauuaagagacuccuggagucccagggcaggaaggacauccgguuaguugauauaucucugucgaaagcagacagccgcaaguucgaaaacgccgugugggaucaguuuaaagaccuaugcaauaugcacacuggagucgugguagagaagaaaaagaagggcgggaaagaagagauuacaccucauugugcucucauggauugcaucauguucgacgcggcaguuaugggaggucuggaugccaaggugcuuagagcugucuugccaaaagacaugguguuuaggaccuccacgccccgugucgugcuguga

SEQ ID NO: 8701 - RNA, 1710 nt, Artificial Sequence
  derived and/or modified CDS sequence (opt3) from LASV(ONM-314;Clade III)__ANH09737__NP
augagcgccuccaaggaggugaaaucuuuccuguggacccagucacucagaagggaacuuaguggcuacugcagcaacaucaagcugcaagucguuaaagacgcucaggcauuguuacacgggcuggauuuuuccgaggugucuaauauucagcggcuaaugcgcaaggaacgacgugacgauucggaccucaaaagacugagggaucuuaaccaggccguaaauaaccugguggaguugaagucaacacaacagaaguccguccuccgggugggaacucugaguuccgacgaucugcucacguuagcggcugaccuggaaaaacuuaagucuaaaguuauacgcaccgagagacccuugagcuccgguguguauaugggcaaucugucaacacagcagcuagaucaaaggcgggcccuccugaacaugaucgggaugacuaauggaggccagggugcaaacgccgggcgcgacggaauuguccgagugugggauguaaagaaugcugagcuucugaacaaucaguucggcaccaugccuaguuugacacucgcaugucugaccaaacagggccaaguugacuuaaacgaugccgugcaggcucugacugaccucgggcuuaucuacacagccaaguauccaaauagcucugaccuggauagauugucccagaaccauccgauucuaaauaugaucgacaccaagaaaucaagccugaacauaaguggauacaacuuuucucucggugcggcagucaaggccggcgcuugcaugcuggaugggggaaauaugcuugaaacgaucaaagugagcccccaaacuauggacggcauucugaaaagcaucuugaaggugaagaggucgcucgguauguucgucucugauaccccuggggagcggaacccauaugaaaauauucuguacaaaaucuguuuauccggagacggcuggcccuauguugccucacguacaaguauaauuggccgcgcaugggagaacacugugguagaucuggagagcgacuccaagccucagagaccagggucuaaggaaagcaauaggucacuacagaccgcuggauuucccgccggucucacauacagucagcugaugacccuuaaagauuccauguugcaacuggacccuaacgcgaagacguggauggauaucgagggccggccagacgacccgguggaaauugcccucuaccagcccagcucugggugcuauauccacuucuuucgagagccuacugaucugaaacaguucaagcaggacgcaaaauacucacauggaaucgauaugggcgaccuuuuugcugcccaaccaggucugacaagugcugucauugaagccuugccccgcaauauggugauaaccugucaggggagcgaggauaucaagagacuccuggagucccagggcaggcgggacauucgcuuaguugauaucucucugucgaaggcagacagcagaaaauucgaaaacgccgugugggaucaguuuaaggaccuaugcaauaugcacacuggagucgugguagagaaaaagaaaaagggcgggaaggaagagauaacaccucauugugcucucauggauugcauuauguucgacgcggcaguuaugggaggucuggaugccaaagugcuuagggcugucuugccaaaggacaugguguuucguaccuccacgccccgggucgugcuguga

SEQ ID NO: 8702 - RNA, 1710 nt, Artificial Sequence
  derived and/or modified CDS sequence (opt3) from LASV(ONM-700;Clade III)__ANH09739__NP
augagcgccuccaaggaggugaaaucuuuccuguggacccagucacucagaagggaacuuaguggcuacugcagcaacaucaagcugcaagucguuaaagacgcucaggcauuguuacacgggcuggauuuuuccgaggugucuaauauucagcggcuaaugcgcaaggaacgacgugacgauucggaccucaaaagacugagggaucuuaaccaggccguaaauaaccugguggaguugaagucaacacaacagaagaguguccuccgggugggaacucugaguuccgacgaucugcucacguuagcggcugaccuggaaaaacuuaagucuaaaguuauacgcaccgagagacccuugagcuccgguguguauaugggcaaucugucaacacagcagcuagaucaaaggcgggcccuccugaacaugaucgggaugacuagcggaggccagggugcaaaugccgggcgcgacggaauuguccgagugugggauguaaagaacgcugagcuucugaauaaccaguucggcaccaugccuagcuugacacucgcaugucugaccaaacagggccaaguugacuuaaaugaugccgugcaggcucugacugaccucgggcuuaucuacacagccaaguauccaaacucuuccgaccuggauagauugucacagaaucauccgauucuaaacaugaucgacaccaagaaaagcagucugaauauaucuggauacaacuuuucccucggugcggcagucaaggccggcgcuugcaugcuggaugggggaaacaugcuugaaacgaucaaagugagcccccaaacuauggacggcauucugaagucgaucuugaaagugaagaggucucucgguauguucgucuccgauaccccuggggagcggaauccauaugaaaacauucuguacaaaaucuguuuaucaggagacggcuggcccuauguugccagucguacaagcauaauuggccgcgcaugggagaauacugugguagaucuggaguccgacucuaagccucagagaccagggagcaaggaaucaaacaggagucuacagaccgcuggauuucccgccggucucacauacucccagcugaugacccuuaaagauagcauguugcaacuggacccuaaugcgaagacguggauggauaucgagggccggccagacgacccgguggaaauugcccucuaccagcccucuucagggugcuauauccacuucuuucgagagccuacugaucugaaacaguucaagcaggacgcaaaauacagucauggaaucgauauuggcgaccuuuuugcugcccaaccaggucugacaagcgcugucauagaagccuugccccgcaacauggugaucaccugucagggguccgaggauauuaagagacuccuggagucucagggcaggcgggacauccgcuuaguugauauaucgcugagcaaggcagacuccagaaaauucgaaaaugccgugugggaucaguuuaaggaccuaugcaacaugcacacuggagucgugguagagaaaaagaaaaagggcgggaaggaagagauuacaccucauugugcucucauggauugcaucauguucgacgcggcaguuaugggaggucuggaugccaaagugcuuagggcugucuugccaaaggacaugguguuucguaccucaacgccccgggucgugcuguga

SEQ ID NO: 8703 - RNA, 1710 nt, Artificial Sequence
  derived and/or modified CDS sequence (opt3) from LASV(Weller;Clade III)__AAT49009__NP
augagcgccuccaaggaggugaaaucuuuccuguggacccagucacucagaagggaacuuaguggcuacugcagcaacaucaagcugcaagucguuaaagacgcucaggcauuguuacacgggcuggauuuuuccgaggugucuaauguacagcggcuaaugcgcaagcagcgacgugacgauggagaccucaaaagacugagggaucuuaaccaagccgugaauaaccuggucgaauugaagucgacacagcagaagucagugcuccggguugguacucugaauagcgacgaucugcucguguuagcggcugaccuggagaaacuuaagaguaaagucauucgcacggaaagacccuuguccucuggcauauauauggggaaccugagcucccagcaacuagaucagaggcgggcccuccugaauaugaucggaaugaccggcgguaaccgcgggggaggcacaucaagugacggcauugugcgaguaugggauguuaagaaugcagagcuucugaacaaucaguucgggacuaugccuagcuugacccucgccugucugacaaaacagggacaaguggacuuaaacgaugcuguccaggcacugaccgaccucggucuuaucuacacugccaaguauccaaauucuuccgaccuggauagauuggcucagucacauccgauucuaaacaugaucgacacaaagaaaagcagucugaauauaucuggcuacaacuuuucccucggggccgcggugaaggcaggagccugcaugcuggauggcgguaacaugcuugagaccaucaaagugagcccccaaacgauugacgggauccugaagacuauuuugaaagucaagaaaucgcucggaauguucaucucugauguuccuggcgaaaggaauccauaugagaacauacuguacaagauuuguuuauccggcgacggguggcccuauaucgcuucacggaccaguauugugggacgugccugggaaaauacaguaguggaucuggagagcgacaacaagccucagaaaacugguaauggcggguccaacaagucucuacagagcgcaggauuugcugccggccucaccuacucacagcugaugacacuuaaagauaguauguugcaacuggacccaaauuccaagaccuggauggauaucgagggucgccccgaagacccugucgagaucgcgcucuaccagccaaacagcgggugcuauauucacuucuuuagagaaccgacggaccugaaacaguucaagcaggaugccaaguacucucauggcauagacgugacugaucuuuuugcagcucaacccggacugacaucagccguuaucgaggcuuugccuaggaauauggugauuaccugucagggcagugaagacauccggaaacuccuggagagccaggggcgacgcgauauaaaguuaauugacaucucccugaacaaagccgauucuagaaaguucgagaaugcagucugggaccaguuuaaagaucuaugccacaugcauacuggagugguaguugaaaagaagaaaagggguggcaaggaggaaaucacaccacacugugcccucauggacugcauuauguucgaugcugcggugagcgggggacuggacgcaaaaguccuucgggccguguugccccgcgauauggucuuuagaaccucgacgccuaaggugguucuguga

SEQ ID NO: 8704 - RNA, 1710 nt, Artificial Sequence
  derived and/or modified CDS sequence (opt3) from LASV(BA366;Clade IV)__ADI39452__NP
augagcguguccaaggaggucaaaucuuuccuguggacccagucacucagaagggaacuuaguggcuacugcagcaacaucaagcugcaaguugugaaagacgcccaggcuuuguuacacgggcuggauuuuuccgagguaucuaaugugcagcggcuaaugcgcaagcagcgacgugacgauaacgaccucaaaagacugagggaucuuaaucaagcagucaacaaucugguggaauugaagucgacacagcagaagucaguucuccgggugggaacucugacgagcgacgaucugcucauuuuagccgcggaccuggagaaacuuaagaccaaagucacacgcacugaaagacccuugagugcugguguguauaugggcaaccuguccucucagcaacuagagcagaggcgggcccuccugaauaugauagggaugaacggaggcaaucaggguguacaggcagggcgcgauggaguugugcgagucugggacgugaagaacgccgagcuucugaauaaccaauucggcaccaugccuagcuugacacucgcuugucugaccaaacagggccagguggauuuaaaugacgcaguccaagcccugacugaucucgggcuuaucuacacagcuaaguauccaaacaccuccgaccuggacagauuggcccagucacauccgauucuaaauaugaucgauacgaagaaaaguagccugaacauuucuggauacaacuuuucccucggugcggcaguuaaggccggcgcuugcaugcuggacgggggaaauaugcuugaaacuaucaaagugucaccccagaccauggauggcauacugaaaagcaucuugaagguaaagaggacacucgguauguucgugagugacacuccuggggagcggaacccauaugaaaauauucuguacaaaaucuguuuaucuggagauggcuggcccuauauugccucccguaccagcaucacaggccgcgcaugggagaacaccauagucgaccuggagucggaugggaagccucagaaggugggaaauaacgguucuaauaaaucccuacaaucagcuggcuuuacggccgggcucacuuacagucagcugaugacacuuaaggacgcgauguugcagcuggauccaaacgccaaaaccuggauggacauugaaggaagacccgaggauccuguugaaguggcacucuaccagccaagcuccggcugcuauauccacuucuuuagggagccgacugaccugaagcaauucaaacaggacgcuaaguacucucaugguauugaugucacagaccuuuuugccgcucagcccgggcugaccagcgccgugaucgaagcauugccucggaauaugguaaucacgugucagggcucagaggauguucgaaagcuccuggagagucaaggacgcaaagacauuaaguuaauagauaucgcccuguccaaagcugacagcagaaaguaugaaaacgcggugugggaucaguacaaagaccuaugccacaugcauaccggcgucguggucgagaagaagaaaaggggagggaaggaagagaugacaccacacugugcacucauggauugcauuauguucgacgccgcugugucugguggccugucaacucagguucuucgggccguguugccccgcgauaugguauuuagaaccaguacaccuaaagucgugcuguga

SEQ ID NO: 8705 - RNA, 1710 nt, Artificial Sequence
  derived and/or modified CDS sequence (opt3) from LASV(G1180-SLE-2010;Clade IV)__AIT17169__NP
augagcgccuccaaggagaucaaaucuuuccuguggacccagucacucagaagggaacuuaguggcuacugcagcaacauuaagcugcaaguggucaaagacgcucaggcauuguuacacgggcuggauuuuuccgagguuucuaaugugcagcggcuaaugcgcaaggaacgacgugacgauaacgaccucaaaagacugagggaucuuaaucaggccguaaacaaucugguggaguugaagucgacacaacagaagucaauacuccgggucggaacucugacgagcgacgaucugcucaucuuagcggcugaccuggaaaaacuuaagaguaaagugauucgcaccgagagacccuuguccgccgguguuuauaugggcaaccugucuagccagcagcuagaucaaaggcgggcacuccuguccaugaucgggaugucaaguggaaaucagcgcgcccaggcuggccgagacgguguggucagagugugggauguaaagaacguugagcuucugaauaaccaguucgggacaaugccuagcuugacucucgcaugucugaccaaacaaggacagguggacuuaaaugaugccguccaggcucugacagaccucggccuuauuuacaccgccaaguauccaaacacuucugaccuggauagguugacacaaucccauccgauccuaaauaugauagacaccaagaaaucaagccugaacaucaguggcuacaauuuuucucucggggcggcagugaaggccggagcuugcaugcuggaugguggcaacaugcuugaaacgauuaaagugagcccccagacuauggacgggauccugaaguccauuuugaaagucaagaaagcccucggaauguucaucucggauaccccuggcgagcggaacccauaugaaaauauacuguacaagauuuguuuaucuggugacggguggcccuauaucgcaucccguacaucaauuacuggacgcgcuugggagaacaccguuguggaucuggagagugacggcaagccucagaaagccggcagcaauaacuccaauaagucucuacagagcguaggguuuacagcgggacucaccuacucacaacugaugacgcuuaaagaugccauguugcagcuggacccaaacgcaaagacuuggauggauaucgaagguagacccgaggacccuguggaaaucgcucucuaccagccaaguuccggcugcuauauucacuucuuuagggagccgacagaccugaaacaguucaagcaagaugccaaguacagccaugggauagacgucaccgaucuuuuugcugcccagcccggacugacuucugcagugaucgacgccuugccucggaauaugguuauuacaugucagggcucagaugacauccgaaaacuccuggaaagucagggucgcaaggauauaaaauuaauugacaucgcucugagcaagaccgauuccagaaaauaugagaacgcggugugggaccaauacaaggaucuaugccacaugcauacgggggucgugguagagaagaaaaagaggggcggaaaagaagagaucaccccacacugugcacucauggacugcauuauguucgaugccgcuguuucuggcgggcugaauacaucggugcuucgggccgucuugccccgcgacaugguguuuagaacuagcaccccuagggucgugcuguga

SEQ ID NO: 8706 - RNA, 1710 nt, Artificial Sequence
  derived and/or modified CDS sequence (opt3) from LASV(G1190-SLE-2010;Clade IV)__AIT17173__NP
augagcgccuccaaggagaucaaaucuuuccuguggacccagucacucagaagggaacuuaguggcuacugcagcaacauuaagcugcaaguggucaaagacgcucaggcauuguuacacgggcuggauuuuuccgagguuucuaaugugcagcggcuaaugcgcaaggaacgacgugacgauaacgaccucaaaagacugagggaucuuaaucaggccguaaacaaucugguggaguugaagucgacacaacagaagucaauacuccgggucggaacucugacgagcgacgaucugcucaucuuagcggcugaccuggaaaaacuuaagaguaaagugacccgcacagagagacccuuguccgccgguguuuauaugggcaaccugucuagccagcagcuagaucaaaggcgggcacuccugaauaugauugggauguccggaucaaaccagggcgcccgcgcuggucgagacgggguggucagagugugggauguaaagaaugcagagcuucugaacaaucaguucggaacuaugccuaguuugacccucgccugucugacaaaacagggccaaguugacuuaaacgaugcugugcaggcccugaccgaccucggccuuaucuacacugcgaaguauccaaauacaagcgaccuggauagguugacccagucucauccgauucuaaacaugaucgacacgaagaaauccucacugaauauaagcggguacaacuuuagucucggagcagccgucaaggcuggugccugcaugcuggauggcgggaacaugcuugaaacuaucaaagugucuccccaaaccauggacggcauucugaaguccaucuugaaagugaagaaagcacucggaauguucauuagcgaugcuccuggugagcggaauccauaugaaaacauccuguacaagauauguuuaucgggggacggauggcccuauauugccucucguacauccaucacuggccgcgcgugggagaauaccgucguugaucuggagucagacggcaagccucagaaagccgggaguaacggaagcaauaagucccuacagucugcagguuuuacagcuggccucaccuacagccagcugaugacgcuuaaagaugccauguugcaacuggacccaaacgcuaagacuuggauggauauugaagggagacccgaggacccuguggaaaucgcccucuaccagccaucaaguggaugcuauauccacuucuuuagggagccgacagaccugaaacaguucaagcaggaugcaaaguacucccauggcauugacguaaccgaucuuuuugccgcucaacccggucugacuagcgcggugauagacgcauugccucggaauauggucaucacaugucaggggucugaugacauucgaaaacucuucgaaucacagggccgcaaggauaucaaacugauagacauugccuuaaguaagaccgauagcagaaaauaugagaacgcugugugggaccaguacaaggaucugugccacaugcauacgggaaucguuguggagaagaaaaagaggggcgggaaagaagagaucaccccacacugugcccuaauggacugcauuauguuugaugcagccgucuccggaggucucaauacaucugugcugcgggcuguacuuccccgcgacaugguuuucagaacuucgaccccuaggguggucuuguga

SEQ ID NO: 8707 - RNA, 1710 nt, Artificial Sequence
  derived and/or modified CDS sequence (opt3) from LASV(G1200-LIB-2010;Clade IV)__AIT17177__NP
augagcgccuccaaggagaucaaaucuuuccuguggacccagucacucagaagggaacuuaguggcuacugcagcaacauuaagcugcaaguggucaaagacgcucaggcauuguuacacgggcuggauuuuuccgagguuucuaaugugcagcggcuaaugcgcaagcagcgacgugacgauaacgaccucaaaagacugagggaucuuaaucaagccguaaacaaucugguggaauugaagucgacacagcagaagucaguccuccgggugggaacucugacgagcgacgaucugcucguuuuagcggcugaccuggagaaacuuaagaguaaagugauacgcaccgaaagacccuuguccgccgguaucuauaugggcaaccugucuagccagcaacuagaucagaggcgggcacuccugaauaugauugggauguccggaggcaaccagggugcccgcgcugggcgagacggagucgugagaguaugggauguuaagaaugcagaccuucugaacaaucaguucggcacaaugccuucauugacucucgccugucugaccaaacaaggccagguggauuuaaacgacgucgugcaggcucugacagaccucgggcuuaucuacaccgccaaguauccaaauacaagugaucuggacagguugacucaaagccauccgauucuaaagaugaucgaugcgaacaaaucuucccugaauauaucaggauacaacuuuagccucggugcagccgugaaggcuggcgccugcaugcuggacgggggaaacaugcuugagaccaucaaagucaguccccagacgauggauggcauucugaagucuaucuugaaaguuaagaaaucccucgguauguucauuagcgacacuccuggggagcggaauccauaugaaaacauccuguacaagauauguuuaucgggagauggcuggcccuauauugcaucucguaccuccaucauuggccgcgcuugggagaauacagugguagaccuggaaucagaugggaagccucagaaaacuggaaguaacaauagcuccaagucucuacagagcgccgguuuugcggccggccucaccuacucacaacugaugacacuuaaagacgcaauguugcagcuggauccaaacgcuaagaccuggauggacaucgaggggagacccgaggacccuguggaaaucgcccucuaccagccaaguuccggaugcuauauucacuucuuuagggagccgacggaucugaaacaguucaagcaagacgcuaaguacagccauggcauagaugucacugaccuuuuugccgcacagcccggucugacaucugccgugaucgaggcuuugccucggaauaugguuauuaccugucaggggucagaugacauccgaaaacuccuggaaagucagggccgcaaggauauaaaauuaauugacaucgcgcugagcaagacugauuccagaaaauaugaaaacgcagugugggaccaauacaaggaucuaugccacaugcauacaggaaucgucguggagaagaaaaagaggggcgggaaagaggaaauuaccccacacugugcccucauggacugcaucauguucgaugcugccguaucuggaggucugaauacgcuuguuuugcgggcagugcugccccgcgacauggucuuuagaaccucgacaccuaaggugguccucuga

SEQ ID NO: 8708 - RNA, 1710 nt, Artificial Sequence
  derived and/or modified CDS sequence (opt3) from LASV(G1442-SLE-2011;Clade IV)__AIT17181__NP
augagcgccuccaaggaggugaaaucuuuccuguggacccagucacucagaagggaacuuaguggcuacugcagcaacaucaagcugcaagucguuaaagacgcucaggcauuguuacacgggcuggauuuuuccgaggugucuaauguacagcggcuaaugcgcaagcagcgacgugacgauaacgaccucaaaagacugagggaucuuaaucaagccgugaacaaucuggucgaauugaagucgacacagcagaagucagugcuccggguuggaacucugacgagcgacgaucugcucguguuagcggcugaccuggagaaacuuaagaguaaagucauucgcaccgaaagacccuuguccgccgguguguauaugggcaaccugucuagccagcaacuagaucagaggcgggcacuccugaauaugauagggauguccggaggcauccaggguacacgcacugggcgagacggaguaguuagagugugggaugucaagaacgccgaccuucugaauaaccaguucggcaccaugccuucauugacacucgcuugucugaccaaacaaggccagguggauuuaaaugacgugguccaggcacugacugaccucgggcuuauuuacacagccaaguauccaaacgcuagugaucuggacagguugacccaaagccauccgauccuaaauaugauugauacgaagaaaucuucccugaacaucucaggauacaauuuuagccucggugccgcgguuaaggcaggcgccugcaugcuggacgggggaaacaugcuugagacuauaaaagugaguccccagaccauggauggcauccugaagucuauuuugaaaguaaagaaaacacucgguauguucaucuccgacacuccuggggagcggaacccauaugaaaauauucuguacaagaucuguuuaagcggagauggcuggcccuauauagcuucgcguaccucuauuacaggccgcgccugggagaacaccguggucgaccuggaauccgaugggaagccucagaaagcaggaucaaauaacaguaauaagagccuacaguccgcugguuuugccgcgggccucacguacucucaacugaugacucuuaaagacgccauguugcagcuggauccaaacgcaaagacauggauggacaucgaggggagacccgaggacccuguggaaauugcucucuaccagccaagcucaggaugcuauauccacuucuuuagggagccgaccgaucugaaacaguucaagcaagacgccaaguacagucauggcaucgauguuacugaccuuuuugcugcccagcccggucugacauccgcagugauugaagccuugccucggaauauggucauaaccugucaggggagcgaugacaucaaaaagcuccuggagucucagggccgaaaagauauuaaguuaaucgacauagcucugucaaaaacggauagucgcaaguaugaaaacgcggugugggaccaauacaaggaucuaugccacaugcauaccggaguaguuguggagaaaaagaaaagaggcgggaaggaggaaauuacaccacacugugcacucauggacugcaucauguucgaugccgcugucagcggaggucugaauacucuuguguugagggccguccugccccgggacaugguguuucgcaccuccacaccuagaguugugcucuga

SEQ ID NO: 8709 - RNA, 1710 nt, Artificial Sequence
  derived and/or modified CDS sequence (opt3) from LASV(G1529-SLE-2011;Clade IV)__AIT17185__NP
augagcgccuccaaggagaucaaaucuuuccuguggacccagucacucagaagggaacuuaguggcuacugcagcaacauuaagcugcaaguggucaaagacgcucaggcauuguuacacgggcuggauuuuuccgagguuucuaaugugcagcggcuaaugcgcaagcagcgacgugacgauggagaccucaaaagacugagggaucuuaaccaagccguaaauaaccugguggaauugaagucgacacagcagaagucaguccuccggguggguacucugacgagcgacgaucugcucauauuagcggcugaccuggagaaacuuaagaguaaaguuacccgcacagaaagacccuuguccgccggcguguauauggggaaucugucuagccagcaacuagaucagaggcgggcacuccugaacaugaucggaauguccggcgguaaucgcggggcccgaacuggaaaggacggcgucgugagaauuugggauguuaaaaacgcugaccuucugaauaaccaguucggcaccaugccuucauugacacucgcaugucugaccaagcaggggcaaguagauuuaaaugacgugguccaggcccugacugaccucggacuuaucuacacagcuaaguauccaaacaccagugaucuggacagguugacgcagagccauccgauucuaaauaugaucgauacuaacaaaucuucccugaauauaucagguuacaacuuuagccucggcgccgcggugaaggcaggggccugcaugcuggacggaggcaacaugcuugagaccaucaaagugaguccccaaacaauggaugguauucugaagucuaucuugaaagucaagaaaucccucgggauguucauuagcgacacuccuggagagcggaauccauaugaaaacauccuguacaagauauguuuaucgggcgauggcuggcccuauauugcuucucguaccuccaucacagggcgcgccugggagaauaccguuguggaccuggaaucagaugagaagccucagaaagcaggaaguaacaauagcaacaagucccuacagucuacggguuuuacugcuggccucacauacagccagcugaugacccuuaaagacgccauguugcaacuggauccaaaugcgaagacuuggauggacauugaggggagacccgaagacccuguagagaucgcccucuaccagccaucaaguggaugcuauauccacuucuuuagggaaccgacagaucugaaacaguucaagcaggacgcaaaguacucccauggcauugaugugaccgaccuuuuugcugcccaacccggucugacgagcgcugucauagauaccuugccucggaacauggugaucacaugucaggggucugacgauauucgaaaacuccuggagucacagggccgcaaggacaucaaauuaauagauauugcccugaguaagacugacagcagaaaauaugaaaaugcaguuugggaucaguacaaggaccuaugccacaugcauaccggaguggucguggagaagaaaaagaggggcgggaaagaggaaaucacaccacacugugcccucauggauugcaucauguucgacgcugcgguauccggaggucugaacgcaucuguucuucgggccguguugccccgcgacauggucuuuagaacuucgaccccuagggugguccuguga

SEQ ID NO: 8710 - RNA, 1710 nt, Artificial Sequence
  derived and/or modified CDS sequence (opt3) from LASV(G1618-SLE-2011;Clade IV)__AIT17189__NP
augagcgccuccaaggagaucaaaucuuuccuguggacccagucacucagaagggaacuuaguggcuacugcagcaacauuaagcugcaaguggucaaagacgcucaggcauuguuacacgggcuggauuuuuccgagguuucuaaugugcagcggcuaaugcgcaaggaacgacgugacgauaacgaccucaaaagacugagggaucuuaaucaggccguaaacaaucugguggaguugaagucgacacaacagaagucaguccuccgggugggaacucugacgagcgacgaucugcucauauuagcggcugaccuggaaaaacuuaagaguaaaguuacccgcacagagagacccuuguccgccgguguguauaugggcaaccugucuagccagcagcuagaucaaaggcgggcacuccuguccaugaucgggaugucaggaggcaaucagggugcccgcacugggcgagacggagucgugagaguaugggauguuaagaacgcugagcuucugaauaaccaguucggcaccaugccuaguuugacacucgcaugucugaccaaacagggccaaguggacuuaaaugaugucgugcaggcccugacugaccucgggcuuauuuacacagcuaaguauccaaacaccagcgaccuggauagguugacgcagucucauccgauccuaaauaugauugacacuaagaaauccucacugaacaucagcggauacaauuuuagucucggugccgcggugaaggcaggcgccugcaugcuggaugggggaaacaugcuugaaaccauaaaagucucuccccaaacaaucgacggcauucugaaguccaucuugaaaguuaagaaagcucucgguauguucauuagcgauacuccuggggagcggaacccauaugaaaauauccuguacaagauauguuuaucgggagacggcuggcccuauauugccucucguaccuccaucacaggccgcgcaugggagaacaccgugguagaucuggagucagacgggaagccucagaaagcuggaaguaauaacagcaauaagucccuacagucugccgguuuuacggcgggccucacuuacagccagcugaugacacuuaaagaugccauguugcaacuggacccaaacgcaaagaccuggauggauauugaagggagacccgaggacccuguggaaaucgcucucuaccagccaucaaguggaugcuauauccacuucuuuagggagccgacugaccugaaacaguucaagcaggaugccaaguacucccauggcauugacgucacagaucuuuuugcugcccaacccggucugaccagcgcagugauagacgccuugccucggaauaugguuaucacgugucaggggucugaugacauucgaaaacuccuggaaucacagggccgcaaggauaucaaauuaauagacauugcucugaguaagaccgauagcagaaaauaugagaacgcggugugggaccaguacaaggaucuaugccacaugcauacaggagucgugguagagaagaaaaagaggggcgggaaagaagagaucacuccacacugugcacucauggacugcaucauguucgaugccgcuguuuccggaggucuuaauucucugguguugcgggccguccugccccgcgacaugguguuuagaaccucgacaccuagggucgugcucuga

SEQ ID NO: 8711 - RNA, 1710 nt, Artificial Sequence
  derived and/or modified CDS sequence (opt3) from LASV(G1646-SLE-2011;Clade IV)__AIT17193__NP
augagcgccuccaaggagaucaaaucuuuccuguggacccagucacucagaagggaacuuaguggcuacugcagcaacauuaagcugcaaguggucaaagacgcucaggcauuguuacacgggcuggauuuuuccgagguuucuaaugugcagcggcuaaugcgcaaggaacgacgugacgauaacgaccucaaaagacugagggaucuuaaucaggccguaaacaaucugguggaguugaagucgacacaacagaagucaguccuccgggugggaacucugacgagcgacgaucugcucauauuagcggcugaccuggaaaaacuuaagaguaaaguuacccgcacagagagacccuuguccgccgguguguauaugggcaaccugucuagccagcagcuagaucaaaggcgggcacuccuguccaugaucgggaugucaggaggcaaucagggugcccgcacugggcgagacggagucgugagaguaugggauguuaagaacgcugagcuucugaauaaccaguucggcaccaugccuaguuugacacucgcaugucugaccaaacagggccaaguggacuuaaaugaugccguccaggcucugacugaccucgggcuuauuuacacagccaaguauccaaacaccagcgaccuggauagguugacgcagucucauccgauccuaaauaugauugacacuaagaaauccucacugaacaucagcggauacaauuuuagucucggugcggcagugaaggccggcgcuugcaugcuggaugggggaaacaugcuugaaaccauaaaagugucuccccaaacaauggacggcauccugaaguccauuuugaaagucaagaaagcccucgguauguucaucagcgauacuccuggggagcggaacccauaugaaaauauucuguacaagaucuguuuaucgggagacggcuggcccuauauagcaucucguaccuccauuacaggccgcgcuugggagaacaccguuguggaucuggagucagacgggaagccucagaaagccggaaauaacaauaguaacaagagccuacaguccgcggguuuuacggccggccucacuuacucucagcugaugacacuuaaagaugcaauguugcaacuggacccaaaugcuaagaccuggauggauaucgaagggagacccgaggacccuguagaaauugcccucuaccagccaagcucaggaugcuauauccacuucuuuagggagccgacugaccugaaacaguucaagcaggaugcuaaguacagucauggcaucgacgugacagaucuuuuugccgcacaacccggucugaccuccgccgucauugacgcuuugccucggaacauggugauaacgugucaggggagcgaugacauccgaaaacuccuggaaucucagggccgcaaggauauuaaauuaaucgacauagcgcugucaaagaccgauaguagaaaauaugagaaugcaguuugggaccaguacaaggaucuaugccacaugcauacaggaguggucguggagaagaaaaagaggggcgggaaagaagagauuacuccacacugugcccucauggacugcaucauguucgaugcugccguaagcggaggucugaacucccuuguuuugcgggcagugcugccccgcgacauggucuuuagaaccucuacaccuagggugguccucuga

SEQ ID NO: 8712 - RNA, 1710 nt, Artificial Sequence
  derived and/or modified CDS sequence (opt3) from LASV(G1647-SLE-2011;Clade IV)__AIT17197__NP
augagcgccuccaaggagaucaaaucuuuccuguggacccagucacucagaagggaacuuaguggcuacugcagcaacauuaagcugcaaguggucaaagacgcucaggcauuguuacacgggcuggauuuuuccgagguuucuaaugugcagcggcuaaugcgcaaggaacgacgugacgauaacgaccucaaaagacugagggaucuuaaucaggccguaaacaaucugguggaguugaagucgacacaacagaagucaauacuccgggucggaacucugacgagcgacgaucugcucaucuuagcggcugaccuggaaaaacuuaagaguaaagugauucgcaccgagagacccuuguccgccgguguuuauaugggcaaccugucucuacagcagcucgaucaaaggcgggcacugcuuaauaugaucgggaugagcggauccaaccagggcgugcgcgccggucgagacggggucgugagaguaugggauguuaagaaugcugagcuguugaacaaucaguucggaacaaugccuucacucacucuggcauguuuaaccaaacagggccaaguggaccugaacgaugccguccaggcucucacagaccuuggccugauuuacaccgccaaguauccaaauacaagugacuuggauaggcuaacucagagccauccgauccugaacaugauagacaccaagaaaucuucccucaauaucucaggguacaacuuuagccugggagcggcagugaaggccggugcuugcaugcuugauggcgggaacaugcuggaaacgauuaaagugaguccccaaacuauggacggaaucuugaagucuauucucaaagucaagaaagcccugggcauguucaucuccgauaccccuggugagcggaauccauaugaaaacauauuauacaagauuugucugagcggggacggauggcccuauaucgcaucgcguacaucuauuacuggccgcgcuugggagaauaccguuguggaucuagaguccgacggcaagccucagaaagccgggucaaacggaaguaauaagagccuccaguccgcggguuuuacagccggccugaccuacucucagcuuaugacguugaaagaugcaaugcugcaacucgacccaaacgcuaagacuuggauggauaucgaagggagacccgaggacccuguagaaaucgcccuguaccagccaagcucaggaugcuauauucacuucuuuagggagccgacagaccuuaaacaguucaagcaggaugcuaaguacagucauggcauagacgugaccgaucuguuugccgcacaacccgguuugacuuccgccgucaucgacgcucucccucggaauauggugauuacaugucaggggagcgaugacauccgaaaacuguuagaaucucagggccgcaaggauauaaaacugauugacaucgcgcuaucaaagaccgauaguagaaaauaugagaacgcaguuugggaccaguacaaggaucucugccacaugcauacgggaaucguggucgagaagaaaaagaggggcgggaaagaagagauuaccccacacugugcccugauggacugcaucauguucgaugcugccgugagcggaggucuuaauacauccguauugcgggcaguucugccccgcgacaugguguuuagaacuucuaccccuagggucgugcucuga

SEQ ID NO: 8713 - RNA, 1710 nt, Artificial Sequence
  derived and/or modified CDS sequence (opt3) from LASV(G1727-SLE-2011;Clade IV)__AIT17201__NP
augagcgccuccaaggagaucaaaucuuuccuguggacccagucacucagaagggaacuuaguggcuacugcagcaacauuaagcugcaaguggucaaagacgcucaggcauuguuacacgggcuggauuuuuccgagguuucuaaugugcagcggcuaaugcgcaaggaacgacgugacgauaacgaccucaaaagacugagggaucuuaaucaggccguaaacaaucugguggaguugaagucgacacaacagaagucaauacuccgggucggaacucugacgagcgacgaucugcucaucuuagcggcugaccuggaaaaacuuaagaguaaagugacccgcacagagagacccuuguccgccgguguuuauaugggcaaccugucuagccagcagcuagaucaaaggcgggcacuccugaauaugauugggauguccggaucaaaccagggcgcccgcgcuggucgagacgggguggucagagugugggauguaaagaaugcagagcuucugaacaaucaguucggaacuaugccuaguuugacccucgccugucugacaaaacagggccaaguugacuuaaacgaugcugugcaggcccugaccgaccucggccuuaucuacacugcgaaguauccaaauacaagcgaccuggauagguugacccagucucauccgauucuaaacaugaucgacacgaagaaauccucacugaauauaagcggguacaacuuuagucucggagcagccgucaaggcuggugccugcaugcuggauggcgggaacaugcuugaaacuaucaaagugucuccccaaaccauggacggcauucugaaguccaucuugaaagugaagaaagcacucggaauguucauuagcgaugcuccuggugagcggaauccauaugaaaacauccuguacaagauauguuuaucgggggacggauggcccuauauugccucucguacauccaucacuggccgcgcgugggagaauaccgucguugaucuggagucagacggcaagccucagaaagccgggaguaacggaagcaauaagucccuacagucugcagguuuuacagcuggccucaccuacagccagcugaugacgcuuaaagaugccauguugcaacuggacccaaacgcuaagacuuggauggauauugaagggagacccgaggacccuguggaaaucgcccucuaccagccaucaaguggaugcuauauccacuucuuuagggagccgacagaccugaaacaguucaagcaggaugcaaaguacucccauggcauugacguaaccgaucuuuuugccgcucaacccggucugacuagcgcggugauagacgcauugccucggaauauggucaucacaugucaggggucugaugacauuaaaaagcuguucgaaucacagggccgaaaagauaucaagcucauagacauugccuuaaguaaaaccgauagccgcaaguaugagaacgcugugugggaccaguacaaggaucugugccacaugcauacgggaaucguuguggagaaaaagaaaagaggcgggaaggaagagaucaccccacacugugcccuaauggacugcauuauguuugaugcagccgucuccggaggucucaauacaucugugcugagggcuguacuuccccgggacaugguuuuccgcacuucgaccccuagaguggucuuguga

SEQ ID NO: 8714 - RNA, 1710 nt, Artificial Sequence
  derived and/or modified CDS sequence (opt3) from LASV(G1774-SLE-2011;Clade IV)__AIT17205__NP
augagcgccuccaaggagaucaaaucuuuccuguggacccagucacucagaagggaacuuaguggcuacugcagcaacauuaagcugcaaguggucaaagacgcucaggcauuguuacacgggcuggauuuuuccgagguuucuaaugugcagcggcuaaugcgcaaggaacgacgugacgauaacgaccucaaaagacugagggaucuuaaucaggccguaaacaaucugguggaguugaagucgacacaacagaagucaauacuccgggucggaacucugacgagcgacgaucugcucaucuuagcggcugaccuggaaaaacuuaagaguaaagugacccgcacagagagacccuuguccgccgguguuuauaugggcaaccugucuagccagcagcuagaucaaaggaaggcacuccugaauaugauugggauguccggaucaaaccagggcgcccggaucggucgcgacggggugguccgagugugggauguuaaaaaugcugagcuucugaacaaucaguucggaacuaugccuaguuugacccucgcaugucugacaaagcagggccaaguagacuuaaacgaugccgugcaggcucugaccgaccucggccuuauuuacacugccaaguauccaaauacaagcgaccuggauagauugacccagucucauccgauccuaaacaugauagacacgaaaaaguccucacugaauaucagcggguacaacuuuagucucggagcggcagucaaagccggugcuugcaugcuggauggcgggaacaugcuugaaacuauuaaggugucuccccaaaccauggacggaauccugaaauccauuuugaaggugaaaaaggcccucggcauguucaucagcgauacaccuggugagaggaauccauaugaaaacauacuguacaagauuuguuuaucgggggacggauggcccuauaucgcaucucggacuuccauuaccggccgugcuugggagaauacagucguugaucuggagucagacggcaaaccucagaaggccgggaguaacagcuccaauaaaucucuacagagcgcgggacucaccgccggucugacguacucacagcuuaugacuuugaaggaugcaaugcugcaacucgacccaaacgcuaaaacauggauggauaucgaaggccgccccgaggacccuguggaaaucgcccuguaccagccaaguuccgggugcuauauucacuuuuucagagagccgaccgaccuuaagcaguuuaagcaggaugcuaaauacagccauggaauagacguaacugaucuguucgccgcacaacccggcuugacaucugccgugaucgacgcucucccuaggaaucuggucauuaccugucaggguucagaugacauccggaaguuacuggaaagucaggggcgaaaagauauaaagcuaauugacaucgcgcucagcaaaacggauucccgcaaguaugagaacgcagugugggaccaguacaaggaucugugccacaugcauaccggcaucguuguggagaaaaagaaaagaggaggcaaggaagagauuacaccacacugugcccuuauggacugcaucauguuugaugcugccgucucugggggauugaaugcaucggugcugagggccguacucccccgggacaugguuuuccgcacuagcaccccuagagugguccuguga

SEQ ID NO: 8715 - RNA, 1710 nt, Artificial Sequence
  derived and/or modified CDS sequence (opt3) from LASV(G1792-SLE-2011;Clade IV)__AIT17209__NP
augagcgccuccaaggagaucaaaucuuuccuguggacccagucacucagaagggaacuuaguggcuacugcagcaacauuaagcugcaaguggucaaagacgcucaggcauuguuacacgggcuggauuuuuccgagguuucuaaugugcagcggcuaaugcgcaaggaacgacgugacgauaacgaccucaaaagacugagggaucuuaaucaggccguaaacaaucugguggaguugaagucgacacaacagaagucaauacuccgggucggaacucugacgagcgacgaucugcucaucuuagcggcugaccuggaaaaacuuaagaguaaagugacccgcacagagagacccuuguccgccgguguuuauaugggcaaccugucuagccagcagcuagaucaaaggcgggcacuccuguccaugauugggaugucaggaggcaaucagggugcccgcgcugggcgagacggaguggucagagugugggauguaaagaacgcagagcuucugaauaaccaguucggcacuaugccuaguuugacccucgccugucugacaaaacagggccaaguugacuuaaaugaugugguccaggcucugaccgaccucgggcuuaucuacacugccaaguauccaaacacaagcgaccuggauagguugacccagucucauccgauucuaaauaugaucgacacgaagaaauccucacugaacauaagcggauacaauuuuagucucggugcggcagugaaggccggcgcuugcaugcuggaugggggaaacaugcuugaaacuaucaaagugucuccccaaaccauggacggcauucugaaguccaucuugaaagucaagaaagcccucgguauguucauuagcgauacaccuggggagcggaacccauaugaaaauauccuguacaagauauguuuaucgggagacggcuggcccuauauugcaucucguacuuccaucaccggccgcgcuugggagaacacaguuguggaucuggagucagacgggaagcuacagaaaaccggaaguaauaacagcaauaagucccuccagucugccgguuuuacggcgggccugacuuacagccagcuuaugacauugaaagaugccaugcugcaacucgacccuaacgcaaagauuuggauggauaucgaagggagaccagaggaccccguagaaaucgcucuguaccagccuucaaguggaugcuauauucacuucuuuagggagccaaccgaccuuaaacaguucaagcaggaugccaaguacucccauggcauagacgugacugaucuguuugcugcccaaccggguuugacaagcgcagucaucgacgcccucccccggaauauggugauuaccugucaggggucugaugacauccgaaaacuguuagaaucacagggccgcaaggauauaaaacugauugacaucgcucuaaacaagacggauaguagaaaauaugagaaugcgguuugggaccaguacaaggaucucugccacaugcauaccggaguggucguggagaagaaaaagaaaggcgggaaggaagagaucacaccucacugugcacugauggacugcauuauguucgaugccgcuguaagcggaggucuuaacacuuccguuuugagggccgugcugccacgggacauggucuuucgcaccucuacacccagagugguccucuga

SEQ ID NO: 8716 - RNA, 1710 nt, Artificial Sequence
  derived and/or modified CDS sequence (opt3) from LASV(G1897-SLE-2011;Clade IV)__AIT17211__NP
augagcgccuccaaggagaucaaaucuuuccuguggacccagucacucagaagggaacuuaguggcuacugcagcaacauuaagcugcaaguggucaaagacgcucaggcauuguuacacgggcuggauuuuuccgagguuucuaaugugcagcggcuaaugcgcaaggaacgacgugacgauaacgaccucaaaagacugagggaucuuaaucaggccguaaacaaucugguggaguugaagucgacacaacagaagucaauacuccgggucggaacucugacgagcgacgaucugcucaucuuagcggcugaccuggaaaaacuuaagaguaaagugacccgcacagagagacccuuguccgccgguguuuauaugggcaaccugucuagccagcagcuagaucaaaggcgggcacuccugaauaugauugggauguccggaggcaaccagggugcccaggcugggcgcgacggagugguccgagugugggauguaaagaaugcagagcuucugaacaaucaguucggcacuaugccuucauugacccucgccugucugacaaaacaaggccagguugacuuaaacgaugcugugcaggcccugaccgaccucgggcuuaucuacacugcgaaguauccaaauacaagugaccuggauagauugacccaaagccauccgauucuaaacaugaucgacacgaagaaaucuucccugaauauaucaggauacaacuuuagccucggugcagccgucaaggcuggcgccugcaugcuggaugggggaaacaugcuugaaacuaucaaagugaguccccagaccauggacggcauucugaagucuaucuugaaagugaagaaagcacucgguauguucauuuccgauacaccuggggagaggaauccauaugaaaacauccuguacaagauauguuuaagcggagacggcuggcccuauauugcuucgcggacuucuaucaccggccgugccugggagaauacagucguugaucuggaguccgacgggaagccucagaaagcgaacucaaauaguagcaacaagucccuacagucugccggauuuaccgcaggucucacguacagccaacugaugacucuuaaagaugcuauguugcagcuggacccaaaugccaagacauggauggauauugaaggccgccccgaggacccuguggaaaucgcucucuaccagccaucaagugggugcuauauccacuucuuuagagagccgaccgaccugaaacaguucaagcaagaugccaaguacucccauggaauugacguaacugaucuuuuugcagcccagcccggccugacaagcgcugugauagacgcguugccuaggaacauggucaucaccugucaggguucugaugacauucggaaacuccuggaaucacaggggcgaaaggauaucaaauuaauagacauugcacugaguaagacggauagccgcaaauaugagaaugccgugugggaccaauacaaggaucuaugccacaugcauaccggcaucguuguggagaagaaaaagagaggaggcaaagaagagaucacaccacacugugcucucauggacugcauuauguucgaugccgcagucuccgggggacugaacacuucugugcuuagggccguauugccccgggacaugguuuuucgcaccucgacaccuagagugguccuguga

SEQ ID NO: 8717 - RNA, 1710 nt, Artificial Sequence
  derived and/or modified CDS sequence (opt3) from LASV(G1932-SLE-2011;Clade IV)__AIT17213__NP
augagcgccuccaaggagaucaaaucuuuccuguggacccagucacucagaagggaacuugcuggcuacugcaguaacauuaagcugcaaguggucaaagacgcacaggccuuguuacacgggcuggauuuuagcgagguuuccaaugugcagcggcuaaugcgcaaggaacgacgugacgauaacgaccucaaaagacugagggaucuuaaucaggcgguaaacaaucugguggaguugaagucuacacaacagaagucgguccuccgggugggaacucugacgucagacgaucugcucauauuagcugccgaccuggaaaaacuuaagagcaaaguuauccgcaccgagagacccuugagugcaggaguguauaugggcaaccuguccucucagcagcuagaucaaaggcgggcccuccugaauaugauugggaugagcggauccaaccagggcguccgcgcuggucgagacggggugguaagaguuugggaugugaagaaugcagagcuucugaacaaucaguucggaacaaugccuucauugacucucgccugucugaccaaacagggccaagucgacuuaaacgaugcugugcaggcccugacagaccucggccuuaucuacaccgcgaaguauccaaauacaagugaccuggauagguugacucagagccauccgauucuaaacaugaucgacaccaagaaaucuucccugaauauaucaggguacaacuuuagccucggagcagccgugaaggcuggugccugcaugcuggauggcgggaacaugcuugaaacgaucaaagucaguccccaaacuauggacgguauucugaagucuaucuugaaaguuaagaaagcacucggcauguucauuuccgauaccccuggugagcggaauccauaugaaaacauccuguacaagauauguuuaagcggggacggauggcccuauauugcuucgcguacaucuaucacuggccgcgccugggagaauaccgugguagaucuggaguccgacggcaagccucagaaagcggggucaaacggaaguaauaagagccuacaguccgccgguuuuacagcaggccucaccuacucucagcugaugacgcuuaaagaugcuauguugcaacuggacccaaacgccaagacuuggauggauauugaagggagacccgaggacccuguggaaaucgcucucuaccagccaagcucaggaugcuauauccacuucuuuagggagccgacagaccugaaacaguucaagcaggaugccaaguacagucauggcauugacgucaccgaucuuuuugcagcccaacccggucugacuuccgcugugauagacgcguugccucggaauaugguuaucacaugucaggggagcgaugacauucgaaaacuccuggaaucucagggccgcaaggauaucaaauuaauagacauugcacugucaaagaccgauaguagaaaauaugagaacgccgugugggaccaguacaaggaucuaugccacaugcauacgggaaucgucguggagaagaaaaagaggggcgggaaagaagagaucaccccacacugugcucucauggacugcauuauguucgaugccgcaguaagcggaggucugaauacauccguucuucgggccguguugccccgcgacauggucuuuagaacuucuaccccuagggugguccuguga

SEQ ID NO: 8718 - RNA, 1710 nt, Artificial Sequence
  derived and/or modified CDS sequence (opt3) from LASV(G1959-SLE-2011;Clade IV)__AIT17217__NP
augagcgccuccaaggagaucaaaucuuuccuguggacccagucacucagaagggaacuuaguggcuacugcagcaacauuaagcugcaaguggucaaagacgcucaggcauuguuacacgggcuggauuuuuccgagguuucuaaugugcagcggcuaaugcgcaaggaacgacgugacgauaacgaccucaaaagacugagggaucuuaaucaggccguaaacaaucugguggaguugaagucgacacaacagaagucaauacuccgggucggaacucugacgagcgacgaucugcucaucuuagcggcugaccuggaaaaacuuaagaguaaagugacccgcacagagagacccuuguccgccgguguuuauaugggcaaccugucuagccagcagcuagaucaaaggcgggcacuccuguccaugauugggaugucaaguggagugcagggcgcccgcgcuggucgagacggggucgugagaguaugggauguuaagaaugcagagcuucugaacaaucaguucggaacuaugccuagcuugacccucgccugucugacaaaacagggccaaguggacuuaaacgaugucgugcaggcucugaccgaccucggccuuaucuacacugccaaguauccaaauacaucugaccuggauagguugacccagucccauccgauucuaaacaugaucgacacgaagaaaucaagccugaauauaaguggguacaacuuuucucucggagcggcagugaaggccggugcuugcaugcuggauggcgggaauaugcuugaaacuaucaaagucagcccccaaaccauggacggaauuuugaaguccauccugaaaguuaagaaagcccucggcauguucauuucggagacaccuggugaacggaacccauaugagaacauccuguacaagauauguuuaucuggggauggauggcccuauauugcaucccguacuucaaucaccggccgcgcuugggagaauacagugguagaccuggaaagugauggcaagccucagaaagccgggagcaacaauuccaacaagucucuacagagcaccggauuugcggccggucucacguacucacagcugaugacucuuaaagacgcaauguugcaacuggauccaaaugcuaagacauggauggacauugagggcagacccgaagauccuguggaggucgcccucuaccagccaaguuccgggugcuauauccacuucuuuagggaaccgaccgaccugaaacaguucaagcaggacgcuaaguacagccauggaaucgaugugacugaccuuuuugccgcacaacccggccugacaucugccguuauugaugcuuugccucggaacauggugauaaccugucaggguucagacgauaucaaaaagcuccuggagagucaggggcgaaaagacauuaaguuaaucgauauagcgcugagcaaaacggacucccgcaaguaugagaaugcagucugggaucaguacaaggaccuaugccacaugcauaccggcgugguaguugagaaaaagaaaagaggaggcaaggaagaaauuacaccacacugugcccucauggauugcaucauguucgacgcugccgugucugggggacugaacacuucgguccuuagggcaguguugccccgggauauggucuuucgcaccagcacaccuagagugguucuguga

SEQ ID NO: 8719 - RNA, 1710 nt, Artificial Sequence
  derived and/or modified CDS sequence (opt3) from LASV(G2141-SLE-2011;Clade IV)__AIT17225__NP
augagcgccuccaaggagaucaaaucuuuccuguggacccagucacucagaagggaacuuaguggcuacugcagcaacauuaagcugcaaguggucaaagacgcucaggcauuguuacacgggcuggauuuuuccgagguuucuaaugugcagcggcuaaugcgcaagcagcgacgugacgauaacgaccucaaaagacugagggaucuuaaucaagccguaaacaaucugguggaauugaagucgacacagcagaagucaguccuccgggugggaacucugacgagcgacgaucugcucguuuuagcggcugaccuggagaaacuuaagaguaaagugacccgcacagaaagacccuuguccgccggugucuauaugggcaaccugucuagccagcaacuagaucagaggcgggcacuccugaauaugauagggauguccggaggcaaccagggugcccgcgcugggaaugacggagugguacgaguuugggaugugaagaacgcagaccuucugaauaaccaguucggcacuaugccuucauugacccucgccugucugacaaaacaaggccaggucgauuuaaaugacguggugcaggcucugaccgaccucgggcuuaucuacacugccaaguauccaaacacaagugaucuggacagauugacccaaagccauccgauucuaaauaugaucgauacgaagaaaucuucccugaacauuucaggauacaacuuuagccucggugcggcagucaaggccggcgcuugcaugcuggacgggggaaauaugcuugagacuaucaaaguuaguccccagaccauggauggcauacugaagucuaucuugaaagugaagaaagcccucgguauguucauuuccgacacaccuggggagaggaacccauaugaaaauauccuguacaagauuuguuuaagcggagauggcuggcccuauaucgcaucgcggacuucuauaaccggccgugcuugggagaacacaguaguggaccuggaauccgaugggaagccucagaaaaccggaaauaacucaaguaauaagagccuacaguccgccgguuuuacggcgggccucacuuacucucaacugaugacacuuaaagacgccauguugcagcuggauccaaacgcaaagaccuggauggacauugaggggcgccccgaggacccugucgaaguggcucucuaccagccaagcucaggaugcuauauccacuucuuuagagagccgacugaucugaaacaguucaagcaagacgccaaguacagucauggcauugauguuacagaccuuuuugcugcccagcccggucugaccuccgcagugaucgaagccuugccuaggaauauggucaucacgugucaggggagcgaugacauucggaaacuccuggagucucagggccgaaaggauauaaaauuaaucgacauugcucugucaaagaucgauagucgcaaauaugaaaacgcggugugggaccaauacaaggaucuaugccacaugcauaccggaguaguuguggagaagaaaaagagaggcgggaaagaggaaauaacaccacacugugcacucauggacugcauuauguucgaugccgcugucagcggaggucugaauacucuuguguugagggccguccugccccgggacaugguguuucgcaccuccacaccuaagguugugcucuga

SEQ ID NO: 8720 - RNA, 1710 nt, Artificial Sequence
  derived and/or modified CDS sequence (opt3) from LASV(G2147-SLE-2011;Clade IV)__AIT17229__NP
augagcgccuccaaggagaucaaaucuuuccuguggacccagucacucagaagggaacuuaguggcuacugcagcaacauuaagcugcaaguggucaaagacgcucaggcauuguuacacgggcuggauuuuuccgagguuucuaaugugcagcggcuaaugcgcaaggaacgacgugacgauaacgaccucaaaagacugagggaucuuaaucaggccguaaacaaucugguggaguugaagucgacacaacagaagucaguccuccgggugggaacucugacgagcgacgaucugcucauauuagcggcugaccuggaaaaacuuaagaguaaaguuauccgcaccgagagacccuuguccgccgguguguauaugggcaaccugucuagccagcagcuagaucaaaggcgggcacuccuguccaugauugggaugucaggaggcaaucaggguacacgcgccgggcgagacggagucgugagaguaugggauguuaagaacgcugagcuucugaauaaccaguucggcacuaugccuaguuugacccucgcaugucugacaaaacagggccaaguggacuuaaaugaugccguccaggcucugaccgaccucgggcuuaucuacacugccaaguauccaaacacaagcgaccuggauagguugacccagucucauccgauucuaaauaugaucgacacgaagaaauccucacugaacauaagcggauacaauuuuagucucggugcggcagugaaggccggcgcuugcaugcuggaugggggaaacaugcuugaaacuaucaaagugucuccccaaaccauggacggcauucugaaguccaucuugaaagucaagaaagcccucgguauguucauuagcgauacaccuggggagcggaacccauaugaaaauauccuguacaagauauguuuaucgggagacggcuggcccuauauugcaucucguacuuccaucaccggccgcgcuugggagaacacaguuguggaucuggagucagacgggaagccucagaaagccggaaguaauaacagcaauaagucccuacagucugcggguuuuaccgccggccucacguacagccagcugaugacucuuaaagaugcaauguugcaacuggacccaaacgcuaagacauggauggauauugaagggagacccgaggacccuguagaaaucgcccucuaccagccaucaaguggaugcuauauccacuucuuuagggagccgaccgaccugaaacaguucaagcaggaugcuaaguacucccauggcauugacgugacugaucuuuuugccgcacaacccggucugacaagcgccgucauagacgcuuugccucggaauauggugaucaccugucaggggucugaugacauucgaaaacuccuggaaucacagggccgcaaggauaucaaauuaauagacauugcgcugaguaaggcagauagcagaaaauaugagaacgccguuugggaccaguacaaggaucuaugccacaugcauacgggaguggucguggagaagaaaaagaggggcgggaaagaagagaucaccccacacugugcucucauggacugcaucauguucgaugccgcaguauccggaggucugaauacaucuguucuucgggccguguugccccgcgacauggucuuuagaacuucgaccccuagggugguccuguga

SEQ ID NO: 8721 - RNA, 1710 nt, Artificial Sequence
  derived and/or modified CDS sequence (opt3) from LASV(G2165-SLE-2011;Clade IV)__AIT17233__NP
augagcgccuccaaggaggugaaaucuuuccuguggacccagucacucagaagggaacuuaguggcuacugcagcaacaucaagcugcaagucguuaaagacgcucaggcauuguuacacgggcuggauuuuuccgaggugucuaauguacagcggcuaaugcgcaaggaacgacgugacgauaacgaccucaaaagacugagggaucuuaaucaggccgugaacaaucuggucgaguugaagucgacacaacagaagucaauucuccgggugggaacucugacgagcgacgaucugcucguuuuagcggcugaccuggaaaaacuuaagaguaaagugacccgcacagagagacccuuguccgccggugucuauaugggcaaccugucuagccagcagcuagaucaaaggcgggcacuccuguccaugauagggaugucaggaggcaaucagggugcccaggcugggcgcgacggagugguacgaguuugggaugugaagaacgcagagcuucugaauaaccaguucggcacuaugccuaguuugacccucgccugucugacaaaacaaggccaggucgacuuaaaugaugcugugcaggcccugaccgaccucgggcuuaucuacacugcgaaguauccaaacacaagcgaccuggauagauugacccaaucucauccgauucuaaauaugaucgacacgaagaaauccucacugaacauuagcggauacaauuuuagucucggugcagccgugaaggcuggcgccugcaugcuggaugggggaaacaugcuugaaacuaucaaagucucuccccagaccauggacggcauacugaaguccaucuugaaaguuaagaaagcacucgguauguucauuagcgauacaccuggggagaggaacccauaugaaaauauccuguacaagauuuguuuaucgggagacggcuggcccuauaucgcuucucggacuuccauaaccggccgugccugggagaacacagugguagaucuggagucagacgggaagccucagaaagcgggaaguaauaacagcaauaagucccuacagucugccgguuuuaccgcaggccucacguacagccaacugaugacucuuaaagaugcuauguugcagcuggacccaaacgccaagacauggauggauauugaagggcgccccgaggacccuguggaagucgcucucuaccagccaucaaguggaugcuauauccacuucuuuagagagccgaccgaccugaaacaguucaagcaagaugccaaguacucccauggcauugacgugacugaucuuuuugcagcccagcccggucugacaagcgcuguuaucgacgcguugccuaggaauauggugaucaccugucaggggucugaugacauucggaaacuccuggaaucacagggccgaaaggauauaaaauuaaucgacauugcacugaguaagacggauagccgcaaauaugagaacgccgucugggaccaauacaaggaucuaugccacaugcauaccggagugguaguugagaagaaaaagagaggcgggaaagaagagaucacaccacacugugcucucauggacugcauaauguucgaugccgcaguguccggaggucugaauacuucuguccuuagggccguguugccccgggacauggucuuucgcaccucgacaccuagagugguucuguga

SEQ ID NO: 8722 - RNA, 1710 nt, Artificial Sequence
  derived and/or modified CDS sequence (opt3) from LASV(G2184-SLE-2011;Clade IV)__AIT17237__NP
augagcgccuccaaggagaucaaaucuuuccuguggacccagucacucagaagggaacuuaguggcuacugcagcaacauuaagcugcaaguggucaaagacgcucaggcauuguuacacgggcuggauuuuuccgagguuucuaaugugcagcggcuaaugcgcaaggaacgacgugacgauaacgaccucaaaagacugagggaucuuaaucaggccguaaacaaucugguggaguugaagucgacacaacagaagucaauacuccgggucggaacucugacgagcgacgaucugcucaucuuagcggcugaccuggaaaaacuuaagaguaaagugacccgcacagagagacccuuguccgccgguguuuauaugggcaaccugucuagccagcagcuagaucaaaggcgggcacuccuguccaugauugggaugucaggaggcaaucagggugcccgcgcugggcgagacggaguggucagagugugggauguaaagaacgcagagcuucugaauaaccaguucggcacuaugccuaguuugacccucgccugucugacaaaacagggccaaguugacuuaaaugaugcugugcaggcccugaccgaccucgggcuuaucuacacugcgaaguauccaaacacaagcgaccuggauagguugacccagucucauccgauucuaaauaugaucgacacgaagaaauccucacugaacauaagcggauacaauuuuagucucggugcagccgucaaggcuggcgccugcaugcuggaugggggaaacaugcuugaaacuaucaaagugucuccccaaaccauggacggcauucugaaguccaucuugaaagugaagaaagcacucgguauguucauuagcgauacaccuggggagcggaacccauaugaaaauauccuguacaagauauguuuaucgggagacggcuggcccuauauugcuucucguacuuccaucaccggccgcgccugggagaacacagucguugaucuggagucagacgggaagccucagaaagcgggaaguaauaacagcaauaagucccuacagucugccgguuuuaccgcaggccucacguacagccagcugaugacucuuaaagaugcuauguugcaacuggacccaaacgccaagacauggauggauauugaagggagacccgaggacccuguggaaguagcucucuaccagccaucaaguggaugcuauauccacuucuuuagggagccgaccgaccugaaacaguucaagcaggaugccaaguacucccauggcaucgacgugacugaucuuuuugcagcccaacccggucugacaagcgcugucauugacgcguugccucggaauauggugauaaccugucaggggucugaugacauccgaaaacuccuggaaucacagggccgcaaggauauuaaauuaaucgacauagcacugaguaagacggauagcagaaaauaugagaacgccguuugggaccaguacaaggaucuaugccacaugcauaccggaguggucguggagaagaaaaagaggggcgggaaagaagagauuacaccacacugugcucucauggacugcaucauguucgaugccgcaguauccggaggucugaauacuucuguucuucgggccguguugccccgcgacauggucuuuagaaccucgacaccuagggugguccuguga

SEQ ID NO: 8723 - RNA, 1710 nt, Artificial Sequence
  derived and/or modified CDS sequence (opt3) from LASV(G2197-SLE-2011;Clade IV)__AIT17241__NP
augagcgccuccaaggagaucaaaucuuuccuguggacccagucacucagaagggaacuuaguggcuacugcagcaacauuaagcugcaaguggucaaagacgcucaggcauuguuacacgggcuggauuuuuccgagguuucuaaugugcagcggcuaaugcgcaaggaacgacgugacgauaacgaccucaaaagacugagggaucuuaaucaggccguaaacaaucugguggaguugaagucgacacaacagaagucaauacuccgggucggaacucugacgagcgacgaucugcucaucuuagcggcugaccuggaaaaacuuaagaguaaagugacccgcacagagagacccuuguccgccgguguuuauaugggcaaccugucuagccagcagcuagaucaaaggcgggcacuccuguccaugauugggaugucaggaggcaaucagggugcccgcgcugggcgagacggaguggucagagugugggauguaaagaacgcagagcuucugaauaaccaguucggcacuaugccuaguuugacccucgccugucugacaaaacagggccaaguugacuuaaaugaugcugugcaggcccugaccgaccucgggcuuaucuacacugcgaaguauccaaacacaagcgaccuggauagguugacccagucucauccgauucuaaauaugaucgacacgaagaaauccucacugaacauaagcggauacaauuuuagucucggugcagccgucaaggcuggcgccugcaugcuggaugggggaaacaugcuugaaacuaucaaagugucuccccaaaccauggacggcauucugaaguccaucuugaaagugaagaaagcacucgguauguucauuagcgauacaccuggggagcggaacccauaugaaaauauccuguacaagauauguuuaucgggagacggcuggcccuauauugcuucucguacuuccaucaccggccgcgccugggagaacacagucguugaucuggagucagacgggaagccucagaaagcgggaaguaauaacagcaauaagucccuacagucugccgguuuuaccgcaggccucacguacagccagcugaugacucuuaaagaugcuauguugcaacuggacccaaacgccaagacauggauggauauugaagggagacccgaggacccuguggaaaucgcucucuaccagccaucaaguggaugcuauauccacuucuuuagggagccgaccgaccugaaacaguucaagcaggaugccaaguacucccauggcauugacguaacugaucuuuuugcagcccaacccggucugacaagcgcugugauagacgcguugccucggaauauggucaucaccugucaggggucugaugacauucgaaaacucuucgaaucacagggccgcaaggauaucaaacugauagacauugcauuaaguaagacggauagcagaaaauaugagaacgccgugugggaccaguacaaggaucugugccacaugcauaccggaguuguggucgagaagaaaaagaggggcgggaaagaagagaucacaccacacugugcucuaauggacugcaucauguuugaugccgcaguguccggaggucucaauacuucuguacugcgggccguucuuccccgcgacaugguguucagaaccucgacaccuagggucguguuguga

SEQ ID NO: 8724 - RNA, 1710 nt, Artificial Sequence
  derived and/or modified CDS sequence (opt3) from LASV(G2222-SLE-2011;Clade IV)__AIT17245__NP
augagcgccuccaaggagaucaaaucuuuccuguggacccagucacucagaagggaacuuaguggcuacugcagcaacauuaagcugcaaguggucaaagacgcucaggcauuguuacacgggcuggauuuuuccgagguuucuaaugugcagcggcuaaugcgcaaggaacgacgugacgauaacgaccucaaaagacugagggaucuuaaucaggccguaaacaaucugguggaguugaagucgacacaacagaagucaauacuccgggucggaacucugacgagcgacgaucugcucaucuuagcggcugaccuggaaaaacuuaagaguaaagugacccgcacagagagacccuuguccgccgguguuuauaugggcaaccugucuagccagcagcuagaucaaaggcgggcacuccugaauaugauugggauguccggaucaaaccagggcgcccgcacuggucgagacgggguggucagagugugggauguaaagaaugcugagcuucugaacaaucaguucggaaccaugccuaguuugacacucgcaugucugaccaaacagggccaaguugacuuaaacgaugccgugcaggcucugacugaccucggccuuaucuacacagccaaguauccaaauaccagcgaccuggauagguugacgcagucucauccgauucuaaacaugaucgacacuaagaaauccucacugaauauaagcggguacaacuuuagucucggagcggcagucaaggccggugcuugcaugcuggauggcgggaacaugcuugaaaccaucaaagugucuccccaaacaauggacggcauucugaaguccaucuugaaagugaagaaagcccucggaauguucauuagcgauacuccuggugagcggaauccauaugaaaacauccuguacaagauauguuuaucgggggacggauggcccuauauugcaucucguaccuccaucacaggccgcgcuugggagaauaccgucguugaucuggagucagacggcaagccucagaaagccgggaguaacaauagcaacaagucccuacagucugcgggacucacggccggucugacuuacagccagcuuaugacauugaaagaugcaaugcugcaacucgacccaaaugcuaagaccuggauggauauugaaggcagacccgaggacccuguggaaaucgcccuguaccagccaucaagugggugcuauauccacuuuuucagggagccgacugaccuuaaacaguuuaagcaggaugcuaaguacucccauggaauugacguagccgaucuguucgcagcccaacccggcuugacaagcgcugugauagacgcgcucccucggaaccuggucaucaccugucaggguucugaugacauucgaaaauuacuggaaucacaggggcgcaaggauaucaaacuaauagacauugcacucaguaagacggauagcagaaaauaugagaaugccgugugggaccaguacaaggaucugugccacaugcauaccggcaucguuguggagaagaaaaagaggggaggcaaagaagagaucacaccacacugugcucuuauggacugcauuauguuugaugccgcagucuccgggggauugaacgccucugugcugcgggcuguacucccccgcgacaugguuuucagaacuucgaccccuagggugguccuguga

SEQ ID NO: 8725 - RNA, 1710 nt, Artificial Sequence
  derived and/or modified CDS sequence (opt3) from LASV(G2230-SLE-2012;Clade IV)__AIT17247__NP
augagcgccuccaaggagaucaaaucuuuccuguggacccagucacucagaagggaacuuaguggcuacugcagcaacauuaagcugcaaguggucaaagacgcucaggcauuguuacacgggcuggauuuuuccgagguuucuaaugugcagcggcuaaugcgcaagcagcgacgugacgauucggaccucaaaagacugagggaucuuaaccaagccguaaauaaccugguggaauugaagucaacacagcagaaguccguccuccgggugggaacucugacgagugacgaucugcucauauuagcggcugaccuggagaaacuuaaguccaaaguuauccgcaccgaaagacccuugucuagcgguguguauaugggcaaucuguccucacagcaacuagaucagaggcgggcccuccugaacaugauugggaugaguggaggcaaucagggugcacaggucgggcgcgacggagugguacgaguuugggaugugaagaacgccgaccuucugaauaaccaauucggcacaaugccuagcuugacucucgcuugucugaccaaacagggccaggucgauuuaaaugacguggugcaagcacugacagaccucgggcuuaucuacaccgccaaguauccaaacacuucugaucuggacagauuggcucagucccauccgauucuaaauaugaucgauacaaagaaaucaagccugaacauaaguggauacaauuuuucucucggugccgcggucaaggcaggcgccugcaugcuggacgggggaaacaugcuugagaccaucaaaguuagcccccagacgauggauggcauucugaaaagcaucuugaaggugaagaaagcucucgguauguucauuucggagacuccuggggaaaggaacccauaugagaauauccuguacaagauauguuuaucuggagacggcuggcccuauauugccucccggaccucaaucacaggccgugcaugggaaaacacuauuguagaucuggagagugacgggaagccucagaaagcuggaagcaauaacuccaauaagucucuacaaagcgccgguuuuaccgcgggccucacauacucacagcugaugacccuuaaagauaguauguugcagcuggacccaaacgccaagacguggauggauaucgaggggcgccccgaagacccuguggaggucgcacucuaccagccauccagcggaugcuauauccacuucuuuagagaaccgacugaccugaaacaauucaagcaggaugcuaaguacucucauggcauugacgugacagaucuuuuugccgcucagcccggucugaccucagccguuauagaggcauugccuaggaauauggugaucacuugucaggggagugacgauauucggaaacuccuggaaagccaaggccgaaaggacaucaaauuaauagauauugcccugaacaagacagacucccgcaaauaugagaaugcugucugggaucaguacaaggaccuaugccacaugcauaccggagugguaguugagaagaaaaagagaggcgggaaagaagagaucacgccacacugugcgcucauggauugcaucauguucgacgcagccgugucuggaggucugaagacccuugucuugagggcugugcugccccgggauauggucuuucgcacaucgacuccuaaagugguucucuga

SEQ ID NO: 8726 - RNA, 1710 nt, Artificial Sequence
  derived and/or modified CDS sequence (opt3) from LASV(G2259-SLE-2012;Clade IV)__AIT17251__NP
augagcgccuccaaggagaucaaaucuuuccuguggacccagucacucagaagggaacuuaguggcuacugcagcaacauuaagcugcaaguggucaaagacgcucaggcauuguuacacgggcuggauuuuuccgagguuucuaaugugcagcggcuaaugcgcaagcagcgacgugacgauucggaccucaaaagacugagggaucuuaaccaagccguaaauaaccugguggaauugaagucaacacagcagaaguccguccuccgggugggaacucugacgagugacgaucugcucauauuagcggcugaccuggagaaacuuaaguccaaaguuauccgcaccgaaagacccuugucuagcgguguguauaugggcaaucuguccucacagcaacuagaucagaggcgggcccuccugaacaugauugggaugaguggaggcaaucagggugcacaggucgggcgcgacggagugguacgaguuugggaugugaagaacgccgaccuucugaauaaccaauucggcacaaugccuagcuugacucucgcuugucugaccaaacagggccaggucgauuuaaaugacguggugcaagcacugacagaccucgggcuuaucuacaccgccaaguauccaaacacuucugaucuggacagauuggcucagucccauccgauucuaaauaugaucgauacaaagaaaucaagccugaacauaaguggauacaauuuuucucucggugccgcggucaaggcaggcgccugcaugcuggacgggggaaacaugcuugagaccaucaaaguuagcccccagacgauggauggcauucugaaaagcaucuugaaggugaagaaagcucucgguauguucauuucggagacuccuggggaaaggaacccauaugagaauauccuguacaagauauguuuaucuggagacggcuggcccuauauugccucccggaccucaaucacaggccgugcaugggaaaacacuauuguagaucuggagagugacgggaagccucagaaaaccggaagcaauaacuccaauaagucucuacaaagcgcugguuuuacagccggccucaccuacucacagcugaugacgcuuaaagauaguauguugcagcuggacccaaacgcgaagacuuggauggauaucgaggggcgccccgaagacccuguggaggucgcccucuaccagccauccagcggaugcuauauccacuucuuuagagaaccgacagaccugaaacaauucaagcaggaugcaaaguacucucauggcauugacgugaccgaucuuuuugcugcccagcccggucugacuucagcuguuauagaggccuugccuaggaauauggugaucacaugucaggggagugacgauauucggaaacuccuggaaagccaaggccgaaaggacaucaaauuaauagauauugcacugaacaagaccgacucccgcaaauaugagaaugccgucugggaucaguacaaggaccuaugccacaugcauacgggagugguaguugagaagaaaaagagaggcgggaaagaagagaucaccccacacugugcucucauggauugcaucauguucgacgcggcagugucuggaggucugaagacacuugucuugagggccgugcugccccgggauauggucuuucgcacuucgaccccuaaagugguucucuga

SEQ ID NO: 8727 - RNA, 1710 nt, Artificial Sequence
  derived and/or modified CDS sequence (opt3) from LASV(G2263-SLE-2012;Clade IV)__AIT17255__NP
augagcgccuccaaggagaucaaaucuuuccuguggacccagucacucagaagggaacuuaguggcuacugcagcaacauuaagcugcaaguggucaaagacgcucaggcauuguuacacgggcuggauuuuuccgagguuucuaaugugcagcggcuaaugcgcaaggaacgacgugacgauaacgaccucaaaagacugagggaucuuaaucaggccguaaacaaucugguggaguugaagucgacacaacagaagucaguccuccgggugggaacucugacgagcgacgaucugcucguuuuagcggcugaccuggaaaaacuuaagaguaaagugacccgcacagagagacccuuguccgccggugucuauaugggcaaccugucuagccagcagcuagaucaaaggcgggcacuccuguccaugauagggaugucaggaggcaaucagcgcgcccaggcuggucgagacggggugguaagaguuugggaugugaagaacgcagagcuucugaauaaccaguucggaacuaugccuaguuugacccucgccugucugacaaaacaaggccaggucgacuuaaaugaugcugugcaggcccugaccgaccucggccuuaucuacacugugaaguauccaaacgcgagcgaccuggauagguugacacaaucucauccgauucuaaauaugaucgacaccaagaaauccucacugaacauuagcggguacaauuuuagucucggagcagccgucaaggcuggugccugcaugcuggauggcgggaacaugcuugaaacgaucaaaguuucuccccagacuauggacggaauacugaaguccaucuugaaagugaagaaaacccucggcauguucauuagcgauacaccuggugagcggaacccauaugaaaauauccuguacaagauuuguuuaucgggggacggauggcccuauaucgcaucucguacuuccauaaccggccgcgcuugggagaacacaguaguggaucuggagucaaauggcaagccucagaaagccgacaguaacagcuccaauaagucucuacagagcgcgggguuuaccgccggacucacguacucacaacugaugacucuuaaagaugcaauguugcagcuggacccaaacgcuaagacauggauggauauugaagguagacccgaggacccugucgaaaucgccuucuaccagccaaguuccggcugcuauauucacuuuuucagggagccgaccgaccucaaacaguuuaagcaagaugcuaaguacagccaugggaucgacgugacugaucuguucgccgcacagcccggacuuacaucugccguuaucgacgcucugccucggaauauggugauuaccugucagggcucagaugacauacgaaaauugcucgaaagucagggucgcaaggauaucaaacugauugacaucgcguuaagcaagacggauuccagaaaauaugagaacgcagucugggaccaauacaaggaucugugccacaugcauaccggggugguaguugagaagaaaaagaggggcggaaaagaagagauaacaccacacugugcccuaauggacugcauuauguuugaugcugccgugucuggcgggcucaauacucugguccuucgggcaguguugccccgcgacauggucuucagaaccucgacaccuagggugguucuguga

SEQ ID NO: 8728 - RNA, 1710 nt, Artificial Sequence
  derived and/or modified CDS sequence (opt3) from LASV(G2280-SLE-2012;Clade IV)__AIT17259__NP
augagcgccuccaaggagaucaaaucuuuccuguggacccagucacucagaagggaacuuaguagcuacugcuccaacauuaagcugcaaguggucaaagacgcucaggcauuguuacacggccuggauuuuucugagguuucgaaugugcagcggcuaaugcgcaaggaacgacgugacgauaacgaccucaaaagacugagggaucuuaaucaggccguaaacaaucugguggaguugaagucaacacaacagaaguccauacuccgggucgggacucugacgagugacgaucugcucaucuuagcggcugaccuggaaaaacuuaaguccaaagugacccgcacagagagacccuugucugccggaguuuauauggguaaccugagcucccagcagcuagaucaaaggcgggcacuccugaauaugcuuggcaugucagggaguaaccagggagcccgcgcuggccgagacgguguggucagagugugggauguaaagaaugcagagcuguugaacaaucaguucgggacuaugccuagccucacccuggccuguuuaacaaaacagggacaaguugaccugaacgaugcugugcaggcccucaccgaccuuggccugauuuacacugcgaaguauccaaauacaucugacuuggauaggcuaacccagucccauccgauccugaacaugauugacacgaagaaaucaagccucaauaucaguggcuacaacuuuucucugggggcagccgucaaggcuggagccugcaugcuugaugguggcaacaugcuggaaacuauaaaagugagcccccaaaccauggacgggauccucaagagcauuuugaaagugaagaaagcacugggaauguucaucucggauacaccuggcgagcggaauccauaugaaaacauuuuauacaagaucugucugucuggugacggguggcccuauauagcuucccguacuucaauuaccggacgcgccugggagaauacagucguugaucuagagagugacggcaagccucagaaagcgggcagcaacuccucuaauaagagccuccagucagccggguuuaccgcaggacugacguacagucagcuuaugacuuugaaagaugcuaugcugcaacucgacccaaacgccaagacauggauggauaucgaagguagacccgaggacccuguggaaauugcucuguaccagccauccagcggcugcuauauccacuucuuuagggagccgaccgaccuuaaacaguucaagcaggaugccaaguacucucaugggaucgacguaacugaucuguuugcagcccaacccggauugacaucagcugugauugacgcgcucccucggaauauggucauaaccugucagggcagugaugacauccgaaaacuguuagaaagccagggucgcaaggauauuaaacugaucgacauagcacuauccaagacggauucuagaaaauaugagaacgccgugugggaccaguacaaggaucucugccacaugcauaccgggauuguuguggagaagaaaaagaggggcggaaaagaagagaucacaccacacugugcucugauggacugcaucauguucgaugccgcagucucgggcgggcuuaaugccagcguguugcgggcuguacugccccgcgacaugguuuuuagaacuuccaccccuagggugguccucuga

SEQ ID NO: 8729 - RNA, 1710 nt, Artificial Sequence
  derived and/or modified CDS sequence (opt3) from LASV(G2295-SLE-2012;Clade IV)__AIT17263__NP
augagcgccuccaaggagaucaaaucuuuccuguggacccagucacucagaagggaacuuaguggcuacugcagcaacauuaagcugcaaguggucaaagacgcucaggcauuguuacacgggcuggauuuuuccgagguuucuaaugugcagcggcuaaugcgcaaggaacgacgugacgauaacgaccucaaaagacugagggaucuuaaucaggccguaaacaaucugguggaguugaagucgacacaacagaagucaguccuccgggugggaacucugacgagcgacgaucugcucauauuagcggcugaccuggaaaaacuuaagaguaaaguuauccgcaccgagagacccuuguccgccgguguguauaugggcaaccugucuagccagcagcuagaucaaaggcgggcacuccugaauaugauugggaugggaggcuccaaccagggugcccgcgcugggcgagacggagucgugagaguaugggauguuaagaaugcagagcuucugaacaaucaguucggcacaaugccuucauugacucucgccugucugaccaaacagggccaaguggacuuaaacgaugcuguccaggcccugacagaccucgggcuuaucuacaccgcgaaguauccaaauacaagugaccuggauagguugacucagagccauccgauucuaaacaugaucgacaccaagaaaucuucccugaauauaucaggauacaacuuuagccucggugcagccgugaaggcuggcgccugcaugcuggaugggggaaacaugcuugaaacgaucaaagugaguccccaaacuauggacggcauucugaagucuaucuugaaagucaagaaagcacucgguauguucauuuccgauaccccuggggagcggaauccauaugaaaacauccuguacaagauauguuuaagcggagacggcuggcccuauauugcuucgcguacaucuaucacuggccgcgccugggagaauaccguuguggaucuggaguccgacgggaagccucagaaagcgggaucaaacgguaguaauaagagccuacaguccgccggcuuuacagcagggcucaccuacucucagcugaugacgcuuaaagaugcuauguugcaacuggacccaaacacuaagacauggauggauauugaaggaagacccgaggacccuguagaaguggcccucuaccagccaagcucaggcugcuauauccacuucuuuagggagccgaccgaccugaaacaguucaagcaggaugcuaaguacagucaugguaucgacgucacugaucuuuuugccgcacaacccgggcugacauccgccgugauugacgcuuugccucggaauaugguuauaaccugucagggcagcgaugacauccgaaaacuccuggaaucucagggacgcaaggauauuaaauuaaucgacauagcgcugucaaagacggauaguagaaaauaugagaacgcagugugggaccaguacaaggaucuaugccacaugcauaccggcauugucguggagaagaaaaagaggggagggaaagaagagaucacaccacacugugcccucauggacugcaucauguucgaugcugccguaagcgguggccugaauacuuccguucuucgggcaguguugccccgcgacauggucuuuagaaccucuacaccuagggugguccuguga

SEQ ID NO: 8730 - RNA, 1710 nt, Artificial Sequence
  derived and/or modified CDS sequence (opt3) from LASV(G2315-SLE-2012;Clade IV)__AIT17267__NP
augagcgccuccaaggagaucaaaucuuuccuguggacccagucacucagaagggaacuuaguggcuacugcagcaacauuaagcugcaaguggucaaagacgcucaggcauuguuacacgggcuggauuuuuccgagguuucuaaugugcagcggcuaaugcgcaaggaacgacgugacgauaacgaccucaaaagacugagggaucuuaaucaggccguaaacaaucugguggaguugaagucgacacaacagaagucaguccuccgggugggaacucugacgagcgacgaucugcucauauuagcggcugaccuggaaaaacuuaagaguaaaguuacccgcacagagagacccuuguccgccgguguguauaugggcaaccugucuagccagcagcuagaucaaaggcgggcacuccugaauaugaucgggauguccggaggcaaccagggugcccgcgcugggcgagacggagucgugagaguaugggauguuaagaaugcagagcuucugaacaaucaguucggcacuaugccuucauugacccucgccugucugacaaaacagggccaaguggacuuaaacgaugcuguccaggcccugaccgaccucgggcuuauuuacacugcgaaguauccaaauacaagugaccuggauagguugacccagagccauccgauccuaaacaugauugacacgaagaaaucuucccugaauaucucaggauacaacuuuagccucggugcagccgugaaggcuggcgccugcaugcuggaugggggaaacaugcuugaaacuauaaaagugaguccccaaaccauggacucuauccugaaguccauuuugaaagucaagaaagcacucggcauguucaucagcgauacaccuggugagcggaauccauaugaaaacauucuguacaagaucuguuuaucgggggacggauggcccuauauagcuucucguacuuccauuaccggccgcgccugggagaauacaguuguggaucuggagucagacggcaagccucagaaagcggggaguaacaauagcaacaagucccuacagucugccggauuugcagcuggucucaccuacagccagcugaugacgcuuaaagaugccauguugcaacuggacccaaaugcuaagacuuggauggauaucgaaggcagacccgaggacccuguagaaauugcccucuaccagccaucaagugggugcuauauccacuucuuuagggagccgacagaccugaaacaguucaagcaggaugcaaaguacucccauggaaucgacgugaccgaucuuuuugccgcucaacccggccugacuagcgcggucauugacgcauugccucggaacauggugauaacaugucaggguucugaugacauccgaaaacuccuggaaucacaggggcgcaaggauauuaaauuaaucgacauagcccugaguaagaccgauagcagaaaauaugagaaugcuguuugggaccaguacaaggaucuaugccacaugcauacgggcguggucguggagaagaaaaagaggggaggcaaagaagagauuaccccacacugugcccucauggacugcaucauguucgaugcagccguauccgggggacugaacacaucuguucuucgggcuguguugccccgcgacauggucuuuagaacuaccacaccuagggugguccuguga

SEQ ID NO: 8731 - RNA, 1710 nt, Artificial Sequence
  derived and/or modified CDS sequence (opt3) from LASV(G2318-SLE-2012;Clade IV)__AIT17271__NP
augagcgccuccaaggagaucaaaucuuuccuguggacccagucacucagaagggaacuuaguggcuacugcagcaacauuaagcugcaaguggucaaagacgcucaggcauuguuacacgggcuggauuuuuccgagguuucuaaugugcagcggcuaaugcgcaaggaacgacgugacgauaacgaccucaaaagacugagggaucuuaaucaggccguaaacaaucugguggaguugaagucgacacaacagaagucaauacuccgggucggaacucugacgagcgacgaucugcucaucuuagcggcugaccuggaaaaacuuaagaguaaagugacccgcacagagagacccuuguccgccgguguuuauaugggcaaccugucuagccagcagcuagaucaaaggcgggcacuccugaauaugauugggauguccggaggcaaccagggugcccgcgcugggcgagacggaguggucagagugugggauguaaagaaugcagagcuucugaacaaucaguucggcacuaugccuucauugacccucgccugucugacaaaacagggccaaguugacuuaaacgaugcugugcaggcccugaccgaccucgggcuuaucuacacugcgaaguauccaaauacaagugaccuggauagguugacccagagccauccgauucuaaacaugaucgacacgaagaaaucuucccugaauauaucaggauacaacuuuagccucggugcagccgucaaggcuggcgccugcaugcuggaugggggaaacaugcuugaaacuaucaaagugaguccccaaaccauggacggcauucugaagacaaucuugaaagugaagaaagcacucgguauguucauuucugauacuccuggggagcggaauccauaugaaaacauccuguacaagauauguuuauccggagacggcuggcccuauauugcuagccguaccucgaucacaggccgcgccugggagaauaccgucguugaucuggagucugacgggaagccucagaaaacgggauccaacaauucaaacaagagucuacagagcgcggguuuugccgcaggccucacuuacucccagcugaugacacuuaaagaugcuauguugcaacuggacccaaaugccaagaccuggauggauauugaagggagacccgaggacccuguggaaaucgcucucuaccagccaucuagcggaugcuauauccacuucuuuagggagccgacugaccugaaacaguucaagcaggaugccaaguacucacauggcauugacguaacagaucuuuuugcagcccaacccggucugaccagugcugugauagacgcguugccucggaacauggucaucacgugucagggguccgaugacauucgaaaacuccuggaaagccagggccgcaaggauaucaaauuaauagacauugcacugucuaaggccgauucaagaaaauaugagaaugcugugugggaccaguacaaggaucuaugccacaugcauaccggaguuguggucgagaagaaaaagaggggcgggaaagaagagaucacaccacacugugcccucauggacugcaucauguaugaugcagccgugaguggaggucugagcacuuccguacuucgggcuguuuugccccgcgacaugguguucagaaccucuacaccuagggucgugcuguga

SEQ ID NO: 8732 - RNA, 1710 nt, Artificial Sequence
  derived and/or modified CDS sequence (opt3) from LASV(G2363-SLE-2012;Clade IV)__AIT17275__NP
augagcgccuccaaggagaucaaaucuuuccuguggacccagucacucagaagggaacuuaguggcuacugcagcaacauuaagcugcaaguggucaaagacgcucaggcauuguuacacgggcuggauuuuuccgagguuucuaaugugcagcggcuaaugcgcaagcagcgacgugacgauggagaccucaaaagacugagggaucuuaaccaagccguaaauaaccugguggaauugaagucgacacagcagaagucaguccuccggguggguacucugacgagcgacgaucugcucaccuuagcggcugaccuggagaaacuuaagaguaaaguuacacgcacugaaagacccuuguccgccggcguguauauggggaaucugucuagccagcaacuagaucagaggcgggcacuccugaacaugauaggaauguccggcgguaaucagggggcccgcaccggaaaggacggcgucgugcgaaucugggauguuaaaaacgcugaccuucugaauaaccaguucggcacaaugccuucauugacccucgcaugucugacuaagcaagggcagguagauuuaaaugacgugguccaggcccugacagaccucggacuuauuuacaccgcuaaguauccaaacaucagugaucuggacagauuggcccaaagccauccgauucuaaaaaugaucgauacgucuaaguccucacugaauauaagcgguuacaacuuuagucucggcgcggcagugaaagccggggcuugcaugcuggacggaggcaauaugcuugagacugugaaggucucuccccagaccauggaugguauccugaaauccauuuugaagguuaaaaagagccucgggauguucaucucggacacaccuggagagaggaacccauaugaaaacauucuguacaagaucuguuuaucuggcgauggcuggcccuauauagccucccggacuucaauuaccgggcgugcaugggagaauacagugguagaccuggaaagugauggaaaaccucagaagguggguagcaacaauuccaacaaaucucuacagagcaccggcuuuacggcugggcucacuuacucacaacugaugacacuuaaggacgccauguugcagcuggauccaaaugcgaaaaccuggauggacaucgagggacgccccgaggacccugucgaaauugcccucuaccagccaaguuccggcugcuauauccacuucuuuagagagccgacugaucugaagcaguucaagcaagacgcaaaauacagccaugguaucgaugugacagaccuuuuugcugcccagcccgggcugaccucugcuguuauugauacguugccuaggaacauggugauaaccugucagggcucagacgauaucggaaagcuccuggaaagucagggccggaaagacauuaaguuaaucgauauagcccugagcaaaacagacucccgaaaguaugagaaugcagucugggaucaauacaaggaccuaugccacaugcauacuggggugguaguugagaaaaagaaacgcggagguaaggaagagauuaccccacacugugcccucauggauugcaucauguucgacgcugcggugucuggcgggcugaacgcaucgguccuuagagccguguugcccagggacauggucuuucggacaagcacuccucgcgugguucuguga

SEQ ID NO: 8733 - RNA, 1710 nt, Artificial Sequence
  derived and/or modified CDS sequence (opt3) from LASV(G2384-SLE-2012;Clade IV)__AIT17277__NP
augagcgccuccaaggagaucaaaucuuuccuguggacccagucacucagaagggaacuuaguagcuacugcuccaacauuaagcugcaaguggucaaagacgcucaggcauuguuacacggccuggauuuuucugagguuucgaaugugcagcggcuaaugcgcaaggaacgacgugacgauaacgaccucaaaagacugagggaucuuaaucaggccguaaacaaucugguggaguugaagucaacacaacagaagaguauacuccgggucgggacucugacgagugacgaucugcucaucuuagcggcugaccuggaaaaacuuaaguccaaagugacccgcacagagagacccuugucugccggaguuuauauggguaaccugagcucccagcagcuagaucaaaggcgggcacuccugucaaugauuggcaugagugggagcaaucagggagcccgcgcuggccgagacgguguggucagagugugggauguaaagaacgcagagcuucugaauaaccaguucgggacuaugccuucuuugacccucgccugucugacaaaacagggacaaguugacuuaaaugaugcugugcaggcccugaccgaccucggccuuaucuacacugcgaaguauccaaacacauccgaccuggauagguugacccagucacauccgauucuaaauaugaucgacacgaagaaaagcagucugaacauaucuggcuacaauuuuucccucggggcagccgucaaggcuggagccugcaugcuggaugguggcaacaugcuugaaacuaucaaagugagcccccaaaccauggacgggauucugaagucgaucuugaaagugaagaaagcacucggaauguucauuucugauacaccuggcgagcggaacccauaugaaaauauccuguacaagauauguuuauccggugacggguggcccuauauugcuucacguacuagcaucaccggacgcgccugggagaacacagucguugaucuggagagcgacggcaagccucagaaagcgggcuccaauaacucuaauaagagccuacagucagccggguuuaccgcaggacucacguacagucagcugaugacucuuaaagaugcuauguugcaacuggacccaaacgccaagacauggauggauauugaagguagacccgaggacccuguggaaguagcucucuaccagccauccagcggcugcuauauccacuucuuuagggagccgaccgaccugaaacaguucaagcaggaugccaaguacucucaugggaucgacgugacugaucuuuuugcagcccaacccggacugacaucagcugucauugacgcguugccucggaauauggugauaaccugucagggcagugaugacauccgaaaacuccuggaaagccagggucgcaaggauauuaaauuaaucgacauagcacuguccaagacggauucuagaaaauaugagaacgccguuugggaccaguacaaggaucuaugccacaugcauaccgggguggucguggagaagaaaaagaggggcggaaaagaagagauuacaccacacugugcucucauggacugcaucauguucgaugccgcaguaucgggcgggcugaauacuagcguucuucgggccguguugccccgcgacauggucuuuagaaccuccacaccuagggugguccuguga

SEQ ID NO: 8734 - RNA, 1710 nt, Artificial Sequence
  derived and/or modified CDS sequence (opt3) from LASV(G2392-SLE-2012;Clade IV)__AIT17281__NP
augagcgccuccaaggagaucaaaucuuuccuguggacccagucacucagaagggaacuuaguggcuacugcagcaacauuaagcugcaaguggucaaagacgcucaggcauuguuacacgggcuggauuuuuccgagguuucuaaugugcagcggcuaaugcgcaaggaacgacgugacgauucggaccucaaaagacugagggaucuuaaccaggccguaaauaaccugguggaguugaagucaacacaacagaaguccguccuccgggugggaacucugacgagugacgaucugcucguuuuagcggcugaccuggaaaaacuuaaguccaaagugacccgcacagagagacccuugucugccggugucuauaugggcaaucugagcucccagcagcuagaucaaaggcgggcacuccugucaaugauagggaugaguggaggcaaccagggugcccgcgcugggcgagacggagugguaagaaucugggauguuaagaaugcagagcuucugaacaaucaguucggcacuaugccuagcuugacccucgccugucugacaaaacagggccaaguggacuuaaacgaugucgugcaggcucugaccgaccucgggcuuauuuacacugccaaguauccaaauacaucugaccuggauagguugacccagucccauccgauccuaaacaugauugacacgaagaaaucaagccugaauaucaguggauacaacuuuucucucggugcggcagugaaggccggcgcuugcaugcuggaugggggaaauaugcuugaaacuauaaaagucagcccccaaaccauggacggcauccugaaaagcauuuugaagguuaagaaagcccucgguauguucaucucggauacaccuggggagcggaacccauaugaaaacauucuguacaagaucuguuuaucuggagacggcuggcccuauauagcaucccguacuucaauuaccggccgcgcuugggagaauacaaucguggaucuggagagugacgggaagccucagaaaaccagcacgacuaacuccaauaagucucuacagagcgccggauuugcggccggucucacauacucacagcugaugacccuuaaagaugcaauguugcaacuggacccaaacgcuaagacuuggauggauauugaaggcagacccgaggacccuguagaaaucgcccucuaccagccaaguuccgggugcuauauccacuucuuuagggagccgacagaccugaaacaguucaagcaggaugcuaaguacagccauggaauugacgugaccgaucuuuuugccgcacaacccggccugacgucugccgucauagacaccuugccucggaauauggugaucacaugucaggguucagaagauauucgacgccuccuggagagucaggggagaaaagacaucaaguuaauagauauugcucugagcaaaacugacuccaggaaguaugagaacgcgguuugggaucaguacaaagaccuaugccacaugcauaccggcguggucguggaaaagaagaaaaagggaggcaaagaggaaaucacaccacacugugcacucauggauugcaucauguucgacgccgcuguaucugggggacugaauacuucgguucuucgggccguguugccccgcgauauggucuuuagaaccagcacaccuagggugguccuguga

SEQ ID NO: 8735 - RNA, 1710 nt, Artificial Sequence
  derived and/or modified CDS sequence (opt3) from LASV(G2405-SLE-2012;Clade IV)__AIT17285__NP
augagcgccuccaaggagaucaaaucuuuccuguggacccagucacucagaagggaacuuaguggcuacugcagcaacauuaagcugcaaguggucaaagacgcucaggcauuguuacacgggcuggauuuuuccgagguuucuaaugugcagcggucgaugcgcaaggaacgacgugacgauaacgaccuaaaaagacucagggaucugaaucaggccguaaacaaucuuguggagcugaagucaacacaacagaaguccauauugcgggucggaacucucacgagugacgaucugcugauccucgcggcugacuuagaaaaacugaaguccaaagugacccgcacagagagaccccuuucugccgguguuuauaugggcaacuugagcucccagcagcuggaucaaaggcgggcacuacucaauaugauugggaugucaggaaguaaccagggcgcccgcgcuggucgagacgggguggucagagugugggauguaaagaaugcagagcugcuuaacaaucaguucggaacuaugccuagccugaccuuggccugucucacaaaacagggccaaguugaccugaacgaugugguccaggcuuuaaccgaccugggccucaucuacacugccaaguauccaaaugcgucugaccuugauaggcugacacagucccauccgauuuugaacaugaucgacaccaagaaaucaagccuaaauauaaguggguacaacuuuucucugggagcagccgugaaggcuggugccugcaugcucgauggcgggaacaugcuggaaacgaucaaagugagcccccaaacuauggacggcauucuuaagagcauccugaaagucaagaaagcauugggaauguucauuucggauaccccuggugagcggaauccauaugaaaacauccucuacaagauaugucugucuggggacggauggcccuauauugcuucccguacaucaaucacuggccgcgccugggagaauaccauuguugauuuagagagugacggcaagccucagaaagcggggaacaauggaagcaacaagucccugcagucugccgguuuuacagcaggccuaaccuacagccagcucaugacgcugaaagaugcuaugcuucaauuggacccaaaugccaagacuuggauggauaucgaagggagacccgaggacccuguggaaaucgcucuguaccagccaucaaguggaugcuauauucacuucuuuagggagccgacagaccucaaacaguucaagcaggaugccaaguacucccauggcauagacguaaccgaucuguuugcagcccaacccggucuuacuagcgcugugaucgacgcgcugccucggaacuuggucauuacaugucaggggucugaugacauccgaaaacuccuggaaucacagggccgcaaggauauaaaauuaauugacaucgcacugaguaagaccgauagcagaaaauaugagaaugccgugugggaccaguacaaggaucuaugccacaugcauacgggaaucguuguggagaagaaaaagaggggcgggaaagaagagauuaccccacacugugcucucauggacugcaucauguucgaugccgcagucuccggaggucugaacacaucugugcuucgggccguauugccccgcgacaugguuuuuagaacuucgaccccuagggugguccuguga

SEQ ID NO: 8736 - RNA, 1710 nt, Artificial Sequence
  derived and/or modified CDS sequence (opt3) from LASV(G2427-SLE-2012;Clade IV)__AIT17289__NP
augagcgccuccaaggagaucaaaucuuuccuguggacccagucacucagaagggaacuuaguggcuacugcagcaacauuaagcugcaaguggucaaagacgcucaggcauuguuacacgggcuggauuuuuccgagguuucuaaugugcagcggcuaaugcgcaaggaacgacgugacgauucggaccucaaaagacugagggaucuuaaccaggccguaaauaaccugguggaguugaagucaacacaacagaaguccguccuccgggugggaacucugacgagugacgaucugcucguuuuagcggcugaccuggaaaaacuuaaguccaaagugacccgcacagagagacccuugucugccggugucuauaugggcaaucugagcucccagcagcuagaucaaaggcgggcacuccugucaaugauagggaugaguggaggcaaccagggugugcgcgccgggcgagacggaguaguuagaaucugggaugugaagaaugcugagcuucugaacaaucaguucggcacuaugccuagcuugacccucgcaugucugacaaaacagggccaagucgacuuaaacgauguggugcaggcccugaccgaccucgggcuuauuuacacugcuaaguauccaaauacaucugaccuggauagguugacccagucccauccgauccuaaacaugauugacacgaagaaaucaagccugaauaucaguggauacaacuuuucucucggugccgcggucaaggcaggcgccugcaugcuggaugggggaaauaugcuugaaacuauaaaaguuagcccccaaaccauggacggcauccugaaaagcauuuugaaggugaagaaagcucucgguauguucaucucggauacaccuggggagcggaacccauaugaaaacauucuguacaagaucuguuuaucuggagacggcuggcccuauauagccucccguacuucaauuaccggccgcgcaugggagaauacaaucguagaucuggagagugacgggaagccucagaaaaccggaagcauuaacuccaauaagucucuacagagcacggguuuugcugccggccucacuuacucacagcugaugacacuuaaagaugcgauguugcaacuggacccaaacgccaagaccuggauggauaucgaagggagacccgaggacccuguggaaaucgcacucuaccagccaaguuccggaugcuauauucacuucuuuagggagccgacugaccugaaacaguucaagcaggaugcuaaguacagccauggcauagacgucacagaucuuuuugccgcucaacccggucugaccucugccgugaucgacgcauugccucggaauaugguuauuacgugucaggggucagaugacauccgaaaacuccuggaaagucagggccgcaaggauauaaaauuaauugacaucgcccugagcaagaccgauuccagaaaauaugagaacgcugugugggaccaguacaaggaucuaugccacaugcauacaggaaucgucguggagaagaaaaagaggggcgggaaagaagagauuacuccacacugugcgcucauggacugcaucauguucgaugcagccguaucuggaggucugaauaccucgguucuucgggcuguguugccccgcgacauggucuuuagaacaagcacuccuagggugguccuguga

SEQ ID NO: 8737 - RNA, 1710 nt, Artificial Sequence
  derived and/or modified CDS sequence (opt3) from LASV(G2431-SLE-2012;Clade IV)__AIT17293__NP
augagcgccuccaaggagaucaaaucuuuccuguggacccagucacucagaagggaacuuaguggcuacugcagcaacauuaagcugcaaguggucaaagacgcucaggcauuguuacacgggcuggauuuuuccgagguuucuaaugugcagcggcuaaugcgcaagcagcgacgugacgauaacgaccucaaaagacugagggaucuuaaucaagccguaaacaaucugguggaauugaagucgacacagcagaagucaguccuccgggugggaacucugacgagcgacgaucugcucguuuuagcggcugaccuggagaaacuuaagaguaaagugacccgcacagaaagacccuuguccgccggugucuauaugggcaaccugucuacucagcaacuagaucagaggcgggcacuccugaauaugauagggaugagcggaggcaaccagggugcccgcgcugggcgagacggagugguaagaguuugggaugugaagaaugcagaccuucugaacaaucaguucggcaccaugccuuccuugacacucgccugucugaccaaacaaggccaggucgauuuaaacgacguggugcaggcucugacugaccucgggcuuaucuacacagccaaguauccaaauaccucagaucuggacagguugacgcaaagucauccgauucuaaacaugaucgauacuaauaagagcucucugaacauuuccggauacaacuuuucacucggugcggcagucaaagccggcgcuugcaugcuggacgggggaaauaugcuugagaccaucaagguuagcccccagacaauggauggcauacugaaaaguaucuugaaggugaaaaaggcccucgguauguucauuucugacacuccuggggagcggaacccauaugaaaauauccuguacaaaauuuguuuauccggagauggcuggcccuauaucgcaagccguaccucgauaacaggccgcgcuugggagaacaccguaguggaccuggaaucugaugggaagccucagaaggccggagguaauaacuccaauaaaucacuacagagugcgggcuuuacggccgggcucacuuacagccaacugaugacacuuaaggacgcaauguugcagcuggauccaaacgcuaaaaccuggauggacauugagggaagacccgaggacccugucgaaaucgcccucuaccagccauccucuggcugcuauauucacuucuuuagggagccgacugaucugaagcaguucaaacaagacgcuaaguacagccaugguaucgaugugacagaccuuuuugccgcacagcccgggcugaccucagccguuaucgaugcuuugccucggaauauggugauuacgugucagggcagugacgauauacgaaagcuccuggaaucccagggacgcaaagacaucaaguuaauugauaucgcgcugagcaaaaccgacucuagaaaguaugagaacgcagucugggaucaauacaaagaccuaugcaauaugcacacaggcauagugguagaaaagaagaaaaggggagggaaggaggagauuacuccacauugugcccucauggauugcaucauguucgacgcugccguuucagguggcaugaacaccagugugcugcgggcaguccuuccccgcgacaugguguuuagaacaagcacuccuagggucguguuguga

SEQ ID NO: 8738 - RNA, 1710 nt, Artificial Sequence
  derived and/or modified CDS sequence (opt3) from LASV(G2511-SLE-2012;Clade IV)__AIT17295__NP
augagcgccuccaaggagaucaaaucuuuccuguggacccagucacucagaagggaacuuaguggcuacugcagcaacauuaagcugcaaguggucaaagacgcucaggcauuguuacacgggcuggauuuuuccgagguuucuaaugugcagcggcuaaugcgcaaggaacgacgugacgauaacgaccucaaaagacugagggaucuuaaucaggccguaaacaaucugguggaguugaagucgacacaacagaagucaguccuccgggugggaacucugacgagcgacgaucugcucauauuagcggcugaccuggaaaaacuuaagaguaaaguuauccgcaccgagagacccuuguccgccgguguguauaugggcaaccugucuagccagcagcuagaucaaaggcgggcacuccugaauaugauugggaugggaggcuccaaccagggugcccgcgcugggcgagacggagucgugagaguaugggauguuaagaaugcagagcuucugaacaaucaguucggcacaaugccuucauugacucucgccugucugaccaaacagggccaaguggacuuaaacgaugcuguccaggcccugacagaccucgggcuuaucuacaccgcgaaguauccaaauacaagugaccuggauagguugacucagagccauccgauucuaaacaugaucgacaccaagaaaucuucccugaauauaucaggauacaacuuuagccucggugcagccgugaaggcuggcgccugcaugcuggaugggggaaacaugcuugaaacgaucaaagugaguccccaaacuauggacggcauucugaagucuaucuugaaagucaagaaagcacucgguauguucauuuccgauaccccuggggagcggaauccauaugaaaacauccuguacaagauauguuuaagcggagacggcuggcccuauauugcuucgcguacaucuaucacuggccgcgccugggagaauaccauuguugaucuggaguccgacgggaagccucagaaagcgggaucaaacgguaguaauaagagccuacaguccgccggcuuuacagcagggcucaccuacucucagcugaugacgcuuaaagaugcuauguugcaacuggacccaaacgccaagacuuggauggauaucgaaggaagacccgaggacccuguggaaaucgcucucuaccagccaagcucaggcugcuauauucacuucuuuagggagccgacagaccugaaacaguucaagcaggaugccaaguacagucaugguauagacguaaccgaucuuuuugcagcccaacccgggcugacuuccgcuaucauugacgcguugccucggaauauggugaucacaugucagggcagcgaugacauacgaaaacuccuggaaucucagggacgcaaggauauuaaauuaaucgacaucgcacugucaaagaccgauaguagaaaauaugagaacgccgucugggaccaguacaaggaucuaugccacaugcauacgggcauugugguugagaagaaaaagaggggagggaaagaagagaucaccccacacugugcucucauggacugcauuauguucgaugccgcagugagcgguggccugaauacauccguccuucgggccguguugccccgcgacaugguauuuagaacuucuaccccuaggguugugcuguga

SEQ ID NO: 8739 - RNA, 1710 nt, Artificial Sequence
  derived and/or modified CDS sequence (opt3) from LASV(G2554-SLE-2012;Clade IV)__AIT17299__NP
augagcgccuccaaggagaucaaaucuuuccuguggacccagucacucagaagggaacuuaguggcuacugcagcaacauuaagcugcaaguggucaaagacgcucaggcauuguuacacgggcuggauuuuuccgagguuucuaaugugcagcggcuaaugcgcaaggaacgacgugacgauaacgaccucaaaagacugagggaucuuaaucaggccguaaacaaucugguggaguugaagucgacacaacagaagucaguccuccgggugggaacucugacgagcgacgaucugcucguuuuagcggcugaccuggaaaaacuuaagaguaaagugacccgcacagagagacccuuguccgccggugucuauaugggcaaccugucuagccagcagcuagaucaaaggcgggcacuccuguccaugauagggaugucaggaggcaaucagggugcccgcacugggcgagacggagugguaagaguuugggaugugaagaacgcugagcuucugaauaaccaguucggcaccaugccuaguuugacacucgcaugucugaccaaacagggccaagucgacuuaaaugauguggugcaggcccugacugaccucgggcuuaucuacacagcuaaguauccaaacaccagcgaccuggauagguugacgcagucucauccgauucuaaauaugaucgacacuaagaaauccucacugaacauuagcggauacaauuuuagucucggugccgcggucaaggcaggcgccugcaugcuggaugggggaaacaugcuugaaaccaucaaaguuucuccccaaacaauggacggcauacugaaguccaucuugaaagugaagaaagcucucgguauguucauuagcgauacuccuggggagcggaacccauaugaaaauauccuguacaagauuuguuuaucgggagacggcuggcccuauaucgccucucguaccuccauaacaggccgcgcaugggagaacaccguaguggaucuggagucagacgggaagccucagaaagcuggaaguaauaacagcaauaagucccuacagucugccgguuuuacggcgggccucacuuacagccagcugaugacacuuaaagaugccauguugcaacuggacccaaacgcaaagaccuggauggauauugaagggagacccgaggacccugucgaaaucgcucucuaccagccaucaaguggaugcuauauucacuucuuuagggagccguccgaccugaaacaguucaagcaggaugccaaguacagccauggcaucgacgugacugaucuuuuugcugcccaacccggucugacaucugcaguuaucgacgccuugccucggaauauggugauuaccugucaggggucagaugacauacgaaaacucuucgaaagucagggccgcaaggauaucaaacugauugacaucgcuuuaagcaagacggauuccagaaaauaugagaacgcggucugggaccaguacaaggaucugugccacaugcauaccggagugguaguugagaagaaaaagaggggcgggaaagaagagauaacaccacacugugcacuaauggacugcauuauguuugaugccgcugugucuggaggucucaauucgcugguccuucgggccguguugccccgcgacauggucuucagaacuagcaccccuagggugguucuguga

SEQ ID NO: 8740 - RNA, 1710 nt, Artificial Sequence
  derived and/or modified CDS sequence (opt3) from LASV(G2557-SLE-2012;Clade IV)__AIT17303__NP
augagcgccuccaaggagaucaaaucuuuccuguggacccagucacucagaagggaacuuaguggcuacugcagcaacauuaagcugcaaguggucaaagacgcucaggcauuguuacacgggcuggauuuuuccgagguuucuaaugugcagcggcuaaugcgcaagcagcgacgugacgauucggaccucaaaagacugagggaucuuaaccaagccguaaauaaccugguggaauugaagucaacacagcagaaguccguccuccgggugggaacucugacgagugacgaucugcucguuuuagcggcugaccuggagaaacuuaaguccaaagugauacgcaccgaaagacccuugucuagcggugucuauaugggcaaucuguccucacagcaacuagaucagaggcgggcccuccugaacaugaucgggaugaguggaggcaaucagggugcacagguggggcgcgacggaguaguucgagugugggaugucaagaacgccgaccuucugaauaaccaauucggcacaaugccuagcuugacucucgcuugucugaccaaacagggccagguggauuuaaaugacgugguccaagcacugacagaccucgggcuuauuuacaccgccaaguauccaaacacuucugaucuggacagauugguucagucccauccgauccuaaauaugauugauacaaagaaaucaagccugaacaucaguggauacaauuuuucucucggugcugccgugaaggcgggcgcaugcaugcuggacgggggaaacaugcuugagaccauaaaaguaagcccccagacgauggauggcauccugaaaagcauuuugaaggugaagaaagcccucgguauguucaucucggagacuccuggggaaaggaacccauaugagaauauucuguacaagaucuguuuaucuggagacggcuggcccuauauagcuucccggaccucaauuacaggccgugccugggaaaacacuaucgucgaucuggagagugacgggaagccucagaaagcaggaagcaauaacuccaauaagucucuacaaagcgcugguuuuaccgccggccucacauacucacagcugaugacccuuaaagauaguauguugcagcuggacccaaacgcgaagacguggauggauauugaggggcgccccgaagacccuguggagguugcccucuaccagccauccagcggaugcuauauccacuucuuuagagaaccgacugaccugaaacaauucaagcaggaugcaaaguacucucauggcaucgacgugacagaucuuuuugcugcccagcccggucugaccucagcugucauugaggccuugccuaggaauauggugauaacuugucaggggagugacgauauccggaaacuccuggaaagccaaggccgaaaggacauuaaauuaaucgauauagcacugaacaagacagacucccgcaaauaugagaaugccguaugggaucaguacaaggaccuaugccacaugcauaccggaguuguggucgagaagaaaaagagaggcgggaaagaagagauuacgccacacugugcucucauggauugcaucauguucgacgcggcagugucuggaggucugaagacccuugucuugagggccgugcugccccgggauaugguuuuucgcacaucgacuccuaaagugguacucuga

SEQ ID NO: 8741 - RNA, 1710 nt, Artificial Sequence
  derived and/or modified CDS sequence (opt3) from LASV(G2565-SLE-2012;Clade IV)__AIT17307__NP
augagcgccuccaaggagaucaaaucuuuccuguggacccagucacucagaagggaacuuaguggcuacugcagcaacauuaagcugcaaguggucaaagacgcucaggcauuguuacacgggcuggauuuuuccgagguuucuaaugugcagcggcuaaugcgcaaggaacgacgugacgauaacgaccucaaaagacugagggaucuuaaucaggccguaaacaaucugguggaguugaagucgacacaacagaagucaguccuccgggugggaacucugacgagcgacgaucugcucauauuagcggcugaccuggaaaaacuuaagaguaaaguuacccgcacagagagacccuuguccgccgguguguauaugggcaaccugucuagccagcagcuagaucaaaggcgggcacuccuguccaugaucgggaugucaggaggcaaucagggugcccgcacugggcgagacggagucgugagaguaugggauguuaagaacgcugagcuucugaauaaccaguucggcaccaugccuaguuugacacucgcaugucugaccaaacagggccaaguggacuuaaaugaugucgugcaggcccugacugaccucgggcuuauuuacacagcuaaguauccaaacaccagcgaccuggauagguugacgcagucucauccgauccuaaauaugauugacacuaagaaauccucacugaacaucagcggauacaauuuuagucucggugccgcggugaaggcaggcgccugcaugcuggaugggggaaacaugcuugaaaccauaaaagucucuccccaaacaauggacggcauccugaaguccauuuugaaaguuaagaaagcucucgguauguucaucagcgauacuccuggggagcggaacccauaugaaaauauucuguacaagaucuguuuaucgggagacggcuggcccuauauagccucucguaccuccauuacaggccgcgcaugggagaacaccgugguagaucuggagucagacgggaagcuacagaaaacgggaaguaauaacagcaauaagucccuccagucugcugguuuuacugccggccugacauacagccagcuuaugaccuugaaagaugcgaugcugcaacucgacccuaacgccaagaucuggauggauauugaagggagaccagaggaccccguggaaaucgcacuguaccagccuucaaguggaugcuauauccacuucuuuagggagccaacugaccuuaaacaguucaagcaggaugcuaaguacucccauggcauugacgucacagaucuguuugccgcucaaccggguuugaccagcgccgugauagacgcacucccccggaauaugguuaucacgugucaggggucugaugacauucgaaaacuguuagaaucacagggccgcaaggauaucaaacugauagacauugcccuaaacaagaccgauaguagaaaauaugagaaugcugugugggaccaguacaaggaucucugccacaugcauacaggagucgugguagagaagaaaaagaaaggcgggaaggaagagaucacuccucacugugcgcugauggacugcaucauguucgaugcagccguuagcggaggucuuaacaccuccguguugagggcuguccugccacgggacaugguguuucgcacaucuacucccagagucgugcucuga

SEQ ID NO: 8742 - RNA, 1710 nt, Artificial Sequence
  derived and/or modified CDS sequence (opt3) from LASV(G2587-SLE-2012;Clade IV)__AIT17311__NP
augagcgccuccaaggagaucaaaucuuuccuguggacccagucacucagaagggaacuuaguggcuacugcagcaacauuaagcugcaaguggucaaagacgcucaggcauuguuacacgggcuggauuuuuccgagguuucuaaugugcagcggcuaaugcgcaaggaacgacgugacgauaacgaccucaaaagacugagggaucuuaaucaggccguaaacaaucugguggaguugaagucgacacaacagaagucaguccuccgggugggaacucugacgagcgacgaucugcucauauuagcggcugaccuggaaaaacuuaagaguaaaguuauccgcaccgagagacccuuguccgccgguguguauaugggcaaccugucuagccagcagcuagaucaaaggcgggcacuccugaauaugauugggaugggaggcuccaaccagggugcccgcgcugggcgagacggagucgugagaguaugggauguuaagaaugcagagcuucugaacaaucaguucggcacaaugccuucauugacucucgccugucugaccaaacagggccaaguggacuuaaacgaugcuguccaggcccugacagaccucgggcuuaucuacaccgcgaaguauccaaauacaagugaccuggauagguugacucagagccauccgauucuaaacaugaucgacaccaagaaaucuucccugaauauaucaggauacaacuuuagccucggugcagccgugaaggcuggcgccugcaugcuggaugggggaaacaugcuugaaacgaucaaagugaguccccaaacuauggacggcauucugaagucuaucuugaaagucaagaaagcacucgguauguucauuuccgauaccccuggggagcggaauccauaugaaaacauccuguacaagauauguuuaagcggagacggcuggcccuauauugcuucgcguacaucuaucacuggccgcgccugggagaauaccguuguggaucuggaguccgacgggaagccucagaaagcgggaucaaacgguaguaauaagagccuacaguccgccggcuuuacagcagggcucaccuacucucagcugaugacgcuuaaagaugcuauguugcaacuggacccaaacgccaagacuuggauggauauugaaggaagacccgaggacccuguagaaguggcucucuaccagccaagcucaggcugcuauauccacuucuuuagggagccgacagaccugaaacaguucaagcaggaugccaaguacagucaugguaucgacgucaccgaucuuuuugcagcccaacccgggcugacuuccgcugugauugacgcguugccucggaauaugguuauaacaugucagggcagcgaugacauccgaaaacuccuggaaucucagggacgcaaggauauuaaauuaaucgacauagcacugucaaagaccgauaguagaaaauaugagaacgccgugugggaccaguacaaggaucuaugccacaugcauacgggcauugucguggagaagaaaaagaggggagggaaagaagagaucaccccacacugugcucucauggacugcaucauguucgaugccgcaguaagcgguggccugaauacauccguucuucgggccguguugccccgcgacauggucuuuagaacuucuaccccuagggugguccuguga

SEQ ID NO: 8743 - RNA, 1710 nt, Artificial Sequence
  derived and/or modified CDS sequence (opt3) from LASV(G2612-SLE-2012;Clade IV)__AIT17315__NP
augagcgccuccaaggagaucaaaucuuuccuguggacccagucacucagaagggaacuuaguggcuacugcagcaacauuaagcugcaaguggucaaagacgcucaggcauuguuacacgggcuggauuuuuccgagguuucuaaugugcagcggcuaaugcgcaaggaacgacgugacgauaacgaccucaaaagacugagggaucuuaaucaggccguaaacaaucugguggaguugaagucgacacaacagaagucaguccuccgggugggaacucugacgagcgacgaucugcucauauuagcggcugaccuggaaaaacuuaagaguaaaguuacccgcacagagagacccuuguccgccgguguguauaugggcaaccugucuagccagcagcuagaucaaaggcgggcacuccugaauaugaucgggauguccggaucaaaccagggcgcccgcgcuggucgagacggggucgugagaguaugggauguuaagaauguggagcuucugaacaaucaguucggaacuaugccuaguuugacccucgcaugucugacaaaacagggccaagucgacuuaaacgaugccgugcaggcucugaccgaccucggccuuauuuacacugccaaguauccaaauacaagcgaccuggauagguugacccagucucauccgauccuaaacaugauugacacgaagaaauccucacugaauaucagcggguacaacuuuagucucggagcggcagugaaggccggugcuugcaugcuggauggcgggaacaugcuugaaacuauaaaagucucuccccaaaccauggacggaauccugaaguccauuuugaaaguuaagaaagcccucggcauguucaucagcgauacaccuggugagcggaauccauaugaaaacauucuguacaagaucuguuuaucgggggacggauggcccuauauagcaucucguacuuccauuaccggccgcgcuugggagaauacagugguagaucuggagucagacggcaagccucagaaagccgggaguaacagcuccaauaagucucuacagagcgcgggauuuaccgccggucucacguacucacagcugaugacucuuaaagaugcaauguugcaacuggacccaaacgcuaagacauggauggauaucgaaggcagacccgaggacccuguggaaauugcccucuaccagccaaguuccgggugcuauauccacuucuuuagggagccgaccgaccugaaacaguucaagcaggaugcuaaguacagccauggaaucgacgucacugaucuuuuugccgcacaacccggccugacaucugccgugauugacgcuuugccucggaauaugguuauaaccugucaggguucagaugacauccgaaaacuccuggaaagucaggggcgcaaggauauuaaauuaaucgacauagcgcugagcaagacggauuccagaaaauaugagaacgcagugugggaccaguacaaggaucuaugccacaugcauaccggcauugucguggagaagaaaaagaaaggaucuaaggaagagaucacaccacacugugcccucauggacugcaucauguucgaugcugccguaucgggcgggcugaaugcaagcguucuuagggccguguugccccgggacauggucuuucgcacuuccaccccuagagugguccuguga

SEQ ID NO: 8744 - RNA, 1710 nt, Artificial Sequence
  derived and/or modified CDS sequence (opt3) from LASV(G2615-SLE-2012;Clade IV)__AIT17319__NP
augagcgccuccaaggagaucaaaucuuuccuguggacccagucacucagaagggaacuuaguggcuacugcagcaacauuaagcugcaaguggucaaagacgcucaggcauuguuacacgggcuggauuuuuccgagguuucuaaugugcagcggcuaaugcgcaagcagcgacgugacgauucggaccucaaaagacugagggaucuuaaccaagccguaaauaaccugguggaauugaagucaacacagcagaaaagcguccuccgggugggaacucugacgagugacgaucugcucguuuuagcggcugaccuggagaaacuuaaguccaaagugauacgcaccgaaagacccuugucuagcggugucuauaugggcaaucuguccucacagcaacuagaucagaggcgggcccuccugaacaugaucgggaugaguggaggcaaucagggugcacagguggggcgcgacggaguaguucgagugugggaugucaagaacgccgacaugcuuaauaaccaauucggcacaaugccuagccugacuuuggcuugucucaccaaacagggccagguggaucugaaugacgugguccaagcauuaacagaccuggggcucauuuacaccgccaaguauccaaacacuucugaucuugacagacuggcucagucccauccgaucuugaauaugauugauacaaagaaaucaagccuaaacaucaguggauacaauuuuucucugggugccgcgguuaaggcaggcgccugcaugcucgacgggggaaacaugcuggagaccauaaaagugagcccccagacgauggauggcauccuuaaguccauucugaaaguaaagaaggcuuuggguauguucaucucggagacuccuggggaaaggaacccauaugagaauauucucuacaagaucugucugucuggagacggcuggcccuauauagccucccggaccucaauuacaggccgugcaugggaaaacacuaucguggauuuagagagugacgggaagccucagaaagcuggaagcaauaacuccaauaagucucugcaaagcgccgguuuuaccgcgggccuaacauacucacagcucaugacccugaaagauaguaugcuucaguuggacccaaacgccaagacguggauggauauugaggggcgccccgaagacccugucgagguggcacuguaccagccauccagcggaugcuauauccacuucuuuagagaaccgacugaccucaaacaauucaagcaggaugcuaaguacucucauggcaucgacguuacagaucuguuugccgcucagcccggucuuaccucagccgugauugaggcacugccuaggaauauggucauaacuugucaggggagugacgauauccggaaauugcucgaaagccaaggccgaaaggacauuaaacugaucgauauaguguuaaacaagacagacucccgcaaauaugagaaugccguaugggaucaguacaaggaccugugccacaugcauaccggaguuguggucgagaagaaaaagagaggcgggaaagaagagauuacgccacacugugcucuaauggauugcaucauguucgacgcggcagugucuggaggucucaagaccaugguccugagggccgugcuuccccgggauaugguuuuucgcacaucgacuccuaaagugguauuguga

SEQ ID NO: 8745 - RNA, 1710 nt, Artificial Sequence
  derived and/or modified CDS sequence (opt3) from LASV(G2723-SLE-2012;Clade IV)__AIT17323__NP
augagcgccuccaaggagaucaaaucuuuccuguggacccagucacucagaagggaacuuaguggcuacugcagcaacauuaagcugcaaguggucaaagacgcucaggcauuguuacacgggcuggauuuuuccgagguuucuaaugugcagcggcuaaugcgcaagcagcgacgugacgauucggaccucaaaagacugagggaucuuaaccaagccguaaauaaccugguggaauugaagucaacacagcagaaguccguccuccgggugggaacucugacgagugacgaucugcucguuuuagcggcugaccuggagaaacuuaaguccaaagugauacgcaccgaaagacccuugucuagcggugucuauaugggcaaucuguccucacagcaacuagaucagaggcgggcccuccugaacaugaucgggaugaguggaggcaaucagggugcacagguggggcgcgacggaguaguucgagugugggaugucaagaacgccgaccuucugaauaaccaauucggcacaaugccuagcuugacucucgcuugucugaccaaacagggccagguggauuuaaaugacgugguccaagcacugacagaccucgggcuuauuuacaccgccaaguauccaaacacuucugaucuggacagauuggcucagucccauccgauccuaaauaugauugauacaaagaaaucaagccugaacaucaguggauacaauuuuucucucggugccgcgguuaaggcaggcgccugcaugcuggacgggggaaacaugcuugagaccauaaaagugagcccccagacgauggauggcauccugaaaagcauuuugaagguaaagaaagcucucgguauguucaucucggagacuccuggggaaaggaacccauaugagaauauucuguacaagaucuguuuaucuggagacggcuggcccuauauagccucccggaccucaauuacaggccgugcaugggaaaacacuaucguggaucuggagagugacgggaagccucagaaagcuggaagcaauaacuccaauaagucucuacaaagcgccgguuuuaccgcgggccucacauacucacagcugaugacccuuaaagauaguauguugcagcuggacccaaacgccaagacguggauggauauugaggggcgccccgaagacccugucgagguggcacucuaccagccauccagcggaugcuauauccacuucuuuagagaaccgacugaccugaaacaauucaagcaggaugcuaaguacucucauggcaucgacguuacagaucuuuuugccgcucagcccggucugaccucagccgugauugaggcauugccuaggaauauggucauaacuugucaggggagugacgauauccggaaacuccuggaaagccaaggccgaaaggacauuaaauuaaucgauauagcccugaacaagacagacucccgcaaauaugagaaugcugugugggaucaguacaaggaccuaugccacaugcauaccggaguaguuguggagaagaaaaagagaggcgggaaagaagagauuacgccacacugugcgcucauggauugcaucauguucgacgcagccgucucuggaggucugaagacccuuguguugagggcuguccugccccgggauaugguguuucgcacaucgacuccuaaaguugugcucuga

SEQ ID NO: 8746 - RNA, 1710 nt, Artificial Sequence
  derived and/or modified CDS sequence (opt3) from LASV(G2789-SLE-2012;Clade IV)__AIT17325__NP
augagcgccuccaaggagaucaaaucuuuccuguggacccagucacucagaagggaacuuaguggcuacugcagcaacauuaagcugcaaguggucaaagacgcucaggcauuguuacacgggcuggauuuuuccgagguuucuaaugugcagcggcuaaugcgcaagcagcgacgugacgauaacgaccucaaaagacugagggaucuuaaucaagccguaaacaaucugguggaauugaagucgacacagcagaagucaguccuccgggugggaacucugacgagcgacgaucugcucguuuuagcggcugaccuggagaaacuuaagaguaaagugacccgcacagaaagacccuuguccgccggugucuauaugggcaaccugucuagccagcaacuagaucagaggcgggcacuccugaauaugauagggaugacuggaggcucccgcggugcccaggcugggggagacggcgugguacgaguuugggaugugaagaacgcagaccuucugaauaaccaguucggcaccaugccuucauugacacucgccugucugaccaaacaagggcaggucgauuuaaaugacguggugcaggcucugacugaccucggacuuaucuacacagccaaguauccaaacaccagugaucuggacagauugacgcaaagccauccgauucuaaauaugaucgauacuaagaaaucuucccugaacauuucagguuacaauuuuagccucggcgcggcagucaaggccggggcuugcaugcuggacggaggcaacaugcuugagaccaucaaaguuaguccccagacaauggaugguauacugaagucuaucuugaaagugaagaaaucccucgggauguucauuagcgacacuccuggagagaggaacccauaugaaaauauccuguacaagauuuguuuaucgggcgauggcuggcccuauaucgccucucggaccuccauaacagggcgugcaugggagaacaccguaguggaccuggaaucagauggaaagccucagaaagcugguggcaauaacaguaauaagagccuacaguccgccggguuuacggcgggacucacuuacucucaacugaugacacuuaaagacaccauguugcagcuggauccaaacgccaagacuuggauggacauugagggccgccccgaggacccugucgaaguggcacucuaccagccaagcucagguugcuauauccacuucuuuagagagccgacagaucugaaacaguucaagcaagacgcuaaguacagucaugggauugauguuaccgaccuuuuugccgcucagcccggccugacguccgccgugaucgaagcauugccuaggaauauggucaucaccugucagggaagcgaugacauucggaaacuccuggagucucagggccgaaaggauauaaaauuaaucgacauugcccugucaaagguggauagucgcaaauaugaaaacgcuguaugggaccaauacaaggaucuaugccacaugcauacagggguuguggucgagaagaaaaagagaggagguaaagaggaaaucacuccacacugugcgcucauggacugcauaauguucgaugcagccgugagcggcgggcugaauacccuugucuugagggcugugcugccccgggacaugguuuuucgcacauccacuccuaaggugguacucuga

SEQ ID NO: 8747 - RNA, 1710 nt, Artificial Sequence
  derived and/or modified CDS sequence (opt3) from LASV(G2868-SLE-2012;Clade IV)__AIT17329__NP
augagcgccuccaaggagaucaaaucuuuccuguggacccagucacucagaagggaacuuaguggcuacugcagcaacauuaagcugcaaguggucaaagacgcucaggcauuguuacacgggcuggauuuuuccgagguuucuaaugugcagcggcuaaugcgcaaggaacgacgugacgauucggaccucaaaagacugagggaucuuaaccagacaguaaauaaccugguggaguugaagucaacucaacagaagaguauacuccgggucggaacgcugaccagugacgaucugcucaucuuagccgcggaccuggaaaaacuuaaguccaaagugauucgcacagagagacccuugucugcugguguuuauaugggcaaucugagcucccagcagcuagaucaaaggcgggcccuccugaacaugaucgggaugucaaguggaaaucagggcgcacaggccggucgcgacggggugguccgagugugggauguaaagaacgcugagcuucugaauaaccaguucggaacuaugccuagcuugacccucgcaugucugacaaaacaaggccagguugacuuaaaugaugccgugcaggcucugaccgaccucggccuuauuuacacugccaaguauccaaacacaucugaccuggauagauugacccaaucccauccgauccuaaauaugauagacacgaagaaaucaagccugaacaucaguggguacaauuuuucucucggagcggcagucaaggccggugcuugcaugcuggauggcgggaacaugcuugaaacuauuaaagugagcccccagaccauggacggaauccugaaguccauuuugaaagugaagaaagcccucggcauguucaucucggauacaccuggugagaggaacccauaugaaaauauacuguacaagauuuguuuaucuggggacggauggcccuauaucgcaucccggacuucaauuaccggccgugcuugggagaacacagucguugaucuggagagugacggcaugccucagaaggccgggagcuccucuagcaauaaaucacuacagagugcgggauuuguggccggucucaccuacucccaacugaugacgcuuaaggaugcaauguugcagcuggacccaaacgcuaaaacuuggauggauaucgaaggccgccccgaggacccuguagaaaucgcccucuaccagccaagcucugggugcuauauucacuucuuuagagagccgacagaccugaagcaguucaaacaagaugcuaaguacucacauggaauagacgugaccgaucuuuuugccgcacagcccggccugacuagcgccgucaucgacgcuuugccuaggaauauggugauuacaugucaggguagcgaugacauccggaagcuccuggaaucccaggggcgaaaagauauaaaguuaauugacaucgcgcugucuaaagcagauucgcgcaaguaugagaacgccguuugggaccaauacaaagaucuaugccacaugcauaccggcguggucguggagaagaagaaaagaggaggcaaggaagagaucacgccacacugugcucucauggacugcauuauguaugaugccgcaguaagcgggggacugaauaccuccguucuuagggccguguugccccgggacauggucuuccgcacaucaacuccuagagugguccuguga

SEQ ID NO: 8748 - RNA, 1710 nt, Artificial Sequence
  derived and/or modified CDS sequence (opt3) from LASV(G2903-SLE-2012;Clade IV)__AIT17333__NP
augagcgccuccaaggagaucaaaucuuuccuguggacccagucacucagaagggaacuuaguggcuacugcagcaacauuaagcugcaaguggucaaagacgcucaggcauuguuacacgggcuggauuuuuccgagguuucuaaugugcagcggcuaaugcgcaaggaacgacgugacgauaacgaccucaaaagacugagggaucuuaaucaggccguaaacaaucugguggaguugaagucgacacaacagaagucaguccuccgggugggaacucugacgagcgacgaucugcucauauuagcggcugaccuggaaaaacuuaagaguaaaguuacccgcacagagagacccuuguccgccgguguguauaugggcaaccugucuagccagcagcuagaucaaaggcgggcacuccugaauaugaucgggauguccggaggcaaccagggugcccgcgcugggcgagacggagucgugagaguaugggauguuaagaaugcagagcuucugaacaaucaguucggcacuaugccuucauugacccucgccugucugacaaaacagggccaaguggacuuaaacgaugcuguccaggcccugaccgaccucgggcuuauuuacacugcgaaguauccaaauacaagugaccuggauagguugacccagagccauccgauccuaaacaugauugacacgaagaaaucuucccugaauaucucaggauacaacuuuagccucggugcagccgugaaggcuggcgccugcaugcuggaugggggaaacaugcuugaaacuauaaaagugaguccccaaaccauggacucuauccugaaguccauuuugaaagucaagaaagcacucggcauguucaucagcgauacaccuggugagcggaauccauaugaaaacauucuguacaagaucuguuuaucgggggacggauggcccuauauagcuucucguacuuccauuaccggccgcgccugggagaauacaguuguggaucuggagucagacggcaagccucagaaagcggggaguaacaauagcaacaagucccuacagucugccggauuugcagcuggucucaccuacagccagcugaugacgcuuaaagaugccauguugcaacuggacccaaaugcuaagacuuggauggauaucgaaggcagacccgaggacccuguagaaauugcccucuaccagccaucaagugggugcuauauccacuucuuuagggagccgacagaccugaaacaguucaagcaggaugcaaaguacucccauggaaucgacgugaccgaucuuuuugccgcucaacccggccugacuagcgcggucauugacgcauugccucggaacauggugauaacaugucaggguucugaugacauccgaaaacuccuggaaucacaggggcgcaaggauauuaaauuaaucgacauagcccugaguaagaccgauagcagaaaauaugagaaugcuguuugggaccaguacaaggaucuaugccacaugcauacgggcauuguggucgagaagaaaaagaggggaggcaaagaagagaucaccccacacugugcccucauggacugcaucauguucgaugcagccguguccgggggacugaacacaucuguacuucgggcuguuuugccccgcgacaugguguuuagaacuucgaccccuagggucgugcuguga

SEQ ID NO: 8749 - RNA, 1710 nt, Artificial Sequence
  derived and/or modified CDS sequence (opt3) from LASV(G2906-SLE-2012;Clade IV)__AIT17335__NP
augagcgccuccaaggagaucaaaucuuuccuguggacccagucacucagaagggaacuuaguggcuacugcagcaacauuaagcugcaaguggucaaagacgcucaggcauuguuacacgggcuggauuuuuccgagguuucuaaugugcagcggcuaaugcgcaaggaacgacgugacgauucggaccucaaaagacugagggaucuuaaccaggccguaaauaaccugguggaguugaagucaacacaacagaaaagcauacuccgggucggaacucugacgagugacgaucugcucaucuuagcggcugaccuggaaaaacuuaaguccaaagugacccgcacagagagacccuugucugccgguguuuauaugggcaaucugagcucccagcagcuagaucaaaggcgggcacuccugucaaugauugggaugaguagcggagugcagggcgcccgcgcuggucgagacggggucgugagaguaugggauguuaagaacgcagagcuucugaauaaccaguucggaacuaugccuucuuugacccucgccugucugacaaaacagggccaaguggacuuaaaugaugucgugcaggcucugaccgaccucggccuuaucuacacugccaaguauccaaacacauccgaccuggauagguugacccagucacauccgauucuaaauaugaucgacacgaagaaaagcagucugaacauaucuggguacaauuuuucccucggagcggcagugaaggccggugcuugcaugcuggauggcgggaacaugcuugaaacuaucaaagucagcccccaaaccauggacggcauucugaagucgaucuugaaaguuaagaaagcccucggaauguucauuucugagacaccuggugaacggaauccauaugagaacauccuguacaagauauguuuauccggggauggauggcccuauauugcaucacguacuucgaucaccggccgcgcuugggagaacacagugguagaccuggaaagcgauggcaagccucagaaagccggguccaauaacucuaauaagagccuacagucaaccggauuugcggccggucucacguacagucagcugaugacucuuaaagacgcaauguugcaacuggauccaaacgcuaagacauggauggacauugagggcagacccgaagauccuguggaggucgcccucuaccagccauccagcgggugcuauauccacuucuuuagggaaccgaccgaccugaaacaguucaagcaggacgcuaaguacucucauggaaucgaugugacugaccuuuuugccgcacaacccggccugacaucagccguuauugaugcuuugccucggaauauggugauaaccugucaggguagugacgauaucaaaaagcuccuggagagccaggggcgaaaagacauuaaguuaaucgauauagcgcuguccaaaacggacucucgcaaguaugagaacgcagucugggaucaguacaaggaccuaugccacaugcauaccggcgugguaguugaaaagaagaaaagaggaggcaaggaggaaauuacaccacacugugcccucauggauugcaucauguucgacgcugccgugagugggggacugaauacuagcguccuuagggcaguguugccccgggauauggucuuucgcaccuccacaccuagagugguucuguga

SEQ ID NO: 8750 - RNA, 1710 nt, Artificial Sequence
  derived and/or modified CDS sequence (opt3) from LASV(G2944-SLE-2012;Clade IV)__AIT17341__NP
augagcgccuccaaggagaucaaaucuuuccuguggacccagucacucagaagggaacuuaguggcuacugcagcaacauuaagcugcaaguggucaaagacgcucaggcauuguuacacgggcuggauuuuuccgagguuucuaaugugcagcggcuaaugcgcaaggaacgacgugacgauaacgaccucaaaagacugagggaucuuaaucaggccguaaacaaucugguggaguugaagucgacacaacagaagucaauacuccgggucggaacucugacgagcgacgaucugcucaucuuagcggcugaccuggaaaaacuuaagaguaaagugacccgcacagagagacccuuguccgccgguguuuauaugggcaaccugucuagccagcagcuagaucaaaggcgggcacuccugaauaugauugggauguccggaggcaaccagggugcccgcgcugggcgagacggaguggucagagugugggauguaaagaaugcagagcuucugaacaaucaguucggcacuaugccuucauugacccucgccugucugacaaaacagggccaaguugacuuaaacgaugcugugcaggcccugaccgaccucgggcuuaucuacacugcgaaguauccaaauacaagugaccuggauagguugacccagagccauccgauucuaaacaugaucgacacgaagaaaucuucccugaauauaucaggauacaacuuuagccucggugcagccgucaaggcuggcgccugcaugcuggaugggggaaacaugcuugaaacuaucaaagugaguccccaaaccauggacggcauucugaagucuaucuugaaagugaagaaagcacucgguauguucauuuccgaugcuccuggggagcggaauccauaugaaaacauccuguacaagauauguuuaagcggagacggcuggcccuauauugccucgcguacaucuaucacuggccgcgcgugggagaauaccgucguugaucuggaguccgacgggaagccucagaaagccggaucaaacgguaguaauaagagccuacaguccgcaggcuuuacagcugggcucaccuacucucagcugaugacgcuuaaagaugccauguugcaacuggacccaaacgcuaagacuuggauggauauugaaggaagacccgaggacccuguggaaaucgcccucuaccagccaagcucaggcugcuauauccacuucuuuagggagccgacagaccugaaacaguucaagcaggaugcaaaguacagucaugguauugacguaaccgaucuuuuugccgcucaacccgggcugacuuccgcggugauagacgcauugccucggaauauggucaucacaugucagggcagcgaugacauucgaaaacucuucgaaucucagggacgcaaggauaucaaacugauagacauugccuuaucaaaggcugauaguagaaaauaugagaacgccgugugggaccaguacaaggaucugugccacaugcauaccggcguuguggucgagaagaaaaagaggggagggaaagaagagaucacgccacacugugcacuaauggacugcaucauguuugaugccgcugugagcgguggccucaauaccuccguacugcgggccguucuuccccgcgacaugguguucagaacaucuacuccuagggucguguuguga

SEQ ID NO: 8751 - RNA, 1710 nt, Artificial Sequence
  derived and/or modified CDS sequence (opt3) from LASV(G3010-SLE-2013;Clade IV)__AIT17345__NP
augagcgccuccaaggagaucaaaucuuuccuguggacccagucacucagaagggaacuuaguggcuacugcagcaacauuaagcugcaaguggucaaagacgcucaggcauuguuacacgggcuggauuuuuccgagguuucuaaugugcagcggcuaaugcgcaaggaacgacgugacgauaacgaccucaaaagacugagggaucuuaaucaggccguaaacaaucugguggaguugaagucgacacaacagaagucaauacuccgggucggaacucugacgagcgacgaucugcucaucuuagcggcugaccuggaaaaacuuaagaguaaagugacccgcacagagagacccuuguccgccgguguuuauaugggcaaccugucuagccagcagcuagaucaaaggcgggcacuccuguccaugauugggaugucaaguggagugcagggcgcccgcgcuggucgagacggggucgugagaguaugggauguuaagaaugcagagcuucugaacaaucaguucggaacuaugccuagcuugacccucgccugucugacaaaacagggccaaguggacuuaaacgaugucgugcaggcucugaccgaccucggccuuaucuacacugccaaguauccaaauacaucugaccuggauagguugacccagucccauccgauucuaaacaugaucgacacgaagaaaucaagccugaauauaaguggguacaacuuuucucucggagcggcagugaaggccggugcuugcaugcuggauggcgggaauaugcuugaaacuaucaaagucagcccccaaaccauggacggaauuuugaaguccauccugaaaguuaagaaagcccucggcauguucauuucggagacaccuggugaacggaacccauaugagaacauccuguacaagauauguuuaucuggggauggauggcccuauauugcaucccguacuucaaucaccggccgcgcuugggagaauacagugguagaccuggaaagugauggcaagccucagaaagccgggagcaacaauuccaacaagucucuacagagcgcgggauuuaccgccggucucacguacucacagcugaugacucuuaaagacgcaauguugcaacuggauccaaaugcuaagacauggauggacauugagggcagacccgaagauccuguggaggucgcccucuaccagccaaguuccgggugcuauauccacuucuuuagggaaccgaccgaccugaaacaguucaagcaggacgcuaaguacagccauggaaucgaugugacugaccuuuuugccgcacaacccggccugacaucugccguuauugaugcuuugccucggaacauggugauaaccugucaggguucagacgauaucaaaaagcuccuggagagucaggggcgaaaagacauuaaguuaaucgauauagcgcugagcaaaacggacucccgcaaguaugagaaugcagucugggaucaguacaaggaccuaugccacaugcauaccggcgugguaguugagaaaaagaaaagaggaggcaaggaagaaauuacaccacacugugcccucauggauugcaucauguucgacgcugccgugucugggggacugaacacuucgguccuuagggcaguguugccccgggauauggucuuucgcaccagcacaccuagagugguucuguga

SEQ ID NO: 8752 - RNA, 1710 nt, Artificial Sequence
  derived and/or modified CDS sequence (opt3) from LASV(G3016-SLE-2013;Clade IV)__AIT17349__NP
augagcgccuccaaggagaucaaaucuuuccuguggacccagucacucagaagggaacuuaguggcuacugcagcaacauuaagcugcaaguggucaaagacgcucaggcauuguuacacgggcuggauuuuuccgagguuucuaaugugcagcggcuaaugcgcaaggaacgacgugacgauucggaccucaaaagacugagggaucuuaaccaggccguaaauaaccugguggaguugaagucaacacaacagaaguccauacuccgggucggaacucugacgagugacgaucugcucaucuuagcggcugaccuggaaaaacuuaaguccaaagugacccgcacagagagacccuugucugccgguguuuauaugggcaaucugagcucccagcagcuagaucaaaggcgggcacuccugaacaugcuugggaugucaggaaguaaucagggcgcccgcgcuggucgagacgggguggucagagugugggauguaaagaacgcagagcuguugaauaaccaguucggaacuaugccuagccucacccuggccuguuuaacaaaacagggccaaguugaccugaaugaugcugugcaggcccucaccgaccuuggccugauuuacacugcgaaguauccaaacacaucugacuuggauaggcuaacccagucccauccgauccugaauaugauugacacgaagaaaucaagccucaacaucaguggguacaauuuuucucugggagcagccgucaaggcuggugccugcaugcuugauggcgggaacaugcuggaaacuauaaaagugagcccccaaaccauggacggaauccucaagagcauuuugaaagugaagaaagcacugggcauguucaucucggauacaccuggugagcggaacccauaugaaaauauuuuauacaagaucugucugucuggggacggauggcccuauauagcuucccguacuucaauuaccggccgcgccugggagaacacagucguugaucuagagagugacgaaaagccucagaaagcgggcagcaauuccucuaacaagagccuccagucagccggguuuaccgcaggacugacguacagucagcuuaugacuuugaaagaugcuaugcugcaacucgacccaaaugccaagacauggauggauaucgaggguagacccgaagacccuguggagauugcucuguaccagccauccagcggcugcuauauccacuucuuuagggaaccgaccgaccuuaaacaguucaagcaggaugccaaguacucucaugggaucgacguaacugaucuguuugcagcccaacccggauugacaucagcugugauugacgcgcucccucggaacauggucauaaccugucagggcagugaugacauccgaaaacuguuagagagccagggucgcaaggauauuaaacugaucgacauagcacuauccaagacggauucuagaaaauaugagaaugccgugugggaccaguacaaggaucucugccacaugcauaccgggauuguuguggaaaagaaaaagaggggcggaaaagaggaaaucacaccacacugugcucugauggacugcaucauguucgaugccgcagucucgggcgggcuuaacgccagcguguugcgggcuguacugccccgcgacaugguuuuuagaacuuccaccccuagggugguccucuga

SEQ ID NO: 8753 - RNA, 1710 nt, Artificial Sequence
  derived and/or modified CDS sequence (opt3) from LASV(G3034-SLE-2013;Clade IV)__AIT17351__NP
augagcgccuccaaggagaucaaaucuuuccuguggacccagucacucagaagggaacuuaguggcuacugcagcaacauuaagcugcaaguggucaaagacgcucaggcauuguuacacgggcuggauuuuuccgagguuucuaaugugcagcggcuaaugcgcaagcagcgacgugacgauggagaccucaaaagacugagggaucuuaaccaagccguaaauaaccugguggaauugaagucgacacagcagaagucaguccuccggguggguacucugacgagcgacgaucugcucauauuagcggcugaccuggagaaacuuaagaguaaaguuauccgcaccgaaagacccuuguccgccggcguguauauggggaaucugucuagccagcaacuagagcagaggcgggcacuccugaacaugauuggaauguccucaggcaaucagggugcccgcacagggaaggauggagucgugcgaaucugggacguaaagaacgcugaucuucugaauaaccaguucggcacuaugccuaguuugacccucgcaugucugacaaagcaaggccagguugacuuaaaugaugugguccaggcccugaccgaccucgggcuuauuuacacugcuaaguauccaaacacaagcgaccuggauagauugacccaaucucauccgauccuaaauaugguggacacguccaaaucaagccugaacauaaguggauacaauuuuucucucggugccgcggugaaggcaggcgccugcaugcuggaugggggaaacaugcuugagacuaucaaagucaguccccagaccauggacggcauucugaaaagcaucuugaaaguuaagaaaucgcucgguauguucgugucugauacaccuggggaaaggaacccauaugagaauauucuguacaagaucuguuuauccggagacggcuggcccuauauagcuucacggacuuccauuaccggccgugccugggaaaacacaguaguggaucuggagagcaaugggaagccucagaaagcaggauccaacaauucuaacaagagccuacagucaaccgguuuuacggcuggccucacuuacagucaacugaugacacuuaaagacgccauguugcagcuggauccaaaugcgaagaccuggauggacaucgaggggcgccccgaagauccugucgagauugcccucuaccagccauccagcggaugcuauauccacuucuuuagagaaccgacugaccugaaacaguucaagcaagacgcaaaguacucucauggcaucgaugugacagaccuuuuugcugcccagcccggucugaccucagcuguuauugauacguugccuaggaacauggugauaaccugucaggggagugacgauauccggaaacuccuggagagccagggccgaaaggacauuaaauuaaucgauauagcccuguccaagauugacucucgcaaauaugaaaaugcagucugggaucaauacaaggaccuaugccacaugcauacaggagugguaguugagaagaaaaagagaggcgggaaagaggaaaucacuccacacugugcccucauggauugcaucauguucgacgcugcggugucgggaggucugaacgcaagcguccuuagggccguguugccccgggauauggucuuucgcaccuccacaccuagagugguucuguga

SEQ ID NO: 8754 - RNA, 1710 nt, Artificial Sequence
  derived and/or modified CDS sequence (opt3) from LASV(G3110-SLE-2013;Clade IV)__AIT17361__NP
augagcgccuccaaggagaucaaaucuuuccuguggacccagucacucagaagggaacuuaguggcuacugcagcaacauuaagcugcaaguggucaaagacgcucaggcauuguuacacgggcuggauuuuuccgagguuucuaaugugcagcggcuaaugcgcaaggaacgacgugacgauucggaccucaaaagacugagggaucuuaaccaggccguaaauaaccugguggaguugaagucaacacaacaaaagagcguccuccgggugggaacucugacgagugacgaucugcucguuuuagcggcugaccuggaaaaacuuaaguccaaagugacccgcacagagagacccuugucugccggugucuauaugggcaaucugagcucccagcagcuagaucagaggcgggcacuccugaacaugauagggaugucaggaggcaaucagggugcccgcgcugggcgagacggagugguaagaaucugggauguuaagaacgcagagcuucugaauaaccaguucggcacuaugccuaguuugacccucgccugucugacaaaacagggccaaguggacuuaaaugaugucgugcaggcucugaccgaccucgggcuuauuuacacugccaaguauccaaacacaagcgaccuggauagguugacccagucucauccgauccuaaauaugauugacacgaagaaauccucacugaacaucagcggauacaauuuuagucucggugcggcagugaaggccggcgcuugcaugcuggaugggggaaacaugcuugaaacuauaaaagucucuccccaaaccauggacggcauccugaaguccauuuugaaaguuaagaaagcccucgguauguucaucagcgauacaccuggggagcggaacccauaugaaaauauucuguacaagaucuguuuaucgggagacggcuggcccuauauagcaucucguacuuccauuaccggccgcgcuugggagaacacaaucguggaucuggagucagacgggaagccucagaaaaccaauaacacgaauaguaacaagagccuacaguccgccggauuugcggccggucucacuuacucucagcugaugacacuuaaagaugcaauguugcaacuggacccaaaugcuaagaccuggauggauauugaaggcagacccgaggacccuguagaaaucgcccucuaccagccaagcucagggugcuauauccacuucuuuagggagccgacugaccugaaacaguucaagcaggaugcuaaguacagucauggaauugacgugacagaucuuuuugccgcacaacccggccugaccuccgccgucauagacacguugccucggaacauggugaucaccugucaggguagcgaagauauucgacgccuccuggagucucaggggagaaaagacaucaaguuaauagauauugcucugucaaaaacagacaguaggaaguaugagaaugcgguuugggaucaguacaaagaccuaugccacaugcauacuggcguggucguggaaaagaagaaaaagggaggcaaagaggaaaucaccccacacugugcacucauggauugcaucauguucgacgccgcuguaagcgggggacugaacacauccguucuucgggccguguugccccgcgauauggucuuuagaacuucuaccccuagggugguccuguga

SEQ ID NO: 8755 - RNA, 1710 nt, Artificial Sequence
  derived and/or modified CDS sequence (opt3) from LASV(G3148-SLE-2013;Clade IV)__AIT17365__NP
augagcgccuccaaggagaucaaaucuuuccuguggacccagucacucagaagggaacuuaguggcuacugcagcaacauuaagcugcaaguggucaaagacgcucaggcauuguuacacgggcuggauuuuuccgagguuucuaaugugcagcggcuaaugcgcaaggaacgacgugacgauaacgaccucaaaagacugagggaucuuaaucaggccguaaacaaucugguggaguugaagucgacacaacagaagucaauacuccgggucggaacucugacgagcgacgaucugcucaucuuagcggcugaccuggaaaaacuuaagaguaaagugacccgcacagagagacccuuguccgccgguguuuauaugggcaaccugucuagccagcagcuagaucaaaggcgggcacuccugaauaugauugggauguccggaucaaaccagggcgcccaggcuggucgcgacggggugguccgagugugggauguaaagaaugcagagcuucugaacaaucaguucggaacuaugccuaguuugacccucgccugucugacaaaacaaggccagguugacuuaaacgaugcugugcaggcccugaccgaccucggccuuaucuacacugcgaaguauccaaauacaagcgaccuggauagauugacccaaucucauccgauucuaaacaugaucgacacgaagaaauccucacugaauauaagcggguacaacuuuagucucggagcagccgucaaggcuggugccugcaugcuggauggcgggaacaugcuugaaacuaucaaagugucuccccagaccauggacggcauucugaaguccaucuugaaagugaagaaagcacucggaauguucauuagcgaugcuccuggugagaggaauccauaugaaaacauccuguacaagauauguuuaucgggggacggauggcccuauauugccucucggacauccaucacuggccgugcgugggagaauaccgucguugaucuggagucagacggcaagccucagaaagccgggaguaacggaagcaauaagucccuacagucugcagguuuuacagcuggccucaccuacagccaacugaugacgcuuaaagaugccauguugcagcuggacccaaacgcuaagacuuggauggauauugaagggcgccccgaggacccuguggaaaucgcccucuaccagccaucaaguggaugcuauauccacuucuuuagagagccgacagaccugaaacaguucaagcaagaugcaaaguacucccauggcauugacguaaccgaucuuuuugccgcucagcccggucugacuagcgcggugauagacgcauugccuaggaauauggucaucacaugucaggggucugaugacauucggaaacucuucgaaucacagggccgaaaggauaucaaacugauagacauugccuuaaguaagaccgauagccgcaaauaugagaacgcugugugggaccaauacaaggaucugugccacaugcauacgggaaucguuguggagaagaaaaagagaggcgggaaagaagagaucaccccacacugugcccuaauggacugcauuauguuugaugcagccgucuccggaggucucaauacaucugugcugagggcuguacuuccccgggacaugguuuuccgcacuucgaccccuagaguggucuuguga

SEQ ID NO: 8756 - RNA, 1710 nt, Artificial Sequence
  derived and/or modified CDS sequence (opt3) from LASV(G3151-SLE-2013;Clade IV)__AIT17369__NP
augagcgccuccaaggagaucaaaucuuuccuguggacccagucacucagaagggaacuuaguggcuacugcagcaacauuaagcugcaaguggucaaagacgcucaggcauuguuacacgggcuggauuuuuccgagguuucuaaugugcagcggcuaaugcgcaaggaacgacgugacgauucggaccucaaaagacugagggaucuuaaccaggccguaaauaaccugguggaguugaagucaacacaacagaaguccguccuccgggugggaacucugacgagugacgaucugcucguuuuagcggcugaccuggaaaaacuuaaguccaaagugacccgcacagagagacccuugucugccggugucuauaugggcaaucugagcucccagcagcuagaucaaaggcgggcacuccugucaaugauagggaugaguggaggcaaccagggugcccgcgcugggcgagacggagugguaagaaucugggauguuaagaaugcagagcuucugaacaaucaguucggcacuaugccuagcuugacccucgccugucugacaaaacagggccaaguggacuuaaacgaugucgugcaggcucugaccgaccucgggcuuauuuacacugccaaguauccaaauacaucugaccuggauagguugacccagucccauccgauccuaaacaugauugacacgaagaaaucaagccugaauaucaguggauacaacuuuucucucggugcggcagugaaggccggcgcuugcaugcuggaugggggaaauaugcuugaaacuauaaaagucagcccccaaaccauggacggcauccugaaguccauuuugaaaguuaagaaagcccucgguauguucaucucggauacaccuggggagcggaacccauaugaaaacauucuguacaagaucuguuuaucuggagacggcuggcccuauauagcaucccguacuucaauuaccggccgcgcuugggagaauacaaucguggaucuggagagugacgggaagccucagaaaaccagcaacacgaauagcaacaagucucuacagagcgccggauuugcggccggucucacuuacucacagcugaugacacuuaaagaugcaauguugcaacuggacccaaaugcuaagaccuggauggauauugaaggcagacccgaggacccuguagaaaucgcccucuaccagccaaguuccgggugcuauauccacuucuuuagggagccgacugaccugaaacaguucaagcaggaugcuaaguacagccauggaauugacgugacagaucuuuuugccgcacaacccggccugaccucugccgucauagacgcuuugccucggaacauggugaucacgugucaggguucagaagauauucgaaaacuccuggagagucaggggcgcaaggacaucaaauuaauagauauugcgcugagcaagaccgacuccagaaaauaugagaaugcaguuugggaucaguacaaggaccuaugccacaugcauacaggcguggucguggaaaagaaaaagaaaggaggcaaggaggaaaucacuccacacugugcccucauggauugcaucauguucgacgcugccguaucugggggacugaacaccucgguucuuagggcaguguugccccgggauauggucuuucgcacaagcacuccuagagugguccuguga

SEQ ID NO: 8757 - RNA, 1710 nt, Artificial Sequence
  derived and/or modified CDS sequence (opt3) from LASV(G3157-SLE-2013;Clade IV)__AIT17371__NP
augagcgccuccaaggagaucaaaucuuuccuguggacccagucacucagaagggaacuuaguggcuacugcagcaacauuaagcugcaaguggucaaagacgcucaggcauuguuacacgggcuggauuuuuccgagguuucuaaugugcagcggcuaaugcgcaaggaacgacgugacgauaacgaccucaaaagacugagggaucuuaaucaggccguaaacaaucugguggaguugaagucgacacaacagaagucaauacuccgggucggaacucugacgagcgacgaucugcucaucuuagcggcugaccuggaaaaacuuaagaguaaagugacccgcacagagagacccuuguccgccgguguuuauaugggcaaccugucuagccagcagcuagaucaaaggcgggcacuccugaauaugauugggauguccggaucaaaccagggcgcccaggcuggucgcgacggggugguccgagugugggauguaaagaaugcagagcuucugaacaaucaguucggaacuaugccuaguuugacccucgccugucugacaaaacaaggccagguugacuuaaacgaugcugugcaggcccugaccgaccucggccuuaucuacacugcgaaguauccaaauacaagcgaccuggauagauugacccaaucucauccgauucuaaacaugaucgacacgaagaaauccucacugaauauaagcggguacaacuuuagucucggagcagccgucaaggcuggugccugcaugcuggauggcgggaacaugcuugaaacuaucaaagugucuccccagaccauggacggcauucugaaguccaucuugaaagugaagaaagcacucggaauguucauuagcgaugcuccuggugagaggaauccauaugaaaacauccuguacaagauauguuuaucgggggacggauggcccuauauugccucucggacauccaucacuggccgugcgugggagaauaccgucguugaucuggagucagacggcaagccucagaaagccgggaguaacagcuccaauaagucucuacagagcgcaggauuuacagcuggucucaccuacucacaacugaugacgcuuaaagaugccauguugcagcuggacccaaacgcuaagacuuggauggauauugaaggccgccccgaggacccuguggaaaucgcccucuaccagccaaguuccgggugcuauauccacuucuuuagagagccgacagaccugaaacaguucaagcaagaugcaaaguacagccauggaauugacguaaccgaucuuuuugccgcucagcccggccugacuucugcggugauagacgcauugccuaggaauauggucaucacaugucaggguucagaugacauucggaaacucuucgaaagucaggggcgaaaggauaucaaacugauagacauugccuuaagcaagaccgauucccgcaaauaugagaacgcugugugggaccaauacaaggaucugugccacaugcauacgggcaucguuguggagaagaaaaagagaggaggcaaagaagagaucaccccacacugugcccuaauggacugcauuauguuugaugcagccgucucugggggacucaauacaucggugcugagggcuguacuuccccgggacaugguuuuccgcacuagcaccccuagaguggucuuguga

SEQ ID NO: 8758 - RNA, 1710 nt, Artificial Sequence
  derived and/or modified CDS sequence (opt3) from LASV(G3206-SLE-2013;Clade IV)__AIT17379__NP
augagcgccuccaaggagaucaaaucuuuccuguggacccagucacucagaagggaacuuaguggcuacugcagcaacauuaagcugcaaguggucaaagacgcucaggcauuguuacacgggcuggauuuuuccgagguuucuaaugugcagcggcuaaugcgcaaggaacgacgugacgauucggaccucaaaagacugagggaucuuaaccaggccguaaauaaccugguggaguugaagucaacacaacagaaguccguccuccgggugggaacucugacgagugacgaucugcucauauuagcggcugaccuggaaaaacuuaaguccaaaguuacccgcacagagagacccuugucugccgguguguauaugggcaaucugagcucccagcagcuagaucaaaggcgggcacuccugaacaugaucgggaugucaaguggaaaucgcggcgcccaggcuggucgagacggggucgugagaguaugggauguuaagaacgcagagcuucugaauaaccaguucggaacuaugccuagcuugacccucgccugucugacaaaacagggccaaguggacuuaaaugaugcuguccaggcccugaccgaccucggccuuauuuacacugcgaaguauccaaacacaucugaccuggauagguugacccagucccauccgauccuaaauaugguggacacgaagaaaucaagccugaacauuaguggguacaauuuuucucucggagcagccgugaaggcuggugccugcaugcuggauggcgggaacaugcuugaaacuaucaaagucagcccccaaaccauggacggaauacugaaaagcaucuugaagguuaagaaagcacucggcauguucauuucggauacaccuggugagcggaacccauaugaaaauauccuguacaagauuuguuuaucuggggacggauggcccuauaucgcuucccguacuucaauaaccggccgcgccugggagaacacagugguagaucuggagagugacggcaagccucagaaagcggggagcaauaacuccaauaagucucuacagagcgccggauuugcagcuggucucaccuacucacagcugaugacgcuuaaagaugccauguugcaacuggacccaaacgcuaagacuuggauggauauugaaggcagacccgaggacccuguggaaaucgcccucuaccagccaaguuccgggugcuauauucacuucuuuagggagccgacagaccugaaacaguucaagcaggaugcaaaguacagccauggaaucgacgucaccgaucuuuuugccgcucaacccggccugacuucugcggugaucgacgcauugccucggaauaugguuauuacaugucaggguucagaugacauacgaaaacuccuggaaagucaggggcgcaaggauaucaaauuaauugacaucgcccugagcaagaccgauuccagaaaauaugagaacgcugugugggaccaguacaaggaucuaugccacaugcauacgggcauagucguggagaagaaaaagaggggaggcaaagaagagauuaccccacacugugcccucauggacugcaucauguucgaugcagccguaucugggggacugaauacaucgguucuucgggcuguguugccccgcgacauggucuuuagaacuagcaccccuagggugguccuguga

SEQ ID NO: 8759 - RNA, 1710 nt, Artificial Sequence
  derived and/or modified CDS sequence (opt3) from LASV(G3234-SLE-2013;Clade IV)__AIT17389__NP
augagcgccuccaaggagaucaaaucuuuccuguggacccagucacucagaagggaacuuaguggcuacugcagcaacauuaagcugcaaguggucaaagacgcucaggcauuguuacacgggcuggauuuuuccgagguuucuaaugugcagcggcuaaugcgcaagcagcgacgugacgauggagaccucaaaagacugagggaucuuaaccaagccguaaauaaccugguggaauugaagucgacacagcagaagucaguccuccggguggguacucugacgagcgacgaucugcucauauuagcggcugaccuggagaaacuuaagaguaaaguuacccgcacagaaagacccuuguccgccggcguguauauggggaaucugucuagccagcaacuagaucagaggcgggcacuccugaacaugaucggaauguccggcgguaaucagggggcccgcacuggaaaggacggcgucgugcgaauuugggauguuaaaaacgcugaccuucugaauaaccaguucggcaccaugccuucauugacacucgcaugucugaccaagcaagggcagguagauuuaaaugacgugguccaggcccugacugaccucggacuuaucuacacagcuaaguauccaaacaccagugaucuggacagauugacgcaaagccauccgauucuaaauaugaucgauacuucuaaauccucacugaacauaagcgguuacaauuuuagucucggcgccgcggugaaggcaggggccugcaugcuggacggaggcaacaugcuugagaccaucaaagugucuccccagacaauggaugguauucugaaguccaucuugaaagucaagaaaagccucgggauguucauuucggacacuccuggagagaggaacccauaugaaaauauccuguacaagauauguuuaucuggcgauggcuggcccuauauugcuucccggaccucaaucacagggcgugccugggagaacaccguuguggaccuggaaagugauggaaagccucagaaagcagguagcaauaacuccaauaagucucuacagagcacgggcuuuacugcugggcucacauacucacaacugaugacccuuaaagacgccauguugcagcuggauccaaacgcgaagacuuggauggacauugagggacgccccgaggacccuguagaaaucgcccucuaccagccaaguuccggcugcuauauccacuucuuuagagagccgacagaucugaaacaguucaagcaagacgcaaaguacagccaugguauugaugugaccgaccuuuuugcugcccagcccgggcugacgucugcugucauagauaccuugccuaggaauauggugaucacaugucagggcucagacgauauucggaaacuccuggaaagucagggacgaaaggacaucaaauuaauagauauugcccugagcaagacugacucccgcaaauaugagaacgcaguuugggaucaauacaaggaccuaugccacaugcauaccggcguggucguggaaaagaaaaagagagggggaaaagaggagaucacaccacacugugcccucauggauugcaucauguucgacgcugcgguaucugguggccugaauguuucggugcuuagggcagucuugccccgggacaugguguuucgcacuagcaccccuagagucgugcuguga

SEQ ID NO: 8760 - RNA, 1710 nt, Artificial Sequence
  derived and/or modified CDS sequence (opt3) from LASV(G3278-SLE-2013;Clade IV)__AIT17399__NP
augagcgccuccaaggagaucaaaucuuuccuguggacccagucacucagaagggaacuuaguggcuacugcagcaacauuaagcugcaaguggucaaagacgcucaggcauuguuacacgggcuggauuuuuccgagguuucuaaugugcagcggcuaaugcgcaagcagcgacgugacgauucggaccucaaaagacugagggaucuuaaccaagccguaaauaaccugguggaauugaagucaacacagcaaaagagcguccuccgggugggaacucugacgagugacgaucugcucguuuuagcggcugaccuggagaaacuuaaguccaaagugauacgcaccgaaagacccuugucuagcggugucuauaugggcaaucuguccucacagcagcuagaucagaggcgggcccuccugaacaugaucgggaugaguggaggcaaucagggugcacagguggggcgcgacggaguaguucgagugugggaugucaagaacgccgaccuucugaauaaccaauucggcacaaugccuagcuugacucucgcuugucugaccaaacagggccagguggauuuaaaugacgugguccaagcacugacagaccucgggcuuauuuacaccgccaaguauccaaacacuucugaucuggacagauuggcucagucccauccgauccuaaauaugauugauacaaagaaaucaagccugaacaucaguggauacaauuuuucucucggugccgcgguuaaggcaggcgccugcaugcuggacgggggaaacaugcuugagaccauaaaagugacgccccagacuauggauggcauccugaaguccauuuugaaaguaaagaaagcucucgguauguucaucagcgagaccccuggggaaaggaacccauaugagaauauucuguacaagaucuguuuaucgggagacggcuggcccuauauagccucucggacauccauuacuggccgugcaugggaaaacaccguggucgaucuggagucagacgggaagccucagaaagcuggaaauaacaauaguaacaagagccuacaauccgccgguuuuacagcgggccucaccuacucucagcugaugacgcuuaaagauagcauguugcagcuggacccaaaugccaagacuuggauggauaucgaggggcgccccgaagacccuguggagguugcacucuaccagccaucaaguggaugcuauauucacuucuuuagagaaccgacagaccugaaacaauucaagcaggaugcuaaguacucccauggcaucgacgugaccgaucuuuuugccacucagcccggucugacaagcgcugucaucgaggccuugccuaggaacauggugauuaccugucaggggucugacgauauacggaaacuccuggaaucacaaggccgaaaggacaucaaauuaauugauaucgcacugaauaagacggacagucgcaaauaugagaacgccguaugggaucaguacaaggaccuaugccacaugcauaccggaguuguggucgagaagaaaaagagaggcgggaaagaagagauaacaccacacugugcucucauggauugcauuauguucgacgcggcagugagcggaggucugaagacucuugccuugagggcuguccugccccgggauaugguguuucgcaccuccacaccuaaaguugugcucuga

SEQ ID NO: 8761 - RNA, 1710 nt, Artificial Sequence
  derived and/or modified CDS sequence (opt3) from LASV(G502-SLE-2009;Clade IV)__AIT17127__NP
augagcgccuccaaggagaucaaaucuuuccuguggacccagucacucagaagggaacuuaguggcuacugcagcaacauuaagcugcaaguggucaaagacgcucaggcauuguuacacgggcuggauuuuuccgagguuucuaaugugcagcggcuaaugcgcaaggaacgacgugacgauaacgaccucaaaagacugagggaucuuaaucaggccguaaacaaucugguggaguugaagucgacacaacagaagucaauacuccgggucggaacucugacgagcgacgaucugcucaucuuagcggcugaccuggaaaaacuuaagaguaaagugauucgcaccgagagacccuuguccgccgguguuuauaugggcaaccugucuagccagcagcuagaucaaaggcgggcacuccuguccaugaucgggaugucaggaggcaaucagggugugcgcgccgggaaggacggagucgugcgaguaugggauguuaaaaacgcugagcuucugaauaaccaguucggcacaaugccuaguuugacucucgcaugucugaccaagcagggccaaguggacuuaaaugaugccguccaggcucugacagaccucgggcuuauuuacaccgccaaguauccaaacacuagcgaccuggauagauugacacagucucauccgauccuaaauaugauagacaccaaaaaguccucacugaacaucagcggauacaauuuuagucucggugcggcagugaaagccggcgcuugcaugcuggaugggggaaacaugcuugaaacgauuaaggugucuccccaaacuauggacggcauccugaaauccauuuugaaggucaaaaaggcccucgguauguucaucagcgauaccccuggggagaggaacccauaugaaaauauacuguacaagauuuguuuaucgggagacggcuggcccuauaucgcaucucggacauccauuacuggccgugcuugggagaacaccguuguggaucuggagucagacgggaaaccucagaaggccggaaguaauaacagcaauaaaucccuacagucugcggguuuuacagccggccucaccuacagccagcugaugacgcuuaaggaugcaauguugcaacuggacccaaacacuaaaacauggauggauaucgaagggcgccccgaggacccuguagaaaucgcucucuaccagccaucaaguggaugcuauauucacuucuuuagagagccgaccgaccugaagcaguucaagcaggaugccaaauacucccauggcauagacgugacugaucuuuuugcugcccaacccggucugacaagcgcagucaucgacgccuugccuaggaauauggugauuaccugucaggggucugaugacauccggaagcuccuggaaucacagggccgaaaagauauaaaguuaauugacaucgcucugaacaaaacggauagucgcaaguaugagaaugcgguuugggaccaguacaaggaucuaugccacaugcauaccggaguggucguggagaaaaagaaaagaggcgggaaggaagagaucacaccacacugugcacucauggacugcauuauguucgaugccgcuguaagcggaggucugaacacuuccguucuuagggccguguugccccgggacauggucuuucgcaccucuacaccuagagugguccuguga

SEQ ID NO: 8762 - RNA, 1710 nt, Artificial Sequence
  derived and/or modified CDS sequence (opt3) from LASV(G503-SLE-2009;Clade IV)__AIT17131__NP
augagcgccuccaaggagaucaaaucuuuccuguggacccagucacucagaagggaacuuaguggcuacugcagcaacauuaagcugcaaguggucaaagacgcucaggcauuguuacacgggcuggauuuuuccgagguuucuaaugugcagcggcuaaugcgcaaggaacgacgugacgauaacgaccucaaaagacugagggaucuuaaucaggccguaaacaaucugguggaguugaagucgacacaacagaagucaauacuccgggucggaacucugagcagugacgaucugcucguguuagcggcugaccuggaaaaacuuaaguccaaaguuacgcgcaccgagagacccuugucugccgguguguauaugggcaaccugagcucccagcagcuagaucaaaggcgggcacuccugaauaugaucgggaugucaggaggcaaccagggugcccgcgcugggcgagacggagucgugagaguaugggauguuaagaaugcagagcuucugaacaaucaguucggcacaaugccuaguuugacucucgccugucugaccaaacagggccaaguggacuuaaacgaugucgugcaggcucugacagaccucgggcuuauuuacaccgccaaguauccaaauacuagcgaccuggauagguugacacagucucauccgauccuaaacaugguggacaccaagaaauccucacugaauauuagcggauacaacuuuagucucggugcggcagucaaggccggcgcuugcaugcuggaugggggaaacaugcuugaaacgaucaaaguuucuccccaaacuauagacggcauccugaaguccauuuugaaagugaagaaagcccucgguauguucaucagcgauaccccuggggagcggaauccauaugaaaacauucuguacaagaucuguuuaucgggagacggcuggcccuauauagcaucucguacauccauuacuggccgcgcuugggagaauaccguaguggaucuggagucagacgggaagccucagaaagccggaaguaacaauagcaacaagucccuacagucugcggguuuuacagccggccucaccuacagccagcugaugacgcuuaaagaugcaauguugcaacuggacccaaaugcuaagaucuggauggauauugaagggagacccgaggacccugucgaaaucgcccucuaccagccaucaaguggaugcuauauccacuucuuuagggagccgacugaccugaaacaguucaagcaggaugcuaaguacucccauggcauugacgugacagaucuuuuugccgcacaacccggucugaccagcgccguuauagacgcuuugccucggaacauggugaucacuugucagggggcggaugacauucgaaaacuccuggaaucucagggccgcaaggauaucaaauuaauagacauugcacugaauaaggccgauucaagaaaauaugagaacgcugucugggaccaguacaaggaucuaugccacaugcauacaggagugguaguugagaagaaaaagaggggcgggaaagaagagaucaccccacacugugcccucauggacugcaucauguucgaugcagccgugaguggaggucugaauacgagcguccuucgggcuguguugccccgcgacauggucuuuagaaccuccacaccuagggugguucuguga

SEQ ID NO: 8763 - RNA, 1710 nt, Artificial Sequence
  derived and/or modified CDS sequence (opt3) from LASV(G610-SLE-2009;Clade IV)__AIT17135__NP
augagcgccuccaaggagaucaaaucuuuccuguggacccagucacucagaagggaacuuaguggcuacugcagcaacauuaagcugcaaguggucaaagacgcucaggcauuguuacacgggcuggauuuuuccgagguuucuaaugugcagcggcuaaugcgcaaggaacgacgugacgauaacgaccucaaaagacugagggaucuuaaucaggccguaaacaaucugguggaguugaagucgacacaacagaagucaauacuccgggucggaacucugacgagcgacgaucugcucaucuuagcggcugaccuggaaaaacuuaagaguaaagugacccgcacagagagacccuuguccgccgguguuuauaugggcaaccugucuagccagcagcuagaucaaaggcgggcacuccuguccaugauugggaugucaggaggcaaucagggugcccgcgcugggcgagacggaguggucagagugugggauguaaagaacgcagagcuucugaauaaccaguucggcacuaugccuaguuugacccucgccugucugacaaaacagggccaaguugacuuaaaugaugugguccaggcucugaccgaccucgggcuuaucuacacugccaaguauccaaacacaagcgaccuggauagguugacccagucucauccgauucuaaauaugaucgacacgaagaaauccucacugaacauaagcggauacaauuuuagucucggugcggcagugaaggccggcgcuugcaugcuggaugggggaaacaugcuugaaacuaucaaagugucuccccaaaccauggacggcauucugaaguccaucuugaaagucaagaaagcccucgguauguucauuagcgauacaccuggggagcggaacccauaugaaaauauccuguacaagauauguuuaucgggagacggcuggcccuauauugcaucucguacuuccaucaccggccgcgcuugggagaacacaguuguggaucuggagucagacgggaagcuacagaaagccggaaguaauaacagcaauaagucccuccagucugcggguuuuaccgccggccugacguacagccagcuuaugacuuugaaagaugcaaugcugcaacucgacccuaacgcuaagacauggauggauauugaagggagaccagaggaccccguagaaaucgcccuguaccagccuucaaguggaugcuauauccacuucuuuagggagccaaccgaccuuaaacaguucaagcaggaugcuaaguacucccauggcauugacgugacugaucuguuugccgcacaaccggguuugacaagcgccgucauagacgcucucccccggaauauggugaucaccugucaggggucugaugacauucgaaaacuguuagaaucacagggccgcaaggauaucaaacugauagacauugcgcuaaacaagacggauaguagaaaauaugagaaugcaguuugggaccaguacaaggaucucugccacaugcauaccggaguggucguggagaagaaaaagaaaggcgggaaggaagagaucacaccucacugugcccugauggacugcaucauguucgaugcugccguaagcggaggucuuaacacuuccguuuugagggcagugcugccacgggacauggucuuucgcaccucuacacccagagugguccucuga

SEQ ID NO: 8764 - RNA, 1710 nt, Artificial Sequence
  derived and/or modified CDS sequence (opt3) from LASV(G636-SLE-2009;Clade IV)__AIT17139__NP
augagcgccuccaaggagaucaaaucuuuccuguggacccagucacucagaagggaacuuaguggcuacugcagcaacauuaagcugcaaguggucaaagacgcucaggcauuguuacacgggcuggauuuuuccgagguuucuaaugugcagcggcuaaugcgcaaggaacgacgugacgauaacgaccucaaaagacugagggaucuuaaucaggccguaaacaaucugguggaguugaagucgacacaacagaagucaguccuccgggugggaacucugacgagcgacgaucugcucauauuagcggcugaccuggaaaaacuuaagaguaaaguuacccgcacagagagacccuuguccgccgguguguauaugggcaaccugucuagccagcagcuagaucaaaggcgggcacuccugaauaugaucgggauguccggaggcaaccagggugcccgcgcugggcgagacggagucgugagaguaugggauguuaagaaugcagagcuucugaacaaucaguucggcacuaugccuucauugacccucgccugucugacaaaacagggccaaguggacuuaaacgaugcuguccaggcccugaccgaccucgggcuuauuuacacugcgaaguauccaaauacaagugaccuggauagguugacccagagccauccgauccuaaacaugauugacacgaagaaaucuucccugaauaucucaggauacaacuuuagccucggugcagccgugaaggcuggcgccugcaugcuggaugggggaaacaugcuugaaacuauaaaagugaguccccaaaccauggacucuauccugaaguccauuuugaaagucaagaaagcacucggcauguucaucagcgauacaccuggugagcggaauccauaugaaaacauucuguacaagaucuguuuaucgggggacggauggcccuauauagcuucucguacuuccauuaccggccgcgccugggagaauacaguuguggaucuggagucagacggcaagccucagaaagcggggaguaacaauagcaacaagucccuacagucugccggauuugcagcuggucucaccuacagccagcugaugacgcuuaaagaugccauguugcaacuggacccaaaugcuaagacuuggauggauaucgaaggcagacccgaggacccuguagaaauugcccucuaccagccaucaagugggugcuauauccacuucuuuagggagccgacagaccugaaacaguucaagcaggaugcaaaguacucccauggaaucgacgugaccgaucuuuuugccgcucaacccggccugacuagcgcggucauugacgcauugccucggaacauggugauaacaugucaggguucugaugacauccgaaaacuccuggaaucacaggggcgcaaggauauuaaauuaaucgacauagcccugaguaagaccgauagcagaaaauaugagaaugcuguuugggaccaguacaaggaucuaugccacaugcauacgggcauuguggucgagaagaaaaagaggggaggcaaagaagagaucaccccacacugugcccucauggacugcaucauguucgaugcagccguguccgggggacugaacacaucuguacuucgggcuguuuugccccgcgacaugguguuuagaacuaccacaccuagggucgugcuguga

SEQ ID NO: 8765 - RNA, 1710 nt, Artificial Sequence
  derived and/or modified CDS sequence (opt3) from LASV(G676-SLE-2009;Clade IV)__AIT17143__NP
augagcgccuccaaggagaucaaaucuuuccuguggacccagucacucagaagggaacuuaguggcuacugcagcaacauuaagcugcaaguggucaaagacgcucaggcauuguuacacgggcuggauuuuuccgagguuucuaaugugcagcggcuaaugcgcaaggaacgacgugacgauaacgaccucaaaagacugagggaucuuaaucaggccguaaacaaucugguggaguugaagucgacacaacagaagucaauacuccgggucggaacucugacgagcgacgaucugcucaucuuagcggcugaccuggaaaaacuuaagaguaaagugacccgcacagagagacccuuguccgccgguguuuauaugggcaaccugucuagccagcagcuagaucaaaggcgggcacuccugaauaugauugggauguccggaucaaaccagggcgcccgcgcuggucgagacgggguggucagagugugggauguaaagaaugcagagcuucugaacaaucaguucggaacuaugccuaguuugacccucgccugucugacaaaacagggccaaguugacuuaaacgaugcugugcaggcccugaccgaccucggccuuaucuacacugcgaaguauccaaauacaagcgaccuggauagguugacccagucucauccgauucuaaacaugaucgacacgaagaaauccucacugaauauaagcggguacaacuuuagucucggagcagccgucaaggcuggugccugcaugcuggauggcgggaacaugcuugaaacuaucaaagugucuccccaaaccauggacggcauucugaaguccaucuugaaagugaagaaagcacucggaauguucauuagcgauacaccuggugagcggaauccauaugaaaacauccuguacaagauauguuuaucgggggacggauggcccuauauugcuucucguacuuccaucaccggccgcgccugggagaauacagucguugaucuggagucagacggcaagccucagaaagcggggaacaauggaaguaacaagagccuacaguccgccgguuuuaccgcaggccucacguacucucagcugaugacucuuaaagaugcuauguugcaacuggacccaaaugccaagacauggauggauauugaagggagacccgaggacccuguggaaaucgcucucuaccagccaagcucaggaugcuauauccacuucuuuagggagccgaccgaccugaaacaguucaagcaggaugccaaguacagucauggcauugacguaacugaucuuuuugcagcccaacccggucugacauccgcugugauagacgcguugccucggaaccucgucaucaccugucaggggagcgaugacauucgaaaacuguuagaaucucagggccgcaaggauaucaaacugauagacauugcacuaucaaagacggauaguagaaaauaugagaaugccgugugggaccaguacaaggaucucugccacaugcauaccggaaucguuguggagaagaaaaagaggggcgggaaagaagagaucacaccacacugugcucugauggacugcauuauguucgaugccgcagucagcggaggucuuaacacuuccguguugcgggccguacugccccgcgacaugguuuuuagaaccucuacaccuagggugguccucuga

SEQ ID NO: 8766 - RNA, 1710 nt, Artificial Sequence
  derived and/or modified CDS sequence (opt3) from LASV(G692-SLE-2009;Clade IV)__AIT17147__NP
augagcgccuccaaggagaucaaaucuuuccuguggacccagucacucagaagggaacuuaguggcuacugcagcaacauuaagcugcaaguggucaaagacgcucaggcauuguuacacgggcuggauuuuuccgagguuucuaaugugcagcggcuaaugcgcaaggaacgacgugacgauaacgaccucaaaagacugagggaucuuaaucaggccguaaacaaucugguggaguugaagucgacacaacagaagucaguccuccgggugggaacucugacgagcgacgaucugcucauauuagcggcugaccuggaaaaacuuaagaguaaaguuacccgcacagagagacccuuguccgccgguguguauaugggcaaccugucuagccagcagcuagagcaaaggcgggcacuccugaauaugaucgggauguccggaucaaaccagggcgcccaggcuggucgcgauggggucgugcgaguaugggacguuaagaaugcagaacuucugaacaaucaguucggaacuaugccuaguuugacccucgccugucugacaaaacaaggccagguggauuuaaacgacgcuguccaggcccugaccgaucucggccuuauuuacacugugaaguauccaaauacaagcgaccuggacagauugacccaaucucauccgauccuaaacaugauugauacgaagaaauccucacugaauaucagcggguacaacuuuagucucggagcggcagugaaggccggugcuugcaugcuggacggcgggaacaugcuugagacuauaaaagucucuccccagaccauggauggaauccugaaguccauuuugaaaguuaagaaagcccucggcauguucaucagcgacacaccuggugaaaggaauccauaugagaacauucuguacaagaucuguuuaucgggggauggauggcccuauauagcaucucggacuuccauuaccggccgugcuugggagaauacagugguagaccuggaaucagauggcaagccucagaaagccgacaguaacagcuccaauaagucucuacagagcgcgggguuuaccgccggacucacguacucacaacugaugacucuuaaagaugcaauguugcagcuggacccaaacgcuaagacauggauggauaucgagggucgccccgaagacccuguggaggucgcccucuaccagccaaguuccggcugcuauauucacuucuuuagagaaccgaccgaccugaaacaguucaagcaagaugcuaaguacagccaugggaucgacgugacugaucuuuuugccgcacagcccggacugacaucugccguuaucgacgcuuugccuaggaauauggugauuaccugucagggcucagaugacauacggaaacuccuggagagucagggucgaaaggauaucaaauuaauugacaucgcgcugagcaagacggauucccgcaaauaugagaacgcagucugggaccaauacaaggaucuaugccacaugcauaccggggugguaguugaaaagaaaaagagaggcggaaaagaggaaauaacaccacacugugcccucauggacugcauuauguucgaugcugccgugucuggcgggcugaauacuucgguccuuagggcaguguugccccgggacauggucuuucgcaccagcacaccuagagugguucuguga

SEQ ID NO: 8767 - RNA, 1710 nt, Artificial Sequence
  derived and/or modified CDS sequence (opt3) from LASV(G733-SLE-2010;Clade IV)__AIT17155__NP
augagcgccuccaaggagaucaaaucuuuccuguggacccagucacucagaagggaacuuaguggcuacugcagcaacauuaagcugcaaguggucaaagacgcucaggcauuguuacacgggcuggauuuuuccgagguuucuaaugugcagcggcuaaugcgcaaggaacgacgugacgauaacgaccucaaaagacugagggaucuuaaucaggccguaaacaaucugguggaguugaagucgacacaacagaagucaguccuccgggugggaacucugacgagcgacgaacugcucguuuuagcggcugaucuggagaaacuuaagaguaaagugauacgcaccgagagacccuuguccgccggugucuauaugggcaaccugucuagccagcagcuagaccaaaggcgggcacuccuguccaugaucgggaugucaggaggcaaucagggugcccgcacagggcgagauggagugguaagaguuugggacgugaagaacgcugaacuucugaauaaccaguucggcacuaugccuaguuugacccucgcaugucugacaaaacagggccaagucgauuuaaaugacgccgugcaggcucugaccgaucucgggcuuauuuacacugccaaguauccaaacacaagcgaccuggacagguugacccagucucauccgauccuaaauaugauugauacgaagaaauccucacugaacaucagcggauacaauuuuagucucggugcggcagugaaggccggcgcuugcaugcuggacgggggaaacaugcuugagacuauaaaagucucuccccaaaccauggauggcauccugaaguccauuuugaaaguuaagaaagcccucgguauguucaucagcgacacaccuggggaacggaacccauaugagaauauucuguacaagaucuguuuaucgggagauggcuggcccuauauagcaucucguacuuccauuaccggccgcgcuugggagaacacagugguagaccuggaaucagaugggaagccucagaaagccggaaguaauaacagcaauaagucccuacagucugcggguuuuaccgccggccucacguacagccagcugaugacucuuaaagacgcaauguugcaacuggauccaaacgcuaagacauggauggacaucgaggggagacccgaagauccuguggagauugcccucuaccagccaucaaguggaugcuauauccacuucuuuagggaaccgaccgaccugaaacaguucaagcaggacgcuaaguacucccauggcaucgaugucacugaccuuuuugccgcacaacccggucugacaagcgccgugauugaugcuuugccucggaauaugguuauaaccugucaggggucugacgauauccgaaaacuccuggagucacagggccgcaaggacauuaaauuaaucgauauagcgcugaguaagauugacagcagaaaauaugagaacgcagugugggaucaguacaaggaccuaugccacaugcauacgggagucgugguagaaaagaaaaagaggggcgggaaagaggaaaucaccccacacugugcccucauggauugcaucauguucgacgcugccguuuccggaggucuuaauucucugguguugcgggcaguccugccccgcgauaugguguuuagaacaucgacuccuagggucgugcucuga

SEQ ID NO: 8768 - RNA, 1710 nt, Artificial Sequence
  derived and/or modified CDS sequence (opt3) from LASV(G806-SLE-2010;Clade IV)__AIT17161__NP
augagcgccuccaaggagaucaaaucuuuccuguggacccagucacucagaagggaacuuaguggcuacugcagcaacauuaagcugcaaguggucaaagacgcucaggcauuguuacacgggcuggauuuuuccgagguuucuaaugugcagcggcuaaugcgcaaggaacgacgugacgauaacgaccucaaaagacugagggaucuuaaucaggccguaaacaaucugguggaguugaagucgacacaacagaagucaauacuccgggucggaacucugacgagcgacgaucugcucaucuuagcggcugaccuggaaaaacuuaagaguaaagugacccgcacagagagacccuuguccgccgguguuuauaugggcaaccugucuagccagcagcuagaucaaaggcgggcacuccugaauaugauugggauguccggaucaaaccagggcgcccgcacuggucgagacgggguggucagagugugggauguaaagaaugcugagcuucugaacaaucaguucggaaccaugccuaguuugacacucgcaugucugaccaaacagggccaaguugacuuaaacgaugccgugcaggcucugacugaccucggccuuaucuacacagccaaguauccaaauaccagcgaccuggauagguugacgcagucucauccgauucuaaacaugaucgacacuaagaaauccucacugaauauaagcggguacaacuuuagucucggagcggcagucaaggccggugcuugcaugcuggauggcgggaacaugcuugaaaccaucaaagugucuccccaaacaauggacggcauucugaaguccaucuugaaagugaagaaagcccucggaauguucauuagcgauacuccuggugagcggaauccauaugaaaacauccuguacaagauauguuuaucgggggacggauggcccuauauugcaucucguaccuccaucacaggccgcgcuugggagaauaccgucguugaucuggagucagacggcaagccucagaaagccgggaguaacagcuccaauaagucucuacagagcgcgggacucacggccggucugacuuacucacagcuuaugacauugaaagaugcaaugcugcaacucgacccaaacgcuaagaccuggauggauauugaaggcagacccgaggacccuguggaaaucgcccuguaccagccaaguuccgggugcuauauccacuuuuucagggagccgacugaccuuaaacaguuuaagcaggaugcuaaguacagccauggaauugacguaacagaucuguucgccgcacaacccggcuugaccucugccgugauagacgcucucccucggaaucuggucaucacgugucaggguucagaugacauucgaaaauuacuggaaagucaggggcgcaaggauaucaaacuaauagacauugcgcucagcaagaccgauuccagaaaauaugagaacgcagugugggaccaguacaaggaucugugccacaugcauacaggcaucguuguggagaagaaaaagaggggaggcaaagaagagaucacuccacacugugcccuuauggacugcauuauguuugaugcugccgucucugggggauugaaugcaucggugcugcgggccguacucccccgcgacaugguuuucagaaccagcacaccuagggugguccuguga

SEQ ID NO: 8769 - RNA, 1710 nt, Artificial Sequence
  derived and/or modified CDS sequence (opt3) from LASV(G808-SLE-2010;Clade IV)__AIT17165__NP
augagcgccuccaaggagaucaaaucuuuccuguggacccagucacucagaagggaacuuaguggcuacugcagcaacauuaagcugcaaguggucaaagacgcucaggcauuguuacacgggcuggauuuuuccgagguuaauaacgugcagcggcuaaugcgcaaggaacgacgugacgauaaugaccucaaaagacugagggaucuuaaccaggccguaaauaaccugguggaguugaagucuacacaacagaagucgauacuccgggucggaacucugacgucagacgaucugcucaucuuagcggcugaccuggaaaaacuuaagagcaaagugacccgcacagagagacccuugagugccgguguuuauaugggcaaucuguccucucagcagcuagaucaaaggcgggcacuccugaacaugauugggaugagcaauggaaaccagggcacucgcgccggucgagacgggguggucagagugugggauguaaagaaugcugagcuucugaacaaucaguucggaaccaugccuuccuugacacucgcaugucugaccaaacagggccaaguugacuuaaacgaugugguccaggcccugacugaccucggccuuaucuacacagcuaaguauccaaauaccucagaccuggauagguugacgcagagucauccgauucuaaacaugaucgacacuaagaaaagcucucugaacauauccggguacaauuuuucacucggagccgcggugaaggcaggagccugcaugcuggauggcgggaacaugcuugaaaccaucaaagugagcccccaaacaauggacgguauucugaagaguaucuugaaagucaagaaagcucucggcauguucauuucugauacuccuggugagcggaauccauaugaaaacauccuguacaagauauguuuauccggggacggauggcccuauauugccagccguaccucgaucacaggccgcgcaugggagaauaccguuguggaucuggagucugacggcaagccucagaaagcugauuccucaaacaguaauaagagccuacaguccgccggguuuacggcgggacucacuuacucucagcugaugacacuuaaagacgccauguugcaacuggauccaaacgcaaagaccuggauggacauugaagguagacccgaggacccuguagaaguggcucucuaccagccaagcucaggcugcuauauccacuucuuuagggagccgacugaucugaaacaguucaagcaggacgccaaguacagucaugggaucgaugucacagaccuuuuugcugcccaacccggacugaccuccgcagugauugaugccuugccucggaauaugguuauaacgugucagggcagcgacgauauccgaaaacuccuggaaucucagggucgcaaggacauuaaauuaaucgauauagcucugucaaaggcggacaguagaaaauaugagaacgcagugugggaucagcacaaggaccuaugccauaugcacaccggggucgugguagagaagaaaaagaggggcggaaaagaagagauuacaccacacugugcccucauggauugcaucauguacgacgcugccguuagcggcgggcugaauacuuccgugcuucgggcagucuugccccgcgacaugguguucagaaccucuacaccuagggucgugcuguga

SEQ ID NO: 8770 - RNA, 1710 nt, Artificial Sequence
  derived and/or modified CDS sequence (opt3) from LASV(Guinea Faranah;Clade IV)__AMZ00380__NP
augagcguguccaaggaggucaaaucuuuccuguggacccagucacucagaagggaacuuaguggcuacugcagcaacaucaagcugcaaguugugaaagacgcccaggcuuuguuacacgggcuggauuuuuccgagguaucuaaugugcagcggcuaaugcgcaagcagcgacgugacgauucggaccucaaaagacugagggaucuuaaccaagcagucaauaaccugguggaauugaagucaacacagcaaaagagcguucuccgggugggaacucugacgagugacgaucugcucauuuuagccgcggaccuggagaaacuuaaguccaaagucacccgcacagaaagacccuugucugcugguguguauaugggcaaucugagcucccagcagcuagaucagaggcgggcccuccugaacaugauagggaugaauggaggcaaccaggguguacaggcagggcgcgacggaguugugcgagucugggaugugaagaaugccgagcuucugaacaaucaauucggcacuaugccuucauugacccucgcuugucugacaaaacagggccagguggacuuaaacgaugcaguccaagcccugaccgaccucgggcuuaucuacacugcuaaguauccaaauacaagugaccuggauagauuggcccagagccauccgauucuaaacaugaucgacaccaagaaaucuucccugaauauuucaggauacaacuuuagccucggugcggcaguuaaggccggcgcuugcaugcuggaugggggaaacaugcuugagacgaucaaagugaguccccagacuauggacggcauacugaaggccaucuugaaaguaaagaggacccucgguauguucgugucugauacaccuggggaacggaauccauaugagaacauucuguacaaaaucuguuuauccggagacggcuggcccuauauugcaagccguacuucgaucaccggccgcgcuugggaaaauacagucguggaucuggagucugacgggaagccucagaagguuggaaacaaugguuccaacaaaucacuacaaagugccggcuuuagcgcggggcucaccuacucccagcugaugacgcuuaaggaugccauguugcagcuggacccaaauacuaaaacauggauggauauagagggaagacccgaagacccuguggaggucgcacucuaccagccaucuagcggcugcuauauucacuucuuuagggaaccgaccgaccugaagcaauucaaacaggaugcuaaguacucacaugguaucgacgugacugaucuuuuugccgcucagcccgggcugacaagugccguaauugaggcauugccucggaacaugguuaucaccugucagggcuccgaagacauccgaaagcuccuggagagccaaggacgcaaagauauuaaguuaauagacaucgcccugucuaaagcugauucaagaaaguaugagaaugcggugugggaccagugcaaagaucuaugucacaugcauacgggcauugucguggaaaagaagaaaaggggagggaaggaggaaaucaccccacacugcgcacucauggacuguauaauguucgaugccgcugucagugguggccugaacacacaggugcuucgggccguuuugccccgcgacaugguguuuagaacuagcaccccuaaaguaguccuguga

SEQ ID NO: 8771 - RNA, 1710 nt, Artificial Sequence
  derived and/or modified CDS sequence (opt3) from LASV(GUINEA Z-185a;Clade IV)__AMZ00376__NP
augagcguguccaaggagaucaaaucuuuccuguggacccagucacucagaagggaacuuaguggcuacugcagcaacauuaagcugcaagucguuaaagacgcccaggcuuuguuacacgggcuggauuuuuccgaggugucuaauguacagcggcuaaugcgcaagcagcgacgugacgauaacgaccucaaaagacugagggaucuuaaucaagcagugaacaaucuggucgaauugaagucgacacagcagaagucagugcuccggguuggaacucugacgagcgacgaucugcucauauuagccgcggaccuggagaaacuuaagaguaaagugacccgcacagaaagacccuuguccgcuggugucuauaugggcaaccugucuagccagcaacuagaucagaggcgggcccuccugaauaugaucgggauguccggaggcaaccagggugcacagacugggcgcgacggagugguacgaauuugggauguuaagaaugccgagcuucugaacaaucaauucggcaccaugccuucauugacacucgcuugucugaccaaacagggccagguggacuuaaacgaugucgugcaagcacugacugaccucgggcuuaucuacacagccaaguauccaaauaccagugaccuggauagauugacgcagagccauccgauucuaaacaugaucgacacuaagaaaucuucccugaauauaucaggauacaacuuuagccucggugcugccgugaaggcgggcgcaugcaugcuggaugggggaaacaugcuugagaccaucaaagucaguccccagacaauggacggcauucugaagucuaucuugaaaguuaagaaagcccucgguauguucauuuccgauacuccuggggaaaggaauccauaugagaacauccuguacaagauauguuuaagcggagacggcuggcccuauauugcuucgcggaccucuaucacaggccgugccugggaaaauaccgugguagaucuggaguccggggagaagccucagaaaauuggaucaaacaauaguaacaagugccuacaaagcgcagguuuuacggcuggccucuccuacucucagcugaugacucuuaaagacgccauguugcagcuggauccaaaugcgaagacauggauggacaucgaagggcgccccgaggauccuguggaaaucgcccucuaccagccaagcucaggauguuauauucacuucuuuagagagccgaccgaccugaaacaauucaagcaggacgcaaaguacagucauggcauagaugucacugaccuuuuugcugcccagcccggucugacauccgcugugaucgaagccuugccuaggaacaugguuaugaccugccaggggagcgaugacauucggaaacuccuggagucucaaggccgaaaggauaucaaauuaauagacauugcacugucaaagacggauagucgcaaauaugagaaugccgugugggaccaguacaaggaucuaugucacaugcauaccggagucgugguagaaaagaaaaagaaaggcgggaaggaggaaaucacaccacacugcgcucucauggacuguaucauguucgaugcggcaguuagcggaggucugaacacuuccgugcuuagagccgucuugcccagggacaugguguuucggaccucuacaccuaaagucgugcuguga

SEQ ID NO: 8772 - RNA, 1710 nt, Artificial Sequence
  derived and/or modified CDS sequence (opt3) from MOPV/LASV reassortant(IGS-1;Clade IV)__AFY05578__NP
augagcgccuccaaggagaucaaaucuuuccuguggacccagucacucagaagggaacuuaguggcuacugcagcaacauuaagcugcaaguggucaaagacgcucaggcauuguuacacgggcuggauuuuuccgagguuucuaaugugcagcggcuaaugcgcaaggaacgacgugacgauaacgaccucaaaagacugagggaucuuaaucaggccguaaacaaucugguggaguugaagucgacacaacagaagucaauacuccgggucggaacucugacgagcgacgaucugcucaucuuagcggcugaccuggaaaaacuucgcaguaaggugauuagaaccgagaggcccuuguccgccgguguuuauaugggcaaccugucuagccagcagcuagaucaacggcgcgcacuccugaauaugaucgggauguccggaggcaaccagggugcccgagcugggagagacggaguggucagggugugggauguuaaaaaugcagagcuucugucaaaccaguucggcacaaugccuaguuugacucucgccugucugaccaagcagggccaaguagacuuaaaugaugcugugcaggcccugacagaccucgggcuuauuuacaccgcgaaauauccaaacacuagcgaccuggaucgguugacacagucucauccgauccuaaauaugauagacaccaagaaguccucacugaacaucagcggauacaauuuuagucucggugcagccgucaaagcuggcgccugcaugcuggaugggggaaacaugcuugaaacgauuaaggugucuccccaaacuauggacggcauccugaaauccauuuugaaggugaaaaaggcacucgguauguucaucagcgauaccccuggggagcguaacccauaugaaaauauacuguacaaaauuuguuuaucgggagacggcuggcccuauaucgcuucucgcacauccauuacuggcagagccugggagaacaccgucguugaucuggagucagacgggaagccucagaaggcggauaguaauaacagcuccaaaucucuacagagcgccggauuuacagcaggucucaccuacucacagcugaugacgcuuaaggacgcuauguugcaacuggauccaaaugccaaaacuuggauggacaucgaaggcaggcccgaggacccuguggaaaucgcucucuaccagccaaguuccgggugcuauauucacuucuuucgggagccgacagaucugaagcaguucaaacaggacgccaaguacagccauggaauagauguaaccgaccuuuuugcaacucaacccggccugacaucugccgugaucgaugcuuugccucgaaacauggucauuaccugucaggguucagacgauauccgcaagcuccuggaaagucaggggagaaaagacauaaaguuaauugauaucgaccugagcaaaacggauuccaggaaguaugagaaugcggugugggaccaguacaaagaucuaugccacaugcauaccggcguuguggucgagaagaagaaacggggaggcaaggaagagaucacaccacacugugcacucauggacugcauuauguucgacgccgcugugucugggggacugaacacuucgguacuucgcgccguuuugcccagagauaugguguuuaggaccagcacaccucgugucgugcuguga

SEQ ID NO: 8773 - RNA, 1710 nt, Artificial Sequence
  derived and/or modified CDS sequence (opt3) from MOPV/LASV reassortant(IGS-11;Clade IV)__AFY05589__NP
augagcgccuccaaggagaucaaaucuuuccuguggacccagucacucagaagggaacuuaguggcuacugcagcaacauuaagcugcaaguggucaaagacgcucaggcauuguuacacgggcuggauuuuuccgagguuucuaaugugcagcggcuaaugcgcaaggaacgacgugacgauaacgaccucaaaagacugagggaucuuaaucaggccguaaacaaucugguggaguugaagucgacacaacagaagucaauacuccgggucggaacucugacgagcgacgaucugcucaucuuagcggcugaccuggaaaaacuuaagaguaaagugauucgcaccgagagacccuuguccgccgguguuuauaugggcaaccugucuagccagcagcuagaucaaaggcgggcacuccugaauaugaucgggauguccggaggcaaccagggugcccgcgcugggcgagacggaguggucagagugugggauguaaagaaugcagagcuucugucaaaccaguucggcacaaugccuaguuugacucucgccugucugaccaaacagggccaaguugacuuaaaugaugcugugcaggcccugacagaccucgggcuuauuuacaccgcgaaguauccaaacacuagcgaccuggauagguugacacagucucauccgauccuaaauaugauagacaccaagaaauccucacugaacaucagcggauacaauuuuagucucggugcagccgucaaggcuggcgccugcaugcuggaugggggaaacaugcuugaaacgauuaaagugucuccccaaacuauggacggcauccugaaguccauuuugaaagugaagaaagcacucgguauguucaucagcgauaccccuggggagcggaacccauaugaaaauauacuguacaagauuuguuuaucgggagacggcuggcccuauaucgcuucucguacauccauuacuggccgcgccugggagaacaccgucguugaucuggagucagacgggaagccucagaaagcggauaguaauaacagcuccaagucucuacagagcgccggauuuacagcaggucucaccuacucacagcugaugacgcuuaaagacgcuauguugcaacuggauccaaaugccaagacuuggauggacaucgaaggcagacccgaggacccuguggaaaucgcucucuaccagccaaguuccgggugcuauauucacuucuuuagggagccgacagaucugaaacaguucaagcaggacgccaaguacagccauggaauagauguaaccgaccuuuuugcaacucaacccggccugacaucugccgugaucgaugcuuugccucggaacauggucauuaccugucaggguucagacgauauccgaaaacuccuggaaagucaggggcgcaaggacauaaaauuaauugauaucgaccugagcaagacggauuccagaaaauaugagaaugcggugugggaccaguacaaggaucuaugccacaugcauaccggcguuguggucgagaagaaaaagaggggaggcaaagaagagaucacaccacacugugcacucauggacugcauuauguucgacgccgcugugucugggggacugaacacuucgguacuucgggccguuuugccccgcgauaugguguuuagaaccagcacaccuagggucgugcuguga

SEQ ID NO: 8774 - RNA, 1710 nt, Artificial Sequence
  derived and/or modified CDS sequence (opt3) from MOPV/LASV reassortant(IGS-12;Clade IV)__AFY05591__NP
augagcgccuccaaggagaucaaaucuuuccuguggacccagucacucagaagggaacuuaguggcuacugcagcaacauuaagcugcaaguggucaaagacgcucaggcauuguuacacgggcuggauuuuuccgagguuucuaaugugcagcggcuaaugcgcaaggaacgacgugacgauaacgaccucaaaagacugagggaucuuaaucaggccguaaacaaucugguggaguugaagucgacacaacagaagucaauacuccgggucggaacucugacgagcgacgaucugcucaucuuagcggcugaccuggaaaaacuuaagaguaaagugauucgcaccgagagacccuuguccgccgguguuuauaugggcaaccugucuagccagcagcuagaucaaaggcgggcacuccugaauaugaucgggauguccggaggcaaccagggugcccgcgcugggcgagacggaguggucagagugugggauguaaagaauguugagcuucugucaaaccaguucggcacaaugccuaguuugacucucgcaugucugaccaaacagggccaaguggacuuaaaugaugccguccaggcucugacagaccucgggcuuauuuacaccgccaaguauccaaacacuagcgaccuggauagguuggcgcagucucauccgauccuaaauaugauagacacaaagaaauccucacugaacaucagcggauacaauuuuagucucggugcagccgugaaggcuggcgccugcaugcuggaugggggaaacaugcuugaaaccauuaaagugucuccccaaacgauggacggcauccugaaguccauuuugaaagucaagaaagcacucgguauguucaucagcgauacuccuggggagcggaacccauaugaaaauauacuguacaagauuuguuuaucgggagacggcuggcccuauaucgcuucucguaccuccauuacaggccgcgccugggagaacacuguuguggaucuggagucagacgggaagccucagaaagcggauaguaauaacagcuccaagucucuacagagcgccggauuuaccgcaggucucacauacucacagcugaugacccuuaaagacgcuauguugcaacuggauccaaaugccaagacguggauggacaucgaaggcagacccgaggacccuguagaaaucgcucucuaccagccaaguuccgggugcuauauucacuucuuuagggagccgacugaucugaaacaguucaagcaggacgccaaguacagccauggaauagaugugacagaccuuuuugcaacccaacccggccugacuucugccgucaucgaugcuuugccucggaacauggugauuacaugucaggguucagacgauauccgaaaacuccuggaaagucaggggcgcaaggacauaaaauuaauugauaucgaccugagcaagaccgauuccagaaaauaugagaaugcgguuugggaccaguacaaggaucuaugccacaugcauacgggcguggucguggagaagaaaaagaggggaggcaaagaagagaucaccccacacugugcacucauggacugcauuauguucgacgccgcuguaucugggggacugaacacaucgguucuucgggccguguugccccgcgauauggucuuuagaacuagcaccccuagggugguccuguga

SEQ ID NO: 8775 - RNA, 1710 nt, Artificial Sequence
  derived and/or modified CDS sequence (opt3) from MOPV/LASV reassortant(IGS-14;Clade IV)__AFY05595__NP
augagcgccuccaaggagaucaaaucuuuccuguggacccagucacucagaagggaacuuaguggcuacugcagcaacauuaagcugcaaguggucaaagacgcucaggcauuguuacacgggcuggauuuuuccgagguuucuaaugugcagcggcuaaugcgcaaggaacgacgugacgauaacgaccucaaaagacugagggaucuuaaucaggccguaaacaaucugguggaguugaagucgacacaacagaagucaauacuccgggucggaacucugacgagcgacgaucugcucaucuuagcggcugaccuggaaaaacuuaagaguaaagugauucgcaccgagagacccuuguccgccgguguuuauaugggcaaccugucuagccagcagcuagaucaaaggcgggcacuccugaauaugaucgggauguccggaggcaaccagggugcccgcgcugggcgagacggaguggucagagugugggauguaaagaaugcagagcuucugucaaaccaguucggcacaaugccuaguuugacucucgccugucugaccaaacagggccaaguugacuuaaaugaugcugugcaggcccugacagaccucgggcuuauuuacaccgcgaaguauccaaacacuagcgaccuggauagguuggcacagucucauccgauccuaaauaugauagacacaaagaaauccucacugaacaucagcggauacaauuuuagucucggugccgcugucaaggccggcgcaugcaugcuggaugggggaaacaugcuugaaaccauuaaagugucuccccaaacgauggacggcauccugaaguccauuuugaaagugaagaaagcucucgguauguucaucagcgauacuccuggggagcggaacccauaugaaaauauacuguacaagauuuguuuaucgggagacggcuggcccuauaucgccucucguaccuccauuacaggccgcgcgugggagaacacugucguugaucuggagucagacgggaagccucagaaagccgauaguaauaacagcuccaagucucuacagagcgcaggauuuaccgcuggucucacauacucacagcugaugacccuuaaagacgccauguugcaacuggauccaaaugcuaagacguggauggacaucgaaggcagacccgaggacccuguggaaaucgcccucuaccagccaaguuccgggugcuauauucacuucuuuagggagccgacugaucugaaacaguucaagcaggacgcaaaguacagccauggaauagauguaacagaccuuuuugccacccaacccggccugacuucugcugugaucgaugcguugccucggaacauggucauuacaugucaggguucagacgauauccgaaaacuccuggaaagucaggggcgcaaggacauaaaauuaauugauaucgaccugagcaagaccgauuccagaaaauaugagaaugcagugugggaccaguacaaggaucuaugccacaugcauacgggcguuguggucgagaagaaaaagaggggaggcaaagaagagaucaccccacacugugcccucauggacugcauuauguucgacgcugccgugucugggggacugaacacaucgguacuucgggcaguuuugccccgcgauaugguguuuagaacuagcaccccuagggucgugcuguga

SEQ ID NO: 8776 - RNA, 1710 nt, Artificial Sequence
  derived and/or modified CDS sequence (opt3) from MOPV/LASV reassortant(IGS-23;Clade IV)__AFY05610__NP
augagcgccuccaaggagaucaaaucuuuccuguggacccagucacucagaagggaacuuaguggcuacugcagcaacauuaagcugcaaguggucaaagacgcucaggcauuguuacacgggcuggauuuuuccgagguuucuaaugugcagcggcuaaugcgcaaggaacgacgugacgauaacgaccucaaaagacugagggaucuuaaucaggccguaaacaaucugguggaguugaagucgacacaacagaagucaauacuccgggucggaacucugacgagcgacgaucugcucaucuuagcggcugaccuggaaaaacuuaagaguaaagugauucgcaccgagagacccuuguccgccgguguuuauaugggcaaccugucuagccagcagcuagaucaaaggcgggcacuccugaauaugaucgggauguccggaggcaaccagggugcccgcgcugggcgagacggaguggucagagugugggauguaaagaaugcagagcuucugucaaaccaguucggcacaaugccuaguuugacucucgccugucugaccaaacagggccaaguugacuuaaaugaugcugugcaggcccugacagaccucgggcuuauuuacaccgcgaaguauccaaacacuagcgaccuggauagguugacacagucucauccgauccuaaauaugauagacaccaagaaauccucacugaacaucagcggauacaauuuuagucucggugcagccgucaaggcuggcgccugcaugcuggaugggggaaacaugcuugaaacgauuaaagugucuccccaaacuauggacggcauccugaaguccauuuugaaagugaagaaagcacucgguauguucaucagcgauaccccuggggagcggaacccauaugaaaauauacuguacaagauuuguuuaucgggagacggcuggcccuauaucgcuucucguacauccauuacuggccgcgccugggagaacaccgucguugaucuggagucagacgggaagccucagaaagcggauaguaauaacagcuccaagucucuacagagcgccggauuuacagcaggucucaccuacucacagcugaugacgcuuaaagacgcuauguugcaacuggauccaaauacuaagacauggauggacaucgaaggcagacccgaggacccuguggaaaucgcccucuaccagccaaguuccgggugcuauauucacuucuuuagggagccgaccgaucugaaacaguucaagcaggacgcuaaguacagccauggaauagauguaacugaccuuuuugccacacaacccggccugaccucugcagugaucgaugccuugccucggaacauggucauuacgugucaggguucagacgauauccgaaaacuccuggaaagucaggggcgcaaggacauaaaauuaauugauaucgaccugagcaagaccgauuccagaaaauaugagaaugcugugugggaccaguacaaggaucuaugccacaugcauacaggcguuguggucgagaagaaaaagaggggaggcaaagaagagaucacuccacacugugcgcucauggacugcauuauguucgacgcagccgugucugggggacugaacaccucgguacuucgggcuguuuugccccgcgauaugguguuuagaacaagcacuccuagggucgugcuguga

SEQ ID NO: 8777 - RNA, 1716 nt, Artificial Sequence
  derived and/or modified CDS sequence (opt3) from MOPV/LASV reassortant(IGS-27;Clade IV)__AFY05618__NP
augagcgccuccaaggagaucaaaucuuuccuguggacccagucacucagaagggaacuuaguggcuacugcagcaacauuaagcugcaaguggucaaagacgcucaggcauuguuacacgggcuggauuuuuccgagguuucuaaugugcagcggcuaaugcgcaaggaacgacgugacgauaacgaccucaaaagacugagggaucuuaaucaggccguaaacaaucugguggaguugaagucgacacaacagaagucaauacuccgggucggaacucugacgagcgacgaucugcucaucuuagcggcugaccuggaaaaacuucgcaguaaggugauuagaaccgagaggcccuuguccgccgguguuuauaugggcaaccugucuagccagcagcuagaucaacggcgcgcacuccugaauaugaucgggauguccggaggcaaccagggugcccgagcugggagagacggaguggucagggugugggauguuaaaaaugcagagcuucugucaaaccaguucggcacaaugccuaguuugacucucgccugucugaccaagcagggccaaguagacuuaaaugaugcugugcaggcccugacagaccucgggcuuauuuacaccgcgaaauauccaaacacuagcgaccuggaucgguugacacagucucauccgauccuaaauaugauagacaccaagaaguccucacugaacaucagcggauacaauuuuagucucggugcagccgucaaagcuggcgccugcaugcuggaugggggaaacaugcuugaaacgauuaaggugucuccccaaacuauggacggcauccugaaauccauuuugaaggugaaaaaggcacucgguauguucaucagcgauaccccuggggagcguaacccauaugaaaauauacuguacaaaauuuguuuaucgggagacggcuggcccuauaucgcuucucgcacauccauuacuggcagagccugggagaacaccgucguugaucuggagucagacgggaagccucagaaggcggauaguaauaacagcuccaaaucucuacagagcgccggauuuacagcaggucucaccuacucacagcugaugacgcuuaaggacgcuauguugcaacuggauccaaaugccaaaacuuggauggacaucgaaggcaggcccgaggacccuguggaaaucgcucucuaccagccaaguuccgggugcuauauucacuucuuucgggagccgacagaucugaagcagaaacaguucaagcaagacgccaaguacagccauggaauagauguaaccgaccuuuuugcaacucagcccggccugacaucugccgugaucgaugcuuugccucgaaacauggucauuaccugucaggguucagacgauauccgcaaacuccuggaaagucaggggagaaaggacauaaaauuaauugauaucgaccugagcaagacggauuccaggaaauaugagaaugcggugugggaccaauacaaggaucuaugccacaugcauaccggcguuguggucgagaagaaaaagcggggaggcaaagaagagaucacaccacacugugcacucauggacugcauuauguucgacgccgcugugucugggggacugaacacuucgguacuucgcgccguuuugcccagagauaugguguuuaggaccagcacaccucgugucgugcuguga

SEQ ID NO: 8778 - RNA, 1710 nt, Artificial Sequence
  derived and/or modified CDS sequence (opt3) from MOPV/LASV reassortant(IGS-3;Clade IV)__AFY05580__NP
augagcgccuccaaggagaucaaaucuuuccuguggacccagucacucagaagggaacuuaguggcuacugcagcaacauuaagcugcaaguggucaaagacgcucaggcauuguuacacgggcuggauuuuuccgagguuucuaaugugcagcggcuaaugcgcaaggaacgacgugacgauaacgaccucaaaagacugagggaucuuaaucaggccguaaacaaucugguggaguugaagucgacacaacagaagucaauacuccgggucggaacucugacgagcgacgaucugcucaucuuagcggcugaccuggaaaaacuucgcaguaaggugauuagaaccgagaggcccuuguccgccgguguuuauaugggcaaccugucuagccagcagcuagaucaacggcgcgcacuccugaauaugaucgggauguccggaggcaaccagggugcccgagcugggagagacggaguggucagggugugggauguuaaaaaugcagagcuucugucaaaccaguucggcacaauuccuaguuugacucucgccugucugaccaagcagggccaaguagacuuaaaugaugcugugcaggcccugacagaccucgggcuuaucuacaccgcgaaauauccaaacacuagcgaccuggaucgguugacacagucucauccgauacuaaauaugaucgacaccaagaaguccucacugaacauuagcggauacaauuuuagucucggugcagccgucaaagcuggcgccugcaugcuggaugggggaaacaugcuugaaacgaucaaggugucuccccaaacuauggacggcauucugaaauccaucuugaaggugaaaaaggcacucgguauguucauaagcgauaccccuggggagcguaacccauaugaaaauauucuguacaaaaucuguuuaucgggagacggcuggcccuauauugcuucucgcacauccaucacuggcagagccugggagaacaccgucguugaucuggagucagggggaaagccucagaaggcggacaguaauaacagcuccaaaucucuacagagcgccgguuuuacagcaggccucaccuacucacagcugaugacgcuuaaggaugcuauguugcaacuggacccaaaugccaaaacuuggauggauaucgaagggaggcccgaggacccuguggaaauugcucucuaccagccaaguuccggaugcuauauacacuucuuucgggagccgacagaccugaagcaguucaaacaggaugccaaguacagccauggcaucgacguaaccgaucuuuuugcaacucaacccggucugacaucugccgugauugacgcuuugccucgaaacauggucaucaccugucaggggucagaugacauacgcaagcuccuggaaagucagggcagaaaagauauuaaguuaaucgacaucgaucugagcaaaacggacuccaggaaguaugagaaugcggugugggaucaguacaaagaccuaugccacaugcauaccggaguuguggucgagaagaagaaacggggcgggaaggaagagauuacaccacacugugcacucauggauugcaucauguucgacgccgcugugucuggaggucugaacacuucgguacuucgcgccguuuugcccagagacaugguguuuaggaccagcacaccucgugucgugcuguga

SEQ ID NO: 8779 - RNA, 1710 nt, Artificial Sequence
  derived and/or modified CDS sequence (opt3) from MOPV/LASV reassortant(IGS-4;Clade IV)__AFY05581__NP
augagcgccuccaaggagaucaaaucuuuccuguggacccagucacucagaagggaacuuaguggcuacugcagcaacauuaagcugcaaguggucaaagacgcucaggcauuguuacacgggcuggauuuuuccgagguuucuaaugugcagcggcuaaugcgcaaggaacgacgugacgauaacgaccucaaaagacugagggaucuuaaucaggccguaaacaaucugguggaguugaagucgacacaacagaagucaauacuccgggucggaacucugacgagcgacgaucugcucaucuuagcggcugaccuggaaaaacuuaagaguaaagugauucgcaccgagagacccuuguccgccgguguuuauaugggcaaccugucuagccagcagcuagaucaaaggcgggcacuccugaauaugaucgggauguccggaggcaaccagggugcccgcgcugggcgagacggaguggucagagugugggauguaaagaaugcagagcuucugucaaaccaguucggcacaauuccuaguuugacucucgccugucugaccaaacagggccaaguugacuuaaaugaugcugugcaggcccugacagaccucgggcuuaucuacaccgcgaaguauccaaacacuagcgaccuggauagguugacacagucucauccgauacuaaauaugaucgacaccaagaaauccucacugaacauuagcggauacaauuuuagucucggugcagccgucaaggcuggcgccugcaugcuggaugggggaaacaugcuugaaacgaucaaagugucuccccaaacuauggacggcauucugaaguccaucuugaaagugaagaaagcacucgguauguucauaagcgauaccccuggggagcggaacccauaugaaaauauucuguacaagaucuguuuaucgggagacggcuggcccuauauugcuucucguacauccaucacuggccgcgccugggagaacaccgucguugaucuggagucagggggaaagccucagaaagcggacaguaauaacagcuccaagucucuacagagcgccgguuuuacagcaggccucaccuacucacagcugaugacgcuuaaagaugcuauguugcaacuggacccaaaugccaagacuuggauggauaucgaagggagacccgaggacccuguggaaauugcucucuaccagccaaguuccggaugcuauauacacuucuuuagggagccgacagaccugaaacaguucaagcaggaugccaaguacagccauggcaucgacguaaccgaucuuuuugcaacucaacccggucugacaucugccgugauugacgcuuugccucggaacauggucaucaccugucaggggucagaugacauacgaaaacuccuggaaagucagggccgcaaggauauuaaauuaaucgacaucgaucugagcaagacggacuccagaaaauaugagaaugcggugugggaucaguacaaggaccuaugccacaugcauaccggaguuguggucgagaagaaaaagaggggcgggaaagaagagauuacaccacacugugcacucauggauugcaucauguucgacgccgcugugucuggaggucugaacacuucgguacuuaaggccguuuugccccgggacaugguguuucgcaccagcacaccuagagucgugcuguga

SEQ ID NO: 8780 - RNA, 1710 nt, Artificial Sequence
  derived and/or modified CDS sequence (opt3) from MOPV/LASV reassortant(IGS-9;Clade IV)__AFY05585__NP
augagcgccuccaaggagaucaaaucuuuccuguggacccagucacucagaagggaacuuaguggcuacugcagcaacauuaagcugcaaguggucaaagacgcucaggcauuguuacacgggcuggauuuuuccgagguuucuaaugugcagcggcuaaugcgcaaggaacgacgugacgauaacgaccucaaaagacugagggaucuuaaucaggccguaaacaaucugguggaguugaagucgacacaacagaagucaauacuccgggucggaacucugacgagcgacgaucugcucaucuuagcggcugaccuggaaaaacuucgcaguaaggugauuagaaccgagaggcccuuguccgccgguguuuauaugggcaaccugucuagccagcagcuagaucaacggcgcgcacuccugaauaugaucgggauguccggaggcaaccagggugcccgagcugggagagacggaguggucagggugugggauguuaaaaaugcagagcuucugucaaaccaguucggcacaauuccuaguuugacucucgccugucugaccaagcagggccaaguagacuuaaaugaugcugugcaggcccugacagaccucgggcuuaucuacaccgcgaaauauccaaacacuagcgaccuggaucgguugacacagucucauccgauacuaaauaugaucgacaccaagaaguccucacugaacauuagcggauacaauuuuagucucggugcagccgucaaagcuggcgccugcaugcuggaugggggaaacaugcuugaaacgaucaaggugucuccccaaacuauggacggcauucugaaauccaucuugaaggugaaaaaggcacucgguauguucauaagcgauaccccuggggagcguaacccauaugaaaauauucuguacaaaaucuguuuaucgggagacggcuggcccuauauugcuucucgcacauccaucacuggcagagccugggagaacaccgucguugaucuggagucagacgggaagccucagaaggcggauaguaauaacagcuccaaaucucuacagagcgccggauuuacagcaggucucaccuacucacagcugaugacgcuuaaggacgcuauguugcaacuggauccaaaugccaaaacuuggauggacaucgaaggcaggcccgaggacccuguggaaauugcucucuaccagccaaguuccgggugcuauauacacuucuuucgggagccgacagaucugaagcaguucaaacaggacgccaaguacagccauggaaucgauguaaccgaccuuuuugcaacucaacccggccugacaucugccgugauugaugcuuugccucgaaacauggucaucaccugucaggguucagacgauauacgcaagcuccuggaaagucaggggagaaaagacauuaaguuaaucgauaucgaccugagcaaaacggauuccaggaaguaugagaaugcggugugggaccaguacaaagaucuaugccacaugcauaccggcguuguggucgagaagaagaaacggggaggcaaggaagagauuacaccacacugugcacucauggacugcaucauguucgacgccgcugugucugggggacugaacacuucgguacuucgcgccguuuugcccagagauaugguguuuaggaccagcacaccucgugucgugcuguga

SEQ ID NO: 8781 - RNA, 1710 nt, Artificial Sequence
  derived and/or modified CDS sequence (opt3) from LASV(LM032-SLE-2010;Clade IV)__AIT17803__NP
augagcgccuccaaggagaucaaaucuuuccuguggacccagucacucagaagggaacuuaguggcuacugcagcaacauuaagcugcaaguggucaaagacgcucaggcauuguuacacgggcuggauuuuuccgagguuucuaaugugcagcggcuaaugcgcaaggaacgacgugacgauaacgaccucaaaagacugagggaucuuaaucaggccguaaacaaucugguggaguugaagucgacacaacagaagucaauacuccgggucggaacucugacgagcgacgaucugcucaucuuagcggcugaccuggaaaaacuuaagaguaaagugauucgcaccgagagacccuuguccgccgguguuuauaugggcaaccugucuagccagcagcuagaucaaaggcgggcacuccuguccaugaucgggaugucaggaggcagucaggaggcccgcgcuggucgagacgggguggucagagugugggauguaaagaaugcagaacuucugaacaaucaguucggaacaaugccuagcuugacucucgccugucugaccaaacagggccaaguugacuuaaacgaugcugugcaggcccugacagaccucggccuuauuuacaccgcgaaguauccaaauacuucugaccuggauagguugacacagucccauccgauccuaaacaugauagacaccaagaaaucaagccugaauaucaguggguacaacuuuucucucggagcagccgucaaggcuggugccugcaugcuggauggcgggaauaugcuugagacgauuaaagugagcccccaaacuguggacggaauccugaaguccauuuugaaagucaagaaagcacucggcauguucaucucggauaccccuggugaacggaacccauaugagaacauacuguacaagauuuguuuaucuggggacggauggcccuauaucgcuucccguacaucaauuacuggccgcgccugggagaauaccguuguggaucuggaaagugacggcaagccucagaaagcggggagcaacaauuccaacaagucucuacagagcgccggauuuacagcaggucucaccuacucacagcugaugacgcuuaaagaugcuauguugcaacuggacccaaaugccaagacuuggauggauaucgagggcagacccgaagacccuguagagaucgcucucuaccagccaaguuccgggugcuauauucacuucuuuagggaaccgacagaccugaaacaguucaagcaggaugccaaguacagccauggaauagacgugaccgaucuuuuugcagcccaacccggccugacuucugcugucaucgacgcguugccucggaacauggugauuacaugucaggguucagaugacauccgaaaacuccuggagagucaggggcgcaaggauauaaaauuaauugacaucgcacugagcaagaccgauuccagaaaauaugagaaugccguuugggaccaguacaaggaucuaugccacaugcauacgggcguggucguggaaaagaaaaagaaaggaggcaaggaggaaaucaccccacacugugcucucauggacugcauuauguucgaugccgcaguaucugggggacugaacacaucgguucuuagggccguguugccccgggacauggucuuucgcacuagcaccccuagagugguccuguga

SEQ ID NO: 8782 - RNA, 1710 nt, Artificial Sequence
  derived and/or modified CDS sequence (opt3) from LASV(LM395-SLE-2009;Clade IV)__AIT17811__NP
augagcgccuccaaggagaucaaaucuuuccuguggacccagucacucagaagggaacuuaguggcuacugcagcaacauuaagcugcaaguggucaaagacgcucaggcauuguuacacgggcuggauuuuuccgagguuucuaaugugcagcggcuaaugcgcaaggaacgacgugacgauaacgaccucaaaagacugagggaucuuaaucaggccguaaacaaucugguggaguugaagucgacacaacagaagucaauacuccgggucggaacucugacgagcgacgaucugcucaucuuagcggcugaccuggaaaaacuuaagaguaaagugacccgcacagagagacccuuguccgccgguguuuauaugggcaaccugucuagccagcagcuagaucaaaggcgggcacuccugaauaugauugggauguccggaucaaaccagggcgcccgcgcuggucgagacgggguggucagagugugggauguaaagaaugcagagcuucugaacaaucaguucggaacuaugccuaguuugacccucgccugucugacaaaacagggccaaguugacuuaaacgaugcugugcaggcccugaccgaccucggccuuaucuacacugcgaaguauccaaauacaagcgaccuggauagguugacccagucucauccgauucuaaacaugaucgacacgaagaaauccucacugaauauaagcggguacaacuuuagucucggagcagccgucaaggcuggugccugcaugcuggauggcgggaacaugcuugaaacuaucaaagugucuccccaaaccauggacggcauucugaaguccaucuugaaagugaagaaagcacucggaauguucauuagcgauacaccuggugagcggaauccauaugaaaacauccuguacaagauauguuuaucgggggacggauggcccuauauugcuucucguacuuccaucaccggccgcgccugggagaauacagucguugaucuggagucagacggcaagccucagaaagcggggaguaacggaagcaauaagucccuacagucugccgguuuuaccgcaggccucacguacagccagcugaugacucuuaaagaugcuauguugcaacuggacccaaacgccaagacauggauggauauugaagggagacccgaggacccuguggaaaucgcuuucuaccagccaucaaguggaugcuauauccacuuuuucagggagccgaccgaccucaaacaguuuaagcaggaugccaaguacucccauggcauugacguaacugaucuguucgcagcccaacccggucuuacaagcgcugugauagacgcgcugccucggaauuuggucaucaccugucaggggucugaugacauucgaaaacucuuugaaucacagggccgcaaggauaucaaacugauagacauugcauuaaguaagacggauagcagaaaauaugagaacgccgugugggaccaguacaaggaucugugccacaugcauaccggaaucguuguggagaagaaaaagaggggcgggaaagaagagaucacaccacacugugcucuaauggacugcauuauguucgaugccgcagucuccggaggucucaaugccucugugcugcgggcuguacuuccccgcgacaugguuuuuagaacuucgaccccuaggguggucuuguga

SEQ ID NO: 8783 - RNA, 1710 nt, Artificial Sequence
  derived and/or modified CDS sequence (opt3) from LASV(LM765-SLE-2012;Clade IV)__AIT17815__NP
augagcgccuccaaggagaucaaaucuuuccuguggacccagucacucagaagggaacuuaguggcuacugcagcaacauuaagcugcaaguggucaaagacgcucaggcauuguuacacgggcuggauuuuuccgagguuucuaaugugcagcggcuaaugcgcaaggaacgacgugacgauaacgaccucaaaagacugagggaucuuaaucaggccguaaacaaucugguggaguugaagucgacacaacagaagucaauacuccgggucggaacucugacgagcgacgaucugcucaucuuagcggcugaccuggaaaaacuuaagaguaaagugacccgcacagagagacccuuguccgccgguguuuauaugggcaaccugucuagccagcagcuagaucaaaggcgggcacuccuggacaugauugggauguccggaucaaaucagggcgcccgcgcuggucgagaugggguggucagagugugggacguaaagaacgcagagcuucugaauaaccaguucggaacuaugccuaguuugacccucgccugucugacaaaacagggccaaguugauuuaaaugacgcugugcaggcccugaccgaccucggccuuaucuacacugcgaaguauccaaacacaagcgaucuggacagguugacccagucucauccgauucuaaauaugaucgauacgaagaaauccucacugaacauaagcggguacaauuuuagucucggagcagccgucaaggcuggugccugcaugcuggacggcgggaacaugcuugaaacuaucaaagugucuccccaaaccauggauggcauucugaaguccaucuugaaagugaagaaagcacucggaauguucauuagcgacgcuccuggugagcggaacccauaugaaaauauccuguacaagauauguuuaucgggggauggauggcccuauauugccucucguacauccaucacuggccgcgcgugggagaacaccgucguugaccuggagucagauggcaagccucagaaagccgggaguaauggaagcaacaagucccuacagucugcagguuuuacagcuggccucaccuacagccagcugaugacgcuuaaagacgccauguugcaacuggauccaaaugcuaagacuuggauggacauugaagggagacccgaggacccuguggaaaucgcccucuaccagccaucaaguggaugcuauauccacuucuuuagggagccgacagaucugaaacaguucaagcaggacgcaaaguacucccauggcauugauguaaccgaccuuuuugccgcucaacccggucugacuagcgcggugauagaugcauugccucggaacauggucaucacaugucaggggucugacgauauucgaaaacucuucgaaucacagggccgcaaggacaucaaacugauagauauugccuuaaguaagaccgacagcagaaaauaugagaaugcugugugggaucaguacaaggaccugugccacaugcauacgggaaucguuguggagaagaaaaagaggggcgggaaagaagagaucaccccacacugugcccuaauggauugcauuauguuugacgcagccgucuccggaggucucaacacaucugugcugcgggcuguacuuccccgcgacaugguuuucagaacuucgaccccuaggguggucuuguga

SEQ ID NO: 8784 - RNA, 1710 nt, Artificial Sequence
  derived and/or modified CDS sequence (opt3) from LASV(LM774-SLE-2012;Clade IV)__AIT17821__NP
augagcgccuccaaggagaucaaaucuuuccuguggacccagucacucagaagggaacuuaguggcuacugcagcaacauuaagcugcaaguggucaaagacgcucaggcauuguuacacgggcuggauuuuuccgagguuucuaaugugcagcggcuaaugcgcaaggaacgacgugacgauaacgaccucaaaagacugagggaucuuaaucaggccguaaacaaucugguggaguugaagucgacacaacagaagucaauacuccgggucggaacucugacgagcgacgaucugcucaucuuagcggcugaccuggaaaaacuuaagaguaaagugauucgcaccgagagacccuuguccgccgguguuuauaugggcaaccugucuagccagcagcuagaucaaaggcgggcacuccuguccaugaucgggaugucaggaggcaaucagggugcccgcgcugggcgagacggaguggucagagugugggauguaaagaacgcagagcuucugaauaaccaguucggcacaaugccuaguuugacucucgccugucugaccaaacagggccaaguugacuuaaaugaugcugugcaggcccugacagaccucgggcuuauuuacaccgcgaaguauccaaacacuagcgaccuggauagguugacacagucucauccgauccuaaauaugauagacaccaagaaauccucacugaacaucagcggauacaauuuuagucucggugcagccgucaaggcuggcgccugcaugcuggaugggggaaacaugcuugaaacgauuaaagugucuccccaaacuguggacggcauccugaaguccauuuugaaagucaagaaagcacucgguauguucaucagcgauaccccuggggagcggaacccauaugaaaauauacuguacaagauuuguuuaucgggagacggcuggcccuauaucgcuucucguacauccauuacuggccgcgccugggagaacaccguuguggaucuggagucagacgggaagccucagaaaacaggaaguaauaacagcaauaagucccuacagucugcggguuuuaccgccggccucacguacagccagcugaugacucuuaaagaugcaauguugcaacuggacccaaacgcuaagacauggauggauaucgaagggagacccgaggacccuguagaaguggcccucuaccagccaucaaguggaugcuauauccacuucuuuagggagccgaccgaccugaaacaguucaagcaggaugcuaaguacucccauggcauugacgucacugaucuuuuugccgcacaacccggucugacaagcgccgugauagacgcuuugccucggaauaugguuaucaccugucaggggucugaugacauucgaaaacuccuggaaucacagggccgcaaggauaucaaauuaauagacauugcgcugaguaagacggauagcagaaaauaugagaacgcagugugggaccaguacaaggaucuaugccacaugcauaccggagucgugguagagaagaaaaagaggggcgggaaagaagagaucacaccacacugugcccucauggacugcaucauguucgaugcugccguuuccggaggucugaauacuucugugcuucgggcagucuugccccgcgacaugguguuuagaaccucgacaccuagggucgugcuguga

SEQ ID NO: 8785 - RNA, 1710 nt, Artificial Sequence; identical to SEQ ID NO: 8733
  derived and/or modified CDS sequence (opt3) from LASV(LM776-SLE-2012;Clade IV)__AIT17825__NP

SEQ ID NO: 8786 - RNA, 1710 nt, Artificial Sequence
  derived and/or modified CDS sequence (opt3) from LASV(Mad39;Clade IV)__ANH09723__NP
augagcgccuccaaggagaucaaaucuuuccuguggacccagucacucagaagggaacuuaguggcuacugcagcaacauuaagcugcaaguggucaaagacgcucaggcauuguuacacgggcuggauuuuuccgagguuucuaaugugcagcggcuaaugcgcaagcagcgacgugacgauaacgaccucaaaagacugagggaucuuaaucaagccguaaacaaucugguggaauugaagucgacacagcagaagucaguccuccgggugggaacucugacgagcgacgaucugcucaccuuagcggcugaccuggagaaacuuaagaguaaaguuacacgcacugaaagacccuugaccgccgguguguauaugggcaaccuguccucucagcaacuagaucagaggcgggcacuccugaauaugauagggaugagcggaggcaaccagggugcccgcacagggcgagacggagucgugagaguaugggauguuaagaaugcugagcuucugaacaaucaguucggcaccaugccuuccuugacucucgcaugucugacaaaacaaggccagguggacuuaaacgaugucgugcaggcccugaccgaccucgggcuuaucuacacggcuaaguauccaaauacuucagaccuggauagguugacccaaagucauccgauucuaaacaugaucgacacaaauaagagcucucugaacauuuccggauacaacuuuucacucggugccgcggugaaagcaggcgccugcaugcuggaugggggaaauaugcuugagacuaucaaggucagcccccagaccauggacggcauacugaaaaguaucuugaagguuaaaaagucucucgguauguucauuuccgauacaccuggggaacggaacccauaugagaauauccuguacaaaauuuguuuaagcggagacggcuggcccuauaucgcuucgcguaccucuauaacgggccgcgccugggaaaacacugugguagaucuggaguccgggggaaagccucagaaggcagguucaaauaacaguaauaaaagccuacaguccgcuggcuuugccgcggggcucacauacucucaacugaugacccuuaaggacgccauguugcagcuggauccaaacgcaaaaacuuggauggacauugagggaagacccgaagauccuguggagaucgcucucuaccagccaauuagcggcugcuauauccacuucuuuagggaaccgacagaccugaagcaguucaaacaagacgccaaguacucacaugguaucgaugucaccgaccuuuuugcugcccagcccgggcugacgagugcagugauugaggccuugccucggaauaugguuauaaccugucagggcuccgaugacauccgaaaacucuucgaaagccagggacgcaaggauauuaagcugaucgacauagcuuuaucuaaaacagauucaagaaaguaugagaacgcggugugggaccaauacaaagaucugugccacaugcauacuggcgucgugguagagaagaagaaaaagggagggaaagaagagauuaccccacacugugcacuaauggacugcaucauguuugaugccgcuguuagugguggccucaauacacuggugcuuagggccgucuugccccgggacaugguguuccgcacuagcaccccuaaggucgugcuguga

SEQ ID NO: 8787 - RNA, 1710 nt, Artificial Sequence
  derived and/or modified CDS sequence (opt3) from LASV(Mad41;Clade IV)__ANH09725__NP
augagcgccuccaaggagaucaaaucuuuccuguggacccagucacucagaagggaacuuaguggcuacugcagcaacauuaagcugcaaguggucaaagacgcucaggcauuguuacacgggcuggauuuuuccgagguuucuaaugugcagcggcuaaugcgcaagcagcgacgugacgauaacgaccucaaaagacugagggaucuuaaucaagccguaaacaaucugguggaauugaagucgacacagcagaagucaguccuccgggugggaacucugacgagcgacgaucugcucauauuagcggcugaccuggagaaacuuaagaguaaaguuacccgcacagaaagacccuuguccgccgguguguauaugggcaaccugucuagccagcaacuagaucagaggcgggcacuccugaauaugaucgggauguccggaggcaaccagggugcccgcgcugggcgagacggagucgugagaguaugggauguuaagaaugcagaccuucugaacaaucaguucggcacuaugccuucauugacccucgccugucugacaaaacaaggccagguggauuuaaacgacgucgugcaggcucugaccgaccucgggcuuauuuacacugccaaguauccaaauacaagugaucuggacagguugacccaaagccauccgauccuaaacaugauugauacgaauaagucuucccugaacaucucaggauacaacuuuagccucggugcggcagugaaagccggcgcuugcaugcuggacgggggaaauaugcuugagacuauaaaggucaguccccagaccauggauggcauccugaaaucuauuuugaagguuaaaaagucccucgguauguucaucagcgacacaccuggggagcggaacccauaugaaaauauucuguacaaaaucuguuuaucgggagauggcuggcccuauauagccucucguacuuccauuaccggccgcgcaugggagaacacagugguagaccuggaaucagggggaaagccucagaaggcugguaguaauaacagcaauaaaucccuacagucugccggcuuugcggccgggcucaccuacagccaacugaugacgcuuaaggaugcaauguugcagcuggacccaaacgcuaaaacuuggauggauaucgagggaagacccgaggacccuguggaaauugcccucuaccagccaaucucaggcugcuauauccacuucuuuagggagccgacagaccugaagcaguucaaacaagaugcuaaguacagucaugguauugacgucaccgaucuuuuugccgcacagcccgggcugacuuccgccgugauagaggcuuugccucggaauaugguuaucacaugucagggcagcgacgauauucgaaagcuccuggaaucucagggacgcaaagacaucaaguuaauagauauugcgcugucaaaaaccgacaguagaaaguaugaaaacgcagugugggaucaauacaaagaccuaugccacaugcauacgggcgucgugguagagaagaagaaaaggggagggaaggaggaaaucaccccacacugugcccucauggauugcaucauguucgacgcugccguuagcgguggccugaauacacuuguguugcgggcaguccugccccgcgauaugguguuuagaacuuccaccccuaaagucgugcucuga

SEQ ID NO: 8788 - RNA, 1710 nt, Artificial Sequence
  derived and/or modified CDS sequence (opt3) from LASV(Mad63;Clade IV)__ANH09729__NP
augagcgccuccaaggagaucaaaucuuuccuguggacccagucacucagaagggaacuuaguggcuacugcagcaacauuaagcugcaaguggucaaagacgcucaggcauuguuacacgggcuggauuuuuccgagguuucuaaugugcagcggcuaaugcgcaagcagcgacgugacgauucggaccucaaaagacugagggaucuuaaccaagccguaaauaaccugguggaauugaagucaacacagcagaagaguguccuccgggugggaacucugacgagugacgaucugcucaccuuagcggcugaccuggagaaacuuaaguccaaaguuacacgcacugaaagacccuugucugccgguguguauaugggcaaucugagcucccagcaacuagaucagaggcgggcacuccugaacaugauagggaugucaggaggcaaucagggugcccgcaccgggcgagacggagucgugagaguaugggauguuaagaacgcugaccuucugaauaaccaguucggcacaaugccuaguuugacccucgcaugucugacuaaacaaggccagguggauuuaaaugacgucgugcaggcccugacagaccucgggcuuaucuacaccgcuaaguauccaaacacgagcgaucuggacagguugacucaaucucauccgauucuaaauaugaucgauaccaacaaguccucacugaauauuagcggauacaacuuuagucucggugccgcggugaaagcaggcgccugcaugcuggacgggggaaacaugcuugagacaaucaaggucucuccccagacuauggauggcauacugaaauccaucuugaagguuaaaaagagccucgguauguucauuucggacaccccuggggagcggaauccauaugaaaacauccuguacaaaauuuguuuaucuggagauggcuggcccuauaucgcuucccguacaucaauaaccggccgcgccugggagaauacggugguagaccuggaaagugggggaaagccucagagagcagguagcaacaauuccaacaagucucuacagagcgcuggcuuugccgcggggcucacuuacucacaacugaugacacuuaaagaugccauguugcagcuggacccaaaugcaaagaccuggauggauauugagggaaggcccgaggacccuguggaaaucgcucucuaccagccaacuagcggcugcuauauucacuucuuucgggagccgacagaccugaaacaguucaagcaagaugccaaauacucccaugguaucgacgucaccgaucuuuuugcugcccagcccgggcugacgagcgcagugaucgaagccuugccucgaaacaugguuauuaccugucagggcucugacgauauacgcaagcuccuggagucacagggaagaaaggacaucaaauuaauugauaucgcucugaguaagacagacagcaggaaauaugaaaaugcggugugggaucaauacaaggaccuaugccacaugcauacuggcgucgugguagagaaaaagaagaaagggggaaaggaggaaauaaccccacacugugcacucauggauugcauuauguucgacgccgcuguuuccgguggccugaacacacuuguguugcgggccguccugccccgcgauaugguguuuagaacuucuaccccuaaagucgugcucuga

SEQ ID NO: 8789 - RNA, 1710 nt, Artificial Sequence
  derived and/or modified CDS sequence (opt3) from LASV(Mad69;Clade IV)__ANH09731__NP
augagcgccuccaaggagaucaaaucuuuccuguggacccagucacucagaagggaacuuaguggcuacugcagcaacauuaagcugcaaguggucaaagacgcucaggcauuguuacacgggcuggauuuuuccgagguuucuaaugugcagcggcuaaugcgcaagcagcgacgugacgauaacgaccucaaaagacugagggaucuuaaucaagccguaaacaaucugguggaauugaagucgacacagcagaagucaguccuccgggugggaacucugacgagcgacgaucugcucaccuuagcggcugaccuggagaaacuuaagaguaaaguuacacgcacugaaagacccuuguccgccgguguguauaugggcaaccugucuagccagcaacuagaucagaggcgggcacuccugaauaugauagggaugaccggaggcaaccagggugcccgcacagggcgagacggagucgugagaguaugggauguuaagaaugcugaccuucugaacaaucaguucggcaccaugccuuccuugacucucgcaugucugacaaaacaaggccagguggauuuaaacgacgucgugcaggcccugaccgaccucgggcuuaucuacacggcuaaguauccaaauacuucagaucuggacagguugacccaaagucauccgauucuaaacaugaucgauacaaauaagagcucucugaacauuuccggauacaacuuuucacucggugccgcggugaaagcaggcgccugcaugcuggacgggggaaauaugcuugagacuaucaaggucagcccccagaccauggauggcauacugaaaaguaucuugaagguuaaaaagucucucgguauguucauuuccgacacaccuggggagcggaacccauaugaaaauauccuguacaaaauuuguuuaagcggagauggcuggcccuauaucgcuucgcguaccucuauaacgggccgcgccugggagaacacugugguagaccuggaauccgggggaaagccucagagagcagguucaaauaacaguaauaagagccuacaguccgcuggccucgccgcggggcugacauacucucaacuuaugaccuugaaagaugccaugcugcagcucgacccaaacgcaaagacuuggauggauauugagggaaggcccgaggacccuguggaaaucgcucuguaccagccaacaagcggcugcuauauucacuuuuuccgggagccgaccgaccuuaaacaguuuaagcaagaugccaaauacucacaugguaucgacgucacggaucuguucgcugcccagcccggguugaccagugcagugaucgaagcccucccucgaaauaugguuauuacaugucagggcuccgacgauauacgcaagcuguuagagagccagggaagaaaggacaucaaacugauugauaucgcucuaucuaagacugacucaaggaaauaugaaaacgcggugugggaucaauacaaggaccucugccacaugcauaccggcgucgugguagagaaaaagaagaaagggggaaaggaggaaauaacaccacacugugcacugauggauugcauuauguuugacgccgcuguuagugguggccuuaauacuuuggugcugcgggccguccucccccgcgauaugguguucagaaccagcacaccuaaagucgugcuguga

SEQ ID NO: 8790 - RNA, 1710 nt, Artificial Sequence
  derived and/or modified CDS sequence (opt3) from LASV(Mad83;Clade IV)__ANH09733__NP
augagcgccuccaaggagaucaaaucuuuccuguggacccagucacucagaagggaacuuaguggcuacugcagcaacauuaagcugcaaguggucaaagacgcucaggcauuguuacacgggcuggauuuuuccgagguuucuaaugugcagcggcuaaugcgcaagcagcgacgugacgauaacgaccucaaaagacugagggaucuuaaucaagccguaaacaaucugguggaauugaagucgacacagcagaagucaguccuccgggugggaacucugacgagcgacgaucugcucaccuuagcggcugaccuggagaaacuuaagaguaaaguuacacgcacugaaagacccuuguccgccgguguguauaugggcaaccugucuagccagcaacuagaucagaggcgggcacuccugaauaugauagggauguccggaggcaaccagggugcccgcaccgggcgagacggagucgugagaguaugggauguuaagaaugcugaccuucugaacaaucaguucggcacaaugccuucauugacccucgcaugucugacuaaacaaggccagguggauuuaaacgacgucgugcaggcccugacagaccucgggcuuaucuacaccgcuaaguauccaaauacgagugaucuggacagguugacucaaagccauccgauucuaaacaugaucgauaccaauaagucuucccugaacauuucaggauacaacuuuagccucggugccgcggugaaagcaggcgccugcaugcuggacgggggaaauaugcuugagacaaucaaggucaguccccagacuauggauggcauacugaaaucuaucuugaagguuaaaaagucccucgguauguucauuagcgacaccccuggggagcggaacccauaugaaaauauccuguacaaaauuuguuuaucgggagauggcuggcccuauaucgcuucucguacauccauaaccggccgcgccugggagaacacggugguagaccuggaaucagggggaaagccucagagagcagguaguaauaacagcaauaagucccuacagucugcuggcuuugccgcggggcucacuuacagccaacugaugacacuuaaagaugccauguugcagcuggacccaaacgcaaagaccuggauggauauugagggaaggcccgaggacccuguggaaaucgcuuucuaccagccaauuucaggcugcuauauccacuuuuuccgggagccgacugaccucaaacaguuuaagcaagaugccaaauacagucaugguaucgacgucacagaucuguucgcugcccagcccgggcuuaccuccgcagugauugaagcccugccucgaaauaugguuauaacgugucagggcagcgacgauauccgcaaguugcucgagucucagggaagaaaggacauuaaacugaucgauauagcuuuaucaaagaccgacaguaggaaauaugaaaacgcggugugggaucaauacaaggaccugugccacaugcauacaggcgucgugguagagaaaaagaagaaagggggaaaggaggaaauuacuccacacugugcacuaauggauugcaucauguuugacgccgcuguuagcgguggccucaauacccuggugcuucgggccgucuugccccgcgauaugguguucagaacauccacuccuaaagucgugcuguga

SEQ ID NO: 8791 - RNA, 1710 nt, Artificial Sequence
  derived and/or modified CDS sequence (opt3) from LASV(NL;Clade IV)__AAO59513__NP
augagcgccuccaaggaggugaaaucuuuccuguggacccagucacucagaagggaacuuaguggcuacugcagcaacaucaagcugcaagucguuaaagacgcucaggcauuguuacacgggcuggauuuuuccgaggugucuaauguacagcggcuaaugcgcaaggaacgacgugacgauucggaccucaaaagacugagggaucuuaaccaggccgugaauaaccuggucgaguugaagucaacacaacagaaaagcgugcuccggguuggaacucugacgagugacgaucugcucguguuagcggcugaccuggaaaaacuucgcuccaaggucaccagaacagagaggcccuugucugccgguguguauaugggcaaucugagcucccagcagcuagaucaacggcgcgcacuccugucaaugauugggaugaacggaaguaaucagggcgcccgagcugguagagacgggguaguuagggugugggaugucaaaaacgcagagcuucugaauaaccaguucggaacuaugccuagcuugacccucgccugucugacaaagcagggccaaguggacuuaaaugaugcugugcaggcccugaccgaccucggccuuauauacacugcgaaauauccaaacacaucugaccuggaucgguugacccagucccauccgauccuaaauaugauugacacgaagaagucaagccugaacgucaguggguacaauuuuucucucggagcagccguuaaagcuggugccugcaugcuggauggcgggaacaugcuugaaacuaucaaggugagcccccaaaccauggacggcauucugaaauccaucuugaagguaaagaaggcacucggaauguucauaucggauacaccuggugagcguaacccauaugaaaauauccuguacaaaauuuguuuaucuggggacggauggcccuauaucgcuucccgcacuucaauuaccggcagagccugggagaacacaguggucgaucuggagagugacgaaaagccucagaaggcgggcagcaauaacuccaauaaaucucuacagagcgccggguuuaccgcaggacucacguacucacagcugaugacucuuaaggaugcuauguugcaacuggacccaaacgccaaaacauggauggauaucgaggguaggcccgaagacccuguggagauagcucucuaccagccaaguuccggcugcuauauucacuucuuucgggaaccgaccgaccugaagcaguucaaacaggaugccaaguacagccaugggaucgacauuacugaucuuuuugcagcccaacccggacugacaucugcuguuaucgacgcguugccucgaaauauggugaucaccugucagggcucagaugacauucgcaagcuccuggagagucaggguagaaaagauauaaaguuaaucgacauugcacugaacaaagccgauagcaggaaguaugagaaugcugucugggaccaguacaaagaucuaugccacaugcauacgggggugguaguugaaaagaagaaacggggcggaaaggaggaaaucaccccacacugugcccucauggacugcauaauguucgaugcagccguguccggcgggcugaaaacacuugucuugcgcgcugugcugcccagagacauggucuuuaggacuucuaccccucgugugguucucuga

SEQ ID NO: 8792 - RNA, 1710 nt, Artificial Sequence
  derived and/or modified CDS sequence (opt3) from LASV(Z0947-SLE-2011;Clade IV)__AIT17841__NP
augagcgccuccaaggagaucaaaucuuuccuguggacccagucacucagaagggaacuuaguggcuacugcagcaacauuaagcugcaaguggucaaagacgcucaggcauuguuacacgggcuggauuuuuccgagguuucuaaugugcagcggcuaaugcgcaaggaacgacgugacgauaacgaccucaaaagacugagggaucuuaaucaggccguaaacaaucugguggaguugaagucgacacaacagaagucaauacuccgggucggaacucugacgagcgacgaucugcucaucuuagcggcugaccuggaaaaacuuaagaguaaagugacccgcacagagagacccuuguccgccgguguuuauaugggcaaccugucuagccagcagcuagaucaaaggcgggcacuccugaauaugauugggauguccggaucaaaccagggcgcccgcacuggucgagacgggguggucagagugugggauguaaagaaugcugagcuucugaacaaucaguucggaaccaugccuaguuugacacucgcaugucugaccaaacagggccaaguugacuuaaacgaugccgugcaggcucugacugaccucggccuuaucuacacagccaaguauccaaauaccagcgaccuggauagguugacgcagucucauccgauucuaaacaugaucgacacuaagaaauccucacugaauauaagcggguacaacuuuagucucggagcggcagucaaggccggugcuugcaugcuggauggcgggaacaugcuugaaaccaucaaagugucuccccaaacaauggacggcauucugaaguccaucuugaaagugaagaaagcccucggaauguucauuagcgaugcaccuggugagcggaauccauaugaaaacauccuguacaagauauguuuaucgggggacggauggcccuauauugcuucucguacuuccaucaccggccgcgccugggagaauacagucguugaucuggagucagacggcaagccucagaaagcggggaguaacggaagcaauaagucccuacagucugccgguuuuaccgcaggccucacguacagccagcugaugacucuuaaagaugcuauguugcaacuggacccaaacgccaagacauggauggauauugaagggagacccgaggacccuguggaaaucgcucucuaccagccaucaaguggaugcuauauccacuucuuuagggagccgaccgaccugaaacaguucaagcaggaugccaaguacucccauggcauugacguaacugaucuuuuugcagcccaacccggucugacaagcgcugugauagacgcguugccucggaauauggucaucaccugucaggggucugaugacauucgaaaacucuucgaaucacagggccgcaaggauaucaaacugauagacauugcauuaaguaagacggauagcagaaaauaugagaacgccgugugggaccaguacaaggaucugugccacaugcauaccggaaucguuguggagaagaaaaagaggggcgggaaagaagagaucacaccacacugugcucuaauggacugcauuauguuugaugccgcagucuccggaggucucaauacuucugugcugcgggccguacuuccccgcgacaugguuuucagaaccucgacaccuaggguggucuuguga

SEQ ID NO: 8793 - RNA, 1710 nt, Artificial Sequence
  derived and/or modified CDS sequence (opt3) from LASV(Z0948-SLE-2011;Clade IV)__AIT17845__NP
augagcgccuccaaggagaucaaaucuuuccuguggacccagucacucagaagggaacuuaguggcuacugcagcaacauuaagcugcaaguggucaaagacgcucaggcauuguuacacgggcuggauuuuuccgagguuucuaaugugcagcggcuaaugcgcaaggaacgacgugacgauaacgaccucaaaagacugagggaucuuaaucaggccguaaacaaucugguggaguugaagucgacacaacagaagucaauacuccgggucggaacucugacgagcgacgaucugcucaucuuagcggcugaccuggaaaaacuuaagaguaaagugacccgcacagagagacccuuguccgccgguguuuauaugggcaaccugucuagccagcagcuagaucaaaggcgggcacuccugaauaugauugggauguccggaucaaaccagggcgcccagacuggucgcgacggggugguccgagugugggauguaaagaaugcugagcuucugaacaaucaguucggaaccaugccuaguuugacacucgcaugucugaccaaacaaggccagguugacuuaaacgaugccgugcaggcucugacugaccucggccuuaucuacacagccaaguauccaaauaccagcgaccuggauagauugacgcaaucucauccgauucuaaacaugaucgacacuaagaaauccucacugaauauaagcggguacaacuuuagucucggagcggcagucaaggccggugcuugcaugcuggauggcgggaacaugcuugaaaccaucaaagugucuccccagacaauggacggcauucugaaguccaucuugaaagugaagaaagcccucggaauguucauuagcgaugcaccuggugagaggaauccauaugaaaacauccuguacaagauauguuuaucgggggacggauggcccuauauugcuucucggacuuccaucaccggccgugccugggagaauacagucguugaucuggagucagacggcaagccucagaaagcggggaguaacggaagcaauaagucccuacagucugccgguuuuaccgcaggccucacguacagccaacugaugacucuuaaagaugcuauguugcagcuggacccaaacgccaagacauggauggauauugaagggcgccccgaggacccuguggaaaucgcucucuaccagccaucaaguggaugcuauauccacuucuuuagagagccgaccgaccugaaacaguucaagcaagaugccaaguacucccauggcauugacguaacugaucuuuuugcagcccagcccggucugacaagcgcugugauagacgcguugccuaggaauauggucaucaccugucaggggucugaugacauucggaaacucuucgaaucacagggccgaaaggauaucaaacugauagacauugcauuaaguaagacggauagccgcaaauaugagaacgccgugugggaccaauacaaggaucugugccacaugcauaccggaaucguuguggagaagaaaaagagaggcgggaaagaagagaucacaccacacugugcucuaauggacugcauuauguuugaugccgcagucuccggaggucucaauacuucugugcugagggccguacuuccccgggacaugguuuuccgcaccucgacaccuagaguggucuuguga

SEQ ID NO: 8794 - RNA, 1710 nt, Artificial Sequence
  derived and/or modified CDS sequence (opt3) from LASV(Z148;Clade IV)__AAT49007__NP
augagcguguccaaggagaucaaaucuuuccuguggacccagucacucagaagggaacuuaguggcuacugcagcaacauuaagcugcaagucguuaaagacgcccaggcuuuguuacacgggcuggauuuuuccgaggugucuaauguacagcggcuaaugcgcaagcagcgacgugacgauaacgaccucaaaagacugagggaucuuaaucaagcagugaacaaucuggucgaauugaagucgacacagcagaagucagugcuccggguuggaacucugacgagcgacgaucugcucauauuagccgcggaccuggagaaacuuaagaguaaagugacccgcacagaaagacccuuguccgcugguaucuauaugggcaaccugucuagccagcaacuagaucagaggcgggcccuccugaauaugauugggauguccggaggcaaccagggugcacagacugggcgcgacggagucgugcgaaucugggauguaaagaaugccgagcuucugaacaaucaauucggcaccaugccuucauugacacucgcuugucugaccaaacagggccagguugacuuaaacgaugugguccaagcacugacugaccucgggcuuauuuacacagccaaguauccaaauaccagugaccuggauagauugacgcagagccauccgauccuaaacaugauagacacuaagaaaucuucccugaauaucucaggauacaacuuuagccucggugcugccgugaaggcgggcgcaugcaugcuggaugggggaaacaugcuugagaccauuaaagugaguccccagacaauggacggcauccugaagucuauuuugaaagucaagaaagcccucgguauguucaucuccgauacuccuggggaaaggaauccauaugagaacauacuguacaagauuuguuuaagcggagacggcuggcccuauaucgcuucgcggaccucuauuacaggccgugccugggaaaauaccguuguggaucuggaguccggggagaagccucagaaaaucggaucaaacaauaguaacaagagccuacaauccgcagguuuuacggcuggccucacuuacucucagcugaugacacuuaaagacgccauguugcagcuggauccaaaugcgaagaccuggauggacaucgaagggcgccccgaggauccuguagaaauugcccucuaccagccaagcucaggaugcuauauacacuucuuuagagagccgacugaccugaaacaauucaagcaggacgcaaaguacagucauggcaucgaugugacagaccuuuuugcugcccagcccggucugaccuccgcugucauugaagccuugccuaggaacauggugaugacgugucaggggagcgaugacauccggaaacuccuggagucucaaggccgaaaggauauaaaauuaauugacaucgcacugucaaagaccgauagucgcaaauaugagaaugccguuugggaccaguacaaggaucuaugccacaugcauacaggaguggucguggaaaagaaaaagaaaggcgggaaggaggaaaucacuccacacugugcucucauggacugcauuauguucgaugcggcagccagcggaggucugaacacccuuguauugagagcuguucugcccagggacaugguguuucggacauccacuccuaaagucgugcucuga

SEQ ID NO: 8795 - RNA, 1710 nt, Artificial Sequence
  derived and/or modified CDS sequence (opt3) from LASV(Bamba-R114;Clade V)__AHC95554__NP
augagcgccuccaaggaggugagaucuuuccuguggacccagucacucaggcgggaacuuaguggcuacugcagcaacaucaaacugcaagucguuaaggacgcucaggcauuguuacacgggcuggauuuuuccgaggugucuaauguacagcgccuaaugcgaaaacagcguagagacgauggagaccucaagaggcugcgggaucuuaaccaagccgugaauaaccuggucgaauugaaaucgacacagcagaagucagugcuccgcguugguacucugaauagcgacgaucugcucacguuagcggcugaccuggagaaacuuaagaguaaggugaccagaacagaaaggcccuuguccucuggcgucuauauggggaaccugagcucccagcaacuagaucagcggcgcgcccuccugaauaugauuggaaugacuggcgguaaccagggggcacaggccggacgagacggcgugguaagaguuugggaugugaaaaaugcugagcuucugaacaaucaauucggcaccaugccuucauugacacucgcaugucugaccaagcaggggcaggucgacuuaaacgauguggugcaagcccugacugaccucggacuuauauacacagcuaaauauccaaauaccagugaccuggauagguugacgcagagccauccgauccuaaacaugauugacacuaagaagucuucccugaauaucucagguuacaacuuuagccucggcgccgcggucaaagcaggggccugcaugcuggauggaggcaacaugcuugagaccauuaagaucaguccccagucuguugacgguauacugaaauccaucuugaaggugaaacggagccucgggauguucguaucggauacaccuggagaacguaauccauaugagaacauucuguacaagaucuguuuaucuggcgacggcuggcccuauauugcuucccgcacuucaaucguggggagagccugggaaaauaccgucguggaucuggaggcagacggaaaaccucagaagccaaacagugguagcuccaauaagucucuacaaagcgcuggcuuucccgccgggcucacauacucacagcugaugacccuuaaagaugcgauguugcagcuggacccuaacgccaagacguggauggauauagagggaaggccagaagacccgguugagguggcacucuaccagcccaguuccggcugcuauauucacuucuuucgggaaccuacugaccugaaacaauucaagcaggaugcuaaauacagccaugguaucgacgucacagaucuuuuugccgcucagccagggcugaccucugccgugauugaggcauugccccgaaauaugguaaucacuugucagggcucagaagacaucaagaagcuccuggagagucaaggacgcaaagauauuaaguuaauagacaucgcccugagcaaaauugauuccagaaaguucgagaacgcuguuugggaccaguauaaagaucuaugccacaugcauacaggcguggucguggaaaagaagaaaaggggagggaaggaggaaaucaccccucacugugcgcucauggacugcauaauguuugaugcagccgucucugguggccugaaugcuucggugcuucgggccguuuugccacgcgacaugguguucagaacgagcacccccaaaguaguccuguga

SEQ ID NO: 8796 - RNA, 1710 nt, Artificial Sequence
  derived and/or modified CDS sequence (opt3) from LASV(Komina-R16;Clade V)__AHC95556__NP
augagcgccuccaaggaggugaaaucuuuccuguggacccagucacucagaagggaacuuaguggcuacugcagcaacaucaagcugcaagucguuaaagacgcucaggcauuguuacacgggcuggauuuuuccgaggugucuaauguacagcggcuaaugcgcaagcagcgacgugacgauggagaccucaaaagacugagggaucuuaaccaagccgugaauaaccuggucgaauugaagucgacacagcagaagaaugugcuccggguugguacucugaacucagacgaucugcucacguuagcggcugaccuggagaaacuuaagagcaaagugacccgcacagaaagacccuugaguuccggcgucuauauggggaaucugucuagccagcaacuagaucagaggcgggcccuccugaacaugauuggaaugacuggcgguaaucaggggacccagacaggacgcgacggcgugguacgaguuugggaugugaagaacgcagagcuucugaauaaccaauucggcaccaugccuuccuugacucucgccugucugacaaaacaggggcaggcugacuuaaaugaugucgugcaagcacugaccgaccucggacuuauauacacggccaaguauccaaacgcuucagaccuggauagauugacucagagucauccgauccuaaauaugauugacaccaagaaaagcucucugaacaucuccgguuacaacuuuucacucggcgccgcggugaaggcaggggccugcaugcuggauggaggcaauaugcuugagacaauuaaagucagcccccagaguauggacgguauccugaagucuauauugaaaguuaagagggcucucgggauguucguguccgauacuccuggagaacggaacccauaugagaauauccuguacaaaauuuguuuaagcggcgacggcuggcccuauaucgccucgcguaccucuauuguagggcgcgcaugggaaaacacaguggucgaucuggaggcugacggaaauccuaagaagcuaaacuccaaugguucaaacaaaagucuccagagcgccggcuuuccagcggggcugaccuacucccaacuuaugacguugaaggaugccaugcugcagcucgaccccaaugcaaaaacuuggauggauaucgagggaagaccugaagacccaguggagguugcucuguaccagccgaacucuggcugcuauauacacuucuuuagggaacccacagaccuuaagcaguucaaacaagaugccaaguacagccaugguauugacgugaccgaucuguuugcugcccagccuggguugacuucagcagucaucgaggcccucccacggaauauggugauuacaugucagggcagugaagacauccgaaagcuguuagagucccagggacgcaaagauaucaagcugauugacauagcucuaagcaaaaccgauucuagaaaguucgagaacgcgguaugggaccaacacaaagaucucugccauaugcacacgggcguuguggucgaaaagaagaaaaggggagggaaggaggaaaucacuccccacugugcacugauggacugcauuauguuugaugccgcugugucagguggccuuaauacauugguccugcgggccgugcucccucgcgacaugguuuucagaaccaguaccccaaaagugguacuguga

SEQ ID NO: 8797 - RNA, 1710 nt, Artificial Sequence
  derived and/or modified CDS sequence (opt3) from LASV(Ouoma-R123;Clade V)__AHC95558__NP
augagcgccuccaaggaggugagaucuuuccuguggacccagucacucaggcgggaacuuaguggcuacugcagcaacaucaaacugcaagucguuaaggacgcucaggcauuguuacacgggcuggauuuuuccgaggugucuaauguacagcgccuaaugcgaaaacagcguagagacgauucggaccucaagaggcugcgggaucuuaaccaagccgugaauaaccuggucgaauugaaaucaacacagcaaaagagcgugcuccgcguuggaacucugaguuccgacgaucugcucacguuagcggcugaccuggagaagcugaaaucuaaggugauuagaaccgaaaggcccuugagcuccggugucuauaugggcaaucugucaagucagcagcuagaucagcggcgcgcccuccugaacaugauagggaugacaggaggcaaucagggugcacaggccgggcgagacggagugguaagaguuugggaugugaggaacgcugagcuucugaauaaccaauucggcacuaugccuagcuugacccucgcaugucugacaaaacagggccaggucgacuuaaaugauguggugcaagcccugaccgaccucgggcuuaucuacacugcuaaguauccaaacacaucugaccuggaucgguugacccagaaucauccgauucuaaacaugaucgacacgaaaaaguccucacugaauauuagcggauacaacuuuagucucggugccgcggucaaggcaggcgccugcaugcuggaugggggaaacaugcuugagacuaucaaaguuucuccccaguccauagacggcauccuuaagagcauuuugaaagugaagcguacccucgguauguucguaucggauacaccuggggaacgcaauccauaugagaacauccuguacaaaauuuguuuaucuggagacggcuggcccuauaucgcuuccagaacuucaauagugggcagggccugggaaaauaccgucguggaucuggagacagaccggaagagucaggggccuaacagcggaaauuccaacaaaucucuacaaagcgcagguuuuucagcuggccucaccuacagucagcugaugacgcuuaaggaugccauguugcagcuggacccaaaugcgaagacuuggauggauauugaggggcgacccgaagacccuguugagguggcccucuaccagccaaucuccggaugcuauauucacuucuuucgcgaaccgacagaccugaaacaauucaagcaggaugcaaaauacagccauggcaucgacaucaccgaucuuuuugcugcccagcccggucugacuucugcugucauugaggccuugccuagaaacauggugauaacaugucaggggucagaagacaucaagaaacuccuggagagucaaggcaggaaggauauuaaguuaaucgacauagcacugagcaaaauugauucccggaaguucgagaaugccguaugggaccaguauaaagaucuaugccacaugcauaccggaguuguggucgaaaagaaaaagcgcggcgggaaggaggaaaucacgccacacugugcucucauggacugcaucauguuugaugcggcagugucuggaggucugaacgccucgguccuuagagcuguguugcccagggacaugguuuuccguaccagcacaccuaaagugguacuguga

SEQ ID NO: 8798 - RNA, 1710 nt, Artificial Sequence
  derived and/or modified CDS sequence (opt3) from LASV(Soromba-R;Clade V)__AHC95552__NP
augagcgccuccaaggaggugaaaucuuuccuguggacccagucacucagaagggaacuuaguggcuacugcagcaacaucaagcugcaagucguuaaagacgcucaggcauuguuacacgggcuggauuuuuccgaggugucuaauguacagcggcuaaugcgcaagcagcgacgugacgauggagaccucaaaagacugagggaucuuaaccaagccgugaauaaccuggucgaauugaagucgacacagcagaagaaugugcuccggguugguacucugaacucagacgaucugcucacguuagcggcugaccuggagaaacuuaagagcaaagugacccgcacagaaagacccuugaguuccggcgucuauauggggaaucugucuagccagcaacuagaucagaggcgggcccuccugaacaugauuggaaugacuggcgguaaucaggggacccaggcaggacgcgacggcgugguacgaguuugggaugugaagaacgccgagcuucugaauaaccaauucggcacaaugccuuccuugacccucgcuugucugacuaaacaggggcaggcagacuuaaaugaugucgugcaagcccugacagaccucggacuuauauacaccgcuaaguauccaaacgccucagaccuggauagauugacgcagagucauccgauccuaaauaugauugacacuaagaaaagcucucugaacaucuccgguuacaacuuuucacucggcgcggcagugaaggccggggcuugcaugcuggauggaggcaauaugcuugagaccauuaaagucagcccccagaguauggacgguauccugaagucuauauugaaaguuaagagggcccucgggauguucguguccgauacaccuggagaacggaacccauaugagaauauccuguacaaaauuuguuuaagcggcgacggcuggcccuauaucgcaucgcguacuucuauuguagggcgcgcuugggaaaacaccguggucgaucuggaggccgacggaaauccuaagaagcuaaacuccaaugguucaaacaaaagucuccagagcgcgggcuuuccagccgggcugacauacucccaacuuaugaccuugaaggaugcaaugcugcagcucgaccccaaugcuaaaacguggauggauaucgagggaagaccugaagacccaguggagguugcccuguaccagccgaacucuggcugcuauauacacuucuuuagggaacccacugaccuuaagcaguucaaacaagaugcuaaguacagccaugguauugacgugacagaucuguuugccgcacagccuggguugaccucagccgucaucgaggcucucccacggaauauggugauuacuugucagggcagugaagacauccgaaagcuguuagagucccagggacgcaaagauaucaagcugauugacauagcgcuaagcaaaacagauucuagaaaguucgagaacgcaguaugggaccaauauaaagaucucugccacaugcauaccggcguuguggucgaaaagaagaaaaggggagggaaggaggaaaucacgccccacugugcccugauggacugcauuauguuugaugcugccgugucagguggccuuaauaccuugguccugcgggcagugcucccucgcgacaugguuuucagaacaaguacuccaagggugguacuguga

SEQ ID NO: 8799 - RNA, 1710 nt, Artificial Sequence
  derived and/or modified CDS sequence (opt3) from LASV(Soromba-R30;Clade V)__AHC95560__NP
augagcgccuccaaggaggugaaaucuuuccuguggacccagucacucagaagggaacuuaguggcuacugcagcaacaucaagcugcaagucguuaaagacgcucaggcauuguuacacgggcuggauuuuuccgaggugucuaauguacagcggcuaaugcgcaagcagcgacgugacgauggagaccucaaaagacugagggaucuuaaccaagccgugaauaaccuggucgaauugaagucgacacagcagaagaaugugcuccggguugguacucugaacucagacgaucugcucacguuagcggcugaccuggagaaacuuaagagcaaagugacccgcacagaaagacccuugaguuccggcgucuauauggggaaucugucuagccagcaacuagaucagaggcgggcccuccugaacaugauuggaauguccggcgguaaucaggggacucaggugggacgcgacggcguaguucgagugugggaugucaagaacgcagagcuucugaauaaccaauucggcaccaugccuucauugacacucgccugucugaccaaacaggggcaggcugacuuaaaugauguggugcaagcacugacugaccucggacuuauauacacagccaaguauccaaacgcuagugaccuggauagauugacccagagccauccgauccuaaauaugauugacacgaagaaaucuucccugaacaucucagguuacaacuuuagccucggcgccgcggucaaggcaggggccugcaugcuggauggaggcaauaugcuugagacuauuaaaguuaguccccagucuauggacgguauccugaaguccauauugaaagugaagagggcucucgggauguucguaagcgauaccccuggagaacggaacccauaugagaauauccuguacaaaauuuguuuaucgggcgacggcuggcccuauaucgccucucguacauccauuguggggcgcgcaugggaaaacacugucguggaucuggaggcugacggaaauccuaagaagcuaaacucaaaugguaguaacaaaagccuccaguccgccggcuuuccagcggggcugaccuacucucaacuuaugacauugaaggaugccaugcugcagcucgaccccaaugcaaaaaccuggauggauaucgagggaagaccugaagacccaguugagguggcucuguaccagccgaacagcggcugcuauauacacuucuuuagggaacccacggaccuuaagcaguucaaacaagaugccaaguacucacaugguauugacgucacugaucuguuugcugcccagccuggguugacaagugcagugaucgaggcccucccacggaauaugguaauuaccugucagggcuccgaagacauccgaaagcuguuagagagccagggacgcaaagauaucaagcugauugacauagcucuaucuaaaacugauucaagaaaguucgagaacgcgguuugggaccaacacaaagaucucugccauaugcacacaggcguggucguggaaaagaagaaaaggggagggaaggaggaaaucacgccccacugugcacugauggacugcauuauguuugaugccgcugucagugguggccuuaauaccuuggugcugcgggccguucucccucgcgacaugguguucagaaccagcacaccaaaaguaguccuguga

SEQ ID NO: 8800 - RNA, 1710 nt, Artificial Sequence; identical to SEQ ID NO: 8556
  derived and/or modified CDS sequence (opt3) from LASV(Alzey;Clade VI)__SCA79106__NP

SEQ ID NO: 8801 - RNA, 1710 nt, Artificial Sequence
  derived and/or modified CDS sequence (opt3) from LASV(NIGERIA IKEJI;Clade II)__AMZ00372__NP
augagcguguccaaggaggucaaaucuuuccuguggacccagucacucagaagggaacuuaguggcuacugcagcaacaucaagcugcaaguugugaaagacgcccaggcuuuguuacacgggcuggauuuuuccgagguaucuaaugugcagcggcuaaugcgcaagcagaaacgagacgauaacgaccucaagcgucugagagaucuuaaucaagcagucaacaaucugguggaauugaagucgguucagcagaaaucaauucucagggugggaacacugacuagcgacgaucugcucacguuagccgcggaccuggagaaacuuaagaguaaggucauacggaccgaacgccccuuguccucugguguguauaugggcaaccugagcucccagcaacuagagcagagaaaagcucuccugacaaugaucgggaugacuggaggcucacagagugcccagccugguagggaugggguaguucgggugugggacgucaagaauagcgaucuucugaacaaucaauucggaaccaugccaucuuugacacucgcaugucugaccaagcagggccagguggacuuaaacgaugccgugcuggcucucacugaccuuggccugauuuacacagcaaaauauccgaauaccuccgacuuggaucgccuaucacaaagccaucccauccugaacauggucgacacgaagaaaaguucucucaauauuuccggguacaacuuuagccugggagccgcuguuaaggccggugcgugcaugcuugauggcgggaauaugcuggagacuaucaaagugaccccucagacaauggacggaauauugaagucgauccucaaaguaaagcgagcacugggcauguucgugucugauacuccaggugaaagaaaccccuaugagaacauuuuauacaagaucugucuguccggggacggauggccuuauauugccucaaggaccaguaucgucggccgggcuugggaaaauacaauaguggaucuagagagcgacuccaaaccacagaagguuggcgccauugggucuaacaaaagccuccagucagcaggauuucccgcuggucugaccuacagucaacuuaugacguugaaggauuccaugaugcagcuggacccuagcgccaaaacuuggaucgauauugagggccguccagaagacccgguggagaucgcgcucuaccagcccaucucugggugcuauauucacuucuuucgcgaaccuacagaccugaagcaguucaagcaagaugccaaauacucacauggaauagacgucgcagaucuuuuuagugcucagccaggccugaccagcgccgugaucgaggcuuugcccagaaauaugguacucacuugucaggguuccgacgauauuaagaaacuguuagacucucaggggaggcgggauaucaagcugauagacauuucgcuaaacaaagccgauagccgacgcuucgaaaaugcaguuugggaccaaugcaaggaucucugucacaugcauacaggcguggucguggagaagaaaaagagaggaggcaaagaggaaaucaccccucacugcgcccugauggacuguaucauguuugaugcugcggucuccgggggacuuaacauuccaacguugagggcagugcugccccgggacaugguuuuccgcaccucaaguccgaaggugguacucuga

SEQ ID NO: 8802 - RNA, 1710 nt, Artificial Sequence
  derived and/or modified CDS sequence (opt4) from LASV(Josiah;Clade IV)__NP_694869__NP
augagcgccagcaaggagaucaagagcuuccuguggacccagagccugagaagagagcugagcggcuacugcagcaacaucaagcugcagguggugaaggacgcccaggcccugcugcacggccuggacuucagcgaggugagcaacgugcagagacugaugagaaaggagagaagagacgacaacgaccugaagagacugagagaccugaaccaggccgugaacaaccugguggagcugaagagcacccagcagaagagcauccugagagugggcacccugaccagcgacgaccugcugauccuggccgccgaccuggagaagcugaagagcaaggugaucagaaccgagagaccccugagcgccggcguguacaugggcaaccugagcagccagcagcuggaccagagaagagcccugcugaacaugaucggcaugagcggcggcaaccagggcgccagagccggcagagacggcguggugagagugugggacgugaagaacgccgagcugcugaacaaccaguucggcaccaugcccagccugacccuggccugccugaccaagcagggccagguggaccugaacgacgccgugcaggcccugaccgaccugggccugaucuacaccgccaaguaccccaacaccagcgaccuggacagacugacccagagccaccccauccugaacaugaucgacaccaagaagagcagccugaacaucagcggcuacaacuucagccugggcgccgccgugaaggccggcgccugcaugcuggacggcggcaacaugcuggagaccaucaaggugagcccccagaccauggacggcauccugaagagcauccugaaggugaagaaggcccugggcauguucaucagcgacacccccggcgagagaaaccccuacgagaacauccuguacaagaucugccugagcggcgacggcuggcccuacaucgccagcagaaccagcaucaccggcagagccugggagaacaccgugguggaccuggagagcgacggcaagccccagaaggccgacagcaacaacagcagcaagagccugcagagcgccggcuucaccgccggccugaccuacagccagcugaugacccugaaggacgccaugcugcagcuggaccccaacgccaagaccuggauggacaucgagggcagacccgaggaccccguggagaucgcccuguaccagcccagcagcggcugcuacauccacuucuucagagagcccaccgaccugaagcaguucaagcaggacgccaaguacagccacggcaucgacgugaccgaccuguucgccacccagcccggccugaccagcgccgugaucgacgcccugcccagaaacauggugaucaccugccagggcagcgacgacaucagaaagcugcuggagagccagggcagaaaggacaucaagcugaucgacaucgcccugagcaagaccgacagcagaaaguacgagaacgccgugugggaccaguacaaggaccugugccacaugcacaccggcguggugguggagaagaagaagagaggcggcaaggaggagaucaccccccacugcgcccugauggacugcaucauguucgacgccgccgugagcggcggccugaacaccagcgugcugagagccgugcugcccagagacaugguguucagaaccagcacccccagaguggugcuguga

SEQ ID NO: 8803 - RNA, 1710 nt, Artificial Sequence
  derived and/or modified CDS sequence (opt4) from LASV(LP;Clade I)__AAF86702__NP
augagcaacagcaaggagaucaagagcuuccuguggacccagagccugagaagagagcugagcggcuacugcagcaacaucaagcugcagguggugaaggacgcccaggcccugcugcacggccuggacuucagcgaggugagcaacgugcagagacugaugagaaagcagaagagagacgacgccgaccugaagagacugagagaccugaaccaggccgugaacaaccugguggagcugaagagcacccagcagaagaacgugcugagagugggcacccugagcagcgacgaccugaucacccuggccgccgaccuggagaagcugaagagcaaggugaucagaaccgagagaccccugagcagcggcguguacaugggcaaccugagcagccagcagcuggaccagagaagagcccugcugagcaugaucggcaugagcggcggcccccagggcaacagaaccggcggcgacggcguggugagagugugggacgugaagaacgccgagcugcugaacaaccaguucggcaccaugcccagccugacccuggccugccugaccaagcagggccagguggaccugaacgacgccgugcaggcccugaccgaccugggccugaucuacaccgccaaguaccccaacagcagcgaccuggacaugcugacccagagccaccccauccugggcaugguggacaccaagaagagcagccugaacaucagcggcuacaacuucagccugggcgccgccgugaaggccggcgccugcaugcuggacggcggcaacaugcuggagaccaucaaggugagcccccagaccauggacggcauccugaagagcauccugaaggugaagagaagccugggcauguucaucagcgacacccccggcgagagaaaccccuacgagaacauccuguacaagaucugccugagcggcgagggcuggcccuacaucgccagcagaaccagcaucaccggcagagccugggagaacacccugguggaccuggagagcgacaacaagccccccaagcugaacagcgccggcagcaacaagagccugcaggccgccggccugaacgccggccugaccuacagccagcugaugacccugaaggacugcaugcugcagcuggaccccagcagcaagaccuggaucgacaucgagggcagacccgaggaccccguggagaucgcccuguuccagcccagcagcggcugcuacauccacuucuucagagagcccaccgaccugaagcaguucaagcaggacgccaaguacagccacggcaucgacgugaccgaccuguucagcacccagcccggccugaccagcgccgugaucgaggcccugcccagaaacauggugcugaccugccagggcagcgacgacaucaagaagcugcuggagagccagggcagaagagacaucaagcugaucgacaucagccugagcaaggccgacagcagaaaguucgagaacgccgugugggaccaguacaaggaccugugccacaugcacaccggcguggugguggagaagaagaagagaggcggcaaggaggagaucaccccccacugcgcccugcuggacugcaucauguucgacgccgccaccaccggcagccugaacaucaccacccugagagccgugcugcccagagacaugguguucagaaccagcacccccaagguggugcuguga

SEQ ID NO: 8804 - RNA, 1710 nt, Artificial Sequence
  derived and/or modified CDS sequence (opt4) from LASV(803213;Clade II)__AAF86704__NP
augagcgccagcaaggaggugaagagcuuccuguggacccagagccugagaagagagcugagcggcuacugcagcaacaucaagcugcagguggugaaggacgcccaggcccugcugcacggccuggacuucagcgaggugaacaacgugcagagacugaugagaaagcagaagagagacgacggcgaccugaagagacugagagaccugaaccaggccgugaacaaccugguggagcugaagagcacccagcagaagagcauccugagagugggcacccugaccagcgacgaccugcugacccuggccgccgaccuggagaagcugaagagcaaggugaucagaaccgagagaccccugagcagcggcguguacaugggcaaccugagcacccagcagcuggagcagagaagagcccugcugaacaugaucggcauggugggcggcgcccagggcacccagcccggcagagacggcguggugagagugugggacgugaagaaccccgaccugcugaacaaccaguucggcaccaugcccagccugacccuggccugccugaccaagcagggccagguggaccugaacgacgccgugcuggcccugaccgaccugggccugaucuacaccgccaaguaccccaacagcagcgaccuggacagacugagccagagccaccccauccugaacaugguggacaccaagaagagcagccugaacaucagcggcuacaacuucagccugggcgccgccgugaaggccggcgccugcaugcuggacggcggcaacaugcuggagaccaucaaggugaccccccagaccauggacggcauccugaagagcauccugaaggugaagagaagccugggcauguucgugagcgacacccccggcgagagaaaccccuacgagaacauccuguacaagaucugccugagcggcgacggcuggcccuacaucgccagcagaaccagcaucgugggcagagccugggagaacaccaccguggaccuggagagcgacggcaagccccagaaggugggcaccgccggcagcaacaagagccugcagagcgccggcuuccccaccggccugaccuacagccagcugaugacccugaaggacagcaugaugcagcuggaccccagcgccaagaccuggaucgacaucgagggcagacccgaggaccccguggagaucgcccuguaccagcccaugagcggcugcuacauccacuucuucagagagcccaccgaccugaagcaguucaagcaggacgccaaguacagccacggcaucgacguggccgaccuguuccccgcccagcccggccugaccagcgccgugaucgaggcccugcccagaaacauggugcugaccugccagggcagcgacgacaucaagaagcugcuggacagccagggcagaagagacaucaagcugaucgacaucagccugagcaagguggacagcagaaaguucgagaacgccgugugggaccagugcaaggaccugugccacaugcacaccggcguggugguggagaagaagaagagaggcggcaaggaggagaucaccccccacugcgcccugauggacugcaucauguucgacgccgccgugagcggcggccugaacauccccgugcugagagccgugcugcccagagacaugguguucagaaccagcagccccaagguggugcuguga

SEQ ID NO: 8805 - RNA, 1713 nt, Artificial Sequence
  derived and/or modified CDS sequence (opt4) from LASV(GA391;Clade III)__CAA36646__NP
augagcgccagcaaggaggugagaagcuuccuguggacccagagccugagaagagagcugagcggcuacugcagcaacaucaagcugcagguggugaaggacgcccaggcccugcugcacggccuggacuucagcgaggugagcaacgugcagagacugaugagaaagcagaagagagacgacggcgaccugaagagacugagagaccugaaccaggccgugaacaaccugguggagcugaagagcacccagcagaagagcgugcugagagugggcacccugagcagcgacgaccugcugauccuggccgccgaccuggagaagcugaagagcaaggugaccagaaccgagagaccccugagcagcggcguguacaugggcaaccugagcagccagcagcuggaccagagaagagcccugcugaacaugaucggcaugaccggcgugagcggcggcggcaagggcgccagcgacggcaucgugagagugugggacgugaagaacgccgagcugcugaacaaccaguucggcaccaugcccagccugacccuggccugccugaccaagcagggccagguggaccugaacgacgccgugcaggcccugaccgaccugggccugaucuacaccgccaaguaccccaacagcagcgaccuggacagacugagccagagccaccccauccugaacaugaucgacaccaagaagagcagccugaacaucagcggcuacaacuucagccugggcgccgccgugaaggccggcgccugcaugcuggacggcggcaacaugcuggagaccaucaaggugagcccccagaccauggacggcauccugaagagcauccugaaggugaagaagagccugggcauguucgugagcgacacccccggcgagagaaaccccuacgagaacauccuguacaagaucugccugagcggcgacggcuggcccuacaucgccagcagaaccagcaucgugggcagagccugggagaacaccgugguggaccuggagcaggacaacaagccccagaagaucggcaacggcggcagcaacaagagccugcagagcgccggcuucgccgccggccugaccuacagccagcugaugacccugaaggacuucaagugcuucaaccugauccccaacgccaagaccuggauggacaucgagggcagacccgaggaccccguggagaucgcccuguaccagcccagcagcggcugcuacgugcacuucuucagagagcccaccgaccugaagcaguucaagcaggacgccaaguacagccacggcaucgacgugaccgaccuguucgccgcccagcccggccugaccagcgccgugaucgaggcccugcccagaaacauggugaucaccugccagggcagcgaggacaucagaaagcugcuggagagccagggcagaagagacaucaagcugaucgacaucacccugagcaaggccgacagcagaaaguucgagaacgccgugugggaccaguucaaggaccugugccacaugcacaccggcguggugguggagaagaagaagagaggcggcaaggaggagaucaccccccacugcgcccugauggacugcaucauguucgacgccgccgugagcggcggccuggacgccaaggugcugagaguggugcugcccagagacaugguguucagaaccagcacccccaagguggugcuguga

SEQ ID NO: 8806 - RNA, 1710 nt, Artificial Sequence
  derived and/or modified CDS sequence (opt4) from LASV(AV;Clade V)__CCA30315__NP
augagcgccagcaaggaggugaagagcuuccuguggacccagagccugagaagagagcugagcggcuacugcagcaacaucaagcugcagguggugaaggacgcccaggcccugcugcacggccuggacuucagcgaggugagcaacgugcagagacugaugagaaagcagagaagagacgacagcgaccugaagagacugagagaccugaaccaggccgugaacaaccugguggagcugaagagcacccagcagaagagcgugcugagagugggcacccugagcagcgacgaccugcugacccuggccgccgaccuggagaagcugaagagcaaggugaccagaaccgagagaccccugagcagcggcguguacaugggcaaccugagcagccagcagcuggaccagagaagagcccugcugaaccugaucggcaugaccaacggcagccagggcagccaggccggcagagacggcguggugagagugugggacgugaagaacgccgagcugcugaacaaccaguucggcaccaugcccagccugacccuggccugccugaccaagcagggccagguggaccugaacgacguggugcaggcccugaccgaccugggccugaucuacaccgccaaguaccccaacaccagcgaccuggacagacugacccagagccaccccauccugaacaugaucgacaccaagaagagcagccugaacaucagcggcuacaacuucagccugggcgccgccgugaaggccggcgccugcaugcuggacggcggcaacaugcuggagaccaucaaggugagcccccagagcauggacggcauccugaagagcauccugaaggugaagagagcccugggcauguucgugagcgacacccccggcgagagaaaccccuacgagaacauccuguacaagaucugccugagcggcgacggcuggcccuacaucgccagcagaaccagcaucgugggcagagccugggagaacaccgugguggaccuggagaccgacggcaagccccagaagaucggcagcggcaacagcaacaagagccugcagagcgccggcuucagcgccggccugaccuacagccagcugaugacccugaaggacgccaugcugcagcuggaccccaacgccaagaccuggauggacaucgagggcagacccgaggaccccguggagguggcccuguaccagcccaucagcggcugcuacauccacuucuucagagagcccaccgaccugaagcaguucaagcaggacgccaaguacagccacggcaucgacaucgccgaccuguucgccgcccagcccggccugaccagcgccgugaucgaggcccugcccagaaacauggugaucaccugccagggcagcgaggacaucaagaagcugcuggagagccagggcagaaaggacaucaagcugaucgacaucgcccugagcaagaucgacagcagaaaguucgagaacgccgugugggaccaguacaaggaccugugccacaugcacaccggcguggugguggagaagaagaagagaggcggcaaggaggagaucaccccccacugcgcccugauggacugcaucauguucgacgccgccgugagcggcggccugaacacccuggugcugagagccgugcugcccagagacaugguguucagaaccagcacccccagaguggugcuguga

SEQ ID NO: 8807 - RNA, 1710 nt, Artificial Sequence
  derived and/or modified CDS sequence (opt4) from LASV(Togo/2016/7082;Clade VI)__AMR44578__NP
augagcaacagcaaggaggugaagagcuuccuguggacccagagccugagaagagagcugagcggcuacugcagcaacaucaagcugcagguggugaaggacgcccaggcccugcugcacggccuggacuucagcgaggugagcaacgugcagagacugaugagaaagcagaagagagacgacggcgaccugaagagacugagagaccugaaccaggccgugaacaaccugguggagcugaagagcgugcagcagaagagcauccugagagugggcacccugaccagcgacgaccugcugacccuggccgccgaccuggagaagcugaagagcaaggugaccagaaccgagagaccccugagcagcggcguguacaugggcaaccugagcagccagcagcuggaccagagaagagcccugcugagcaugaucggcaugagcggcggcaaccagaacagccagcccaagggcgacggcguggugagagugugggacgugaagaacgccgaccugcugaacaaccaguucggcaccaugcccagccugacccuggccugccugaccaagcagggccagguggaccugaacgacgccgugcaggcccugaccgaccugggccugaucuacaccgccaaguaccccaacagcagcgaccuggacagacugagccagagccaccccauccugaacaugaucgacaccaagaagagcagccugaacaucagcggcuacaacuucagccugggcgccgccaucaagaccggcgccugcaugcuggacggcggcaacaugcuggagaccaucaaggugaccccccagaccauggacggcauccugaagagcauccugaaggugaagagaagccugggcauguucaucagcgacacccccggcgagagaaaccccuacgagaacauccuguacaagaucugccugagcggcgacggcuggcccuacaucgccagcagaaccgccaucaucggcagagccugggagaacaccgugguggaccuggagagcgacagcaagccccagaagaucggcagcaacggcagcaacaagagccugcagagcgccggcuucgcccccggccugaccuacagccagcugaugacccugaaggacagcaugcugcagcuggaccccaacgccaagaccuggaucgacaucgagggcagacccgaggaccccguggagguggcccuguuccagcccaucagcggcugcuacauccacuucuucagagagcccaccgaccugaagcaguucaagcaggacgccaaguacagccacggcaucgacgugaccgaccuguucgccgcccagcccggccugaccagcgccgugaucgaggcccugcccagaaacauggugcugaccugccagggcagcgacgacaucaagaagcugcuggacagccagggcagaagagacaucaagcugaucgacgugagccugaacaagaucgacagcagaaaguucgagaacgccgugugggaccaguacaaggaccugugccacaugcacaccggcguggugguggagaagaagaagaagggcggcaaggaggagaucaccccccacugcgcccugcuggacugcaucauguucgacgccgccgugagcggcggccugaacgccaccgugcugagagccgugcugcccagagacaugguguucagaaccagcagccccaagguggugcuguga

SEQ ID NO: 8808 - RNA, 1710 nt, Artificial Sequence
  derived and/or modified CDS sequence (opt4) from LASV(KAK-428;Clade n.d. (VII))__ANH09741__NP
augagcaacagcaaggaggugaagagcuuccuguggacccagagccugagaagagagcugagcggcuacugcaccaacaucaagcugcagguggugaaggacgcccaggcccugcugcacggccuggacuucagcgaggugagcaacgugcagagacugaugagaaagcagaagagagacgacaacgaccugaagagacugagagaccugaaccaggccgugaacaaccugguggagcugaagagcgugcagcagaagagcgugcugaaggugggcacccugaacagcgacgaccugcugacccuggccgccgaccuggagaagcugaagagcaagguggugagaaccgagagaccccugagcagcggcguguacaugggcaaccugagcagccagcagcuggaccagagaagagcccugcugaacaugaucggcauggccggcggcagccagggcaaccagcccagcagagacggcguggugagagugugggacgugaagaacgccgaccugcugaacaaccaguucggcaccaugcccagccugacccuggccugccugaccaagcagggccagguggaccugaacgacguggugcuggcccugaccgaccugggccugaucuacaccgccaaguaccccaacagcagcgaccuggacagacugagccagaaccaccccgugcugaacaugaucgacgugaacaagagcagccugaacaucagcggcuacaacuucagccugggcgccgccgugaaggccggcgccugcaugcuggacggcggcaacaugcuggagaccaucaagaucagcccccagaccguggacggcauccugaagagcauccugaaggugaagagagcccugggcauguucgugagcgacacccccggcgagagaaaccccuacgagaacauccuguacaaggugugccugagcggcaacggcuggcccuacaucgccagcagaaccagcaucgugggcagagccugggagaacaccgugguggaccuggagagcaacaagaaccagcccaaggugggcaacaacggcagcaacaagaugcugcagagcagcggcuucgccaccggccugaccuacagccagcugaugacccugagagacagcaugcugcagcuggaccccaccgccaagaccuggaucgacaucgagggcagacccgaggaccccguggagcuggcccuguuccagcccagcagcggcugcuacauccacuucuucagagagcccaccgaccugaagcaguucaagcaggacgccaaguacagccacggcaucgacgugaacgaccuguucagcgcccagcccggccugaccagcgccgugcuggaggcccugcccagaaacauggugcugaccugccagggcagcgacgacaucagaaagcugcuggacagccaggacagaaaggacaucaagcugaucgacaucagccugagcaaggccgacgccagaaaguucgagaacgacgugugggaccaguucaaggaccugugccacaugcacaccggcaucgugguggagaagaagaagaagggcggcaagcaggagaugaccccccacugcgcccugcuggacugcaucauguucgacgccgccgugagcggcggccugaacgugcccacccugagagccgugcugcccaccgacaugguguucagaaccaucaccaccaagguggugcuguga

SEQ ID NO: 8809 - RNA, 1710 nt, Artificial Sequence; identical to SEQ ID NO: 8803
  derived and/or modified CDS sequence (opt4) from LASV(Pinneo-NIG-1969;Clade I)__AIT17837__NP

SEQ ID NO: 8810 - RNA, 1710 nt, Artificial Sequence
  derived and/or modified CDS sequence (opt4) from LASV(ISTH0009-NIG-2011;Clade II)__AIT17405__NP
augagcgugagcaaggaggugaagagcuuccuguggacccagagccugagaagagagcugagcggcuacugcagcaacaucaagcugcagguggugaaggacgcccaggcccugcugcacggccuggacuucagcgaggugagcaacgugcagagacugaugagaaagcagaagagagacgacagcgaccugaagagacugagagaccugaaccaggccgugaacaaccugguggagcugaagagcacccagcagaagagcauccugagagugggcacccugaccagcgacgaccugcugacccuggccgccgaccuggagaagcugaagagcaaggugaucagaaccgagagaccccugagcagcggcguguacaugggcaaccugagcacccagcagcuggagcagagaagagcccugcugaacaugaucggcauggugggcggcgcccagggcacccagcccggcagagacggcguggugagagugugggacgugaagaaccccgaccugcugaacaaccaguucggcaccaugcccagccugacccuggccugccugaccaagcagggccagguggaccugaacgacgccgugcuggcccugaccgaccugggccugaucuacaccgccaaguaccccaacagcagcgaccuggacagacugagccagagccaccccauccugaacaugguggacaucaagaagagcagccugaacaucagcggcuacaacuucagccugggcgccgccgugaaggccggcgccugcaugcuggacggcggcaacaugcuggagaccaucaaggugaccccccagaccauggacggcauccugaagagcauccugaaggugaagagaagccugggcauguucgugagcgacacccccggcgagagaaaccccuacgagaacauccuguacaagaucugccugagcggcgacggcuggcccuacaucgccagcagaaccagcaucgugggcagagccugggagaacaccaccguggaccuggagagcgacggcaagccccagaaggugggcagcgccggcagcaacaagagccugcagagcgccggcuuccccaccggccugaccuacagccagcugaugacccugaaggacagcaugaugcagcuggaccccagcgccaagaccuggaucgacaucgagggcagacccgaggaccccguggagaucgcccuguaccagcccaugagcggcugcuacauccacuucuucagagagcccaccgaccugaagcaguucaagcaggacgccaaguacagccacggcaucgacguggccgaccuguuccccgcccagcccggccugaccagcgccgugaucgaggcccugcccagaaacauggugcugaccugccagggcagcgacgacaucaagagacugcuggacagccagggcagaagagacaucaagcugaucgacaucgcccugagcaaggccgacagcagaagauucgagaacgccgugugggaccagugcaaggaccugugccacaugcacaccggcguggugguggagaagaagaagagaggcggcaaggaggagaucaccccccacugcgcccugauggacugcaucauguacgacgccgccgugagcggcggccugaacauccccgugcugagagccgugcugcccagagacaugguguucagaaccagcagccccaagguggugcuguga

SEQ ID NO: 8811 - RNA, 1710 nt, Artificial Sequence
  derived and/or modified CDS sequence (opt4) from LASV(ISTH0012-NIG-2011;Clade II)__AIT17409__NP
augagcgccagcaaggaggugaagagcuuccuguggacccagagccugagaagagagcugagcggcuacugcagcaacaucaagcugcagguggugaaggacgcccaggcccugcugcacggccuggacuucagcgaggugagcaacgugcagagacugaugagaaagcagaagagagacgacggcgaccugaagagacugagagaccugaaccaggccgugaacaaccugguggagcugaagagcacccagcagaagagcauccugagagugggcacccugaccagcgacgaccugcugacccuggccgccgaccuggagaagcugaagagcaaggugaucagaaccgagagaccccugagcagcggcguguacaugggcaaccugagcacccagcagcuggagcagagaagagcccugcugaacaugaucggcauggugggcggcgcccagggcacccagcccggcagagacggcguggugagagugugggacgugaagaaccccgaccugcugaacaaccaguucggcaccaugcccagccugacccuggccugccugaccaagcagggccagguggaccugaacgacgccgugcuggcccugaccgaccugggccugaucuacaccgccaaguaccccaacagcagcgaccuggacagacugagccagagccaccccauccugaacaugguggacaccaagaagagcagccugaacaucagcggcuacaacuucagccugggcgccgccgugaaggccggcgccugcaugcuggacggcggcaacaugcuggagaccaucaaggugaccccccagaccauggacggcauccugaagagcauccugaaggugaagaagagccugggcauguucgugagcgacacccccggcgagagaaaccccuacgagaacauccuguacaagaucugccugagcggcgacggcuggcccuacaucgccagcagaaccagcaucgugggcagagccugggagaacaccaccguggaccuggagagcgacggcaagccccagaaggugggcaccgccggcagcaacaagagccugcagagcgccggcuuccccaccggccugaccuacagccagcugaugacccugaaggacagcaugaugcagcuggaccccagcgccaagaccuggaucgacaucgagggcagacccgaggaccccguggagaucgcccuguaccagcccaugagcggcugcuacauccacuucuucagagagcccaccgaccugaagcaguucaagcaggacgccaaguacagccacggcaucgacgugaccgaccuguucagcgcccagcccggccugaccagcgccgugaucgaggcccugcccagaaacauggugcugaccugccagggcagcgacgacaucaagagacugcuggacagccagggcagaagagacaucaagcugaucgacaucgcccugaacaaggccgacagcagaagauucgagaacgccgugugggaccagugcaaggaccugugccacaugcacaccggcguggugguggagaagaagaagagaggcggcaaggaggagaucaccccccacugcgcccugauggacugcaucauguacgacgccgccgugagcggcggccugaacauccccgugcugagagccgugcugcccagagacaugguguucagaaccagcagccccaagguggugcuguga

SEQ ID NO: 8812 - RNA, 1710 nt, Artificial Sequence
  derived and/or modified CDS sequence (opt4) from LASV(ISTH0047-NIG-2011;Clade II)__AIT17413__NP
augagcgccagcaaggaggugaagagcuuccuguggacccagagccugagaagagagcugagcggcuacugcagcagcaucaagcugcagguggugaaggacgcccaggcccugcugcacggccuggacuucagcgaggugagcaacgugcagagacugaugagaaagcagaagagagacgacagcgaccugaagagacugagagaccugaaccaggccgugaacaaccugguggagcugaagagcacccagcagaagagcauccugagagugggcacccugaccagcgacgaccugcugacccuggccgccgaccuggagaagcugaagagcaaggugaucagaaccgagagaccccugagcagcggcguguacaugggcaaccugagcacccagcagcuggagcagagaagagcccugcugaacaugaucggcauggugggcggcgcccagggcacccagcccggcagagacggcguggugagagugugggacgugaagaaccccgaccugcugaacaaccaguucggcaccaugcccagccugacccuggccugccugaccaagcagggccagguggaccugaacgacgccgugcuggcccugaccgaccugggccugaucuacaccgccaaguaccccaacagcagcgaccuggacagacugagccagagccaccccauccugaacaugguggacaccaagaagagcagccugaacaucagcggcuacaacuucagccugggcgccgccgugaaggccggcgccugcaugcuggacggcggcaacaugcuggagaccaucaaggugaccccccagaccauggacggcauccugaagagcauccugaaggugaagagaagccugggcauguucgugagcgacgcccccggcgagagaaaccccuacgagaacauccuguacaagaucugccugagcggcgacggcuggcccuacaucgccagcagaaccagcaucgugggcagagccugggagaacaccaccguggaccuggagagcgacggcaagccccagaagaugggcaccgccggcagcaacaagagccugcagagcgccggcuuccccaccggccugaccuacagccagcugaugacccugaaggacagcaugaugcagcuggaccccagcgccaagaccuggaucgacaucgagggcagacccgaggaccccguggagaucgcccuguaccagcccaugagcggcugcuacauccacuucuucagagagcccaccgaccugaagcaguucaagcaggacgccaaguacagccacggcaucgacguggccgaccuguuccccgcccagcccggccugaccagcgccgugaucgaggcccugcccagaaacauggugcugaccugccagggcagcgacgacaucaagaagcugcuggacagccagggcagaagagacaucaagcugaucgacaucgcccugagcaaggccgacagcagaagauucgagaacgccgugugggaccagugcaaggaccugugccacaugcacaccggcguggugguggagaagaagaagagaggcggcaaggaggagaucaccccccacugcgcccugauggacugcaucauguacgacgccgccgugagcggcggccugaacauccccgugcugagagccgugcugcccagagacaugguguucagaaccagcagccccaagguggugcuguga

SEQ ID NO: 8813 - RNA, 1710 nt, Artificial Sequence
  derived and/or modified CDS sequence (opt4) from LASV(ISTH0230-NIG-2011;Clade II)__AIT17421__NP
augagcgccagcaaggaggugaagagcuuccuguggacccagagccugagaagagagcugagcggcuacugcagcaacaucaagcugcagguggugaaggacgcccaggcccugcugcacggccuggacuucagcgaggugagcaacgugcagagacugaugagaaagcagaagagagacgacagcgaccugaagagacugagagaccugaaccaggccgugaacaaccugguggagcugaagagcacccagcagaagagcauccugagagugggcacccugaccagcgacgaccugcugacccuggccgccgaccuggagaagcugaagagcaaggugaucagaaccgagagaccccugagcagcggcguguacaugggcaaccugagcacccagcagcuggagcagagaagagcccugcugaacaugaucggcauggugagcggcgcccagggcacccagcccggcagagacggcguggugagagugugggacgugaagaaccccgaccugcugaacaaccaguucggcaccaugcccagccugacccuggccugccugaccaagcagggccagguggaccugaacgacgccgugcuggcccugaccgaccugggccugaucuacaccgccaaguaccccaacagcagcgaccuggacagacugagccagagccaccccauccugaacaugguggacaucaagaagagcagccugaacaucagcggcuacaacuucagccugggcgccgccgugaaggccggcgccugcaugcuggacggcggcaacaugcuggagaccaucaaggugaccccccagaccauggacggcauccugaagagcauccugaaggugaagagaagccugggcauguucgugagcgacacccccggcgagagaaaccccuacgagaacauccuguacaagaucugccugagcggcgacggcuggcccuacaucgccagcagaaccagcaucgugggcagagccugggagaacaccaccguggaccuggagagcgacggcaagccccagaagaugggcagcgccggcagcaacaagagccugcagagcgccggcuuccccaccggccugaccuacagccagcugaugacccugaaggacagcaugaugcagcuggaccccagcgccaagaccuggaucgacaucgagggcagacccgaggaccccguggagaucgcccuguaccagcccaugagcggcugcuacauccacuucuucagagagcccaccgaccugaagcaguucaagcaggacgccaaguacagccacggcaucgacguggccgaccuguuccccgcccagcccggccugaccagcgccgugaucgaggcccugcccagaaacauggugcugaccugccagggcagcgacgacaucaagagacugcuggacagccagggcagaagagacaucaagcugaucgacaucgcccugagcaaggccgacagcagaagauucgagaacgccgugugggaccagugcaaggaccugugccacaugcacaccggcguggugguggagaagaagaagagaggcggcaaggaggagaucaccccccacugcgcccugauggacugcaucauguacgacgccgccgugagcggcggccugaacauccccgugcugagagccgugcugcccagagacaugguguucagaaccagcagccccaagguggugcuguga

SEQ ID NO: 8814 - RNA, 1710 nt, Artificial Sequence
  derived and/or modified CDS sequence (opt4) from LASV(ISTH0531-NIG-2011;Clade II)__AIT17425__NP
augagcgccagcaaggaggugaagagcuuccuguggacccagagccugagaagagagcugagcggcuacugcagcagcaucaagcugcagguggugaaggacgcccaggcccugcugcacggccuggacuucagcgaggugagcaacgugcagagacugaugagaaagcagaagagagacgacagcgaccugaagagacugagagaccugaaccaggccgugaacaaccugguggagcugaagagcacccagcagaagagcauccugagagugggcacccugaccagcgacgaccugcugacccuggccgccgaccuggagaagcugaagagcaaggugaucagaaccgagagaccccugagcagcggcguguacaugggcaaccugagcacccagcagcuggagcagagaagagcccugcugaacaugaucggcauggugggcggcgcccagggcacccagcccggcagagacggcguggugagagugugggacgugaagaaccccgaccugcugaacaaccaguucggcaccaugcccagccugacccuggccugccugaccaagcagggccagguggaccugaacgacgccgugcuggcccugaccgaccugggccugaucuacaccgccaaguaccccaacagcagcgaccuggacagacugagccagagccaccccauccugaacaugguggacaccaagaagagcagccugaacaucagcggcuacaacuucagccugggcgccgccgugaaggccggcgccugcaugcuggacggcggcaacaugcuggagaccaucaaggugaccccccagaccauggacggcauccugaagagcauccugaaggugaagaagagccugggcauguucgugagcgacacccccggcgagagaaaccccuacgagaacauccuguacaagaucugccugagcggcgacggcuggcccuacaucgccagcagaaccagcaucgugggcagagccugggagaacaccaucguggaccuggagagcgacggcaagccccagaaggugggcaccgccggcagcaacaagagccugcagagcgccggcuuccccaccggccugaccuacagccagcugaugacccugaaggacagcaugaugcagcuggaccccagcgccaagaccuggaucgacaucgagggcagacccgaggaccccguggagaucgcccuguaccagcccaugagcggcugcuacauccacuucuucagagagcccaccgaccugaagcaguucaagcaggacgccaaguacagccacggcaucgacguggccgaccuguuccccgcccagcccggccugaccagcgccgugaucgaggcccugcccagaaacauggugcugaccugccagggcagcgacgacaucaagagacugcuggacagccagggcagaagagacaucaagcugaucgacaucgcccugagcaaggccgacagcagaagauucgagaacgccgugugggaccagugcaaggaccugugccacaugcacaccggcguggugguggagaagaagaagagaggcggcaaggaggagaucaccccccacugcgcccugauggacugcaucauguacgacgccgccgugagcggcggccugaacauccccgugcugagagccgugcugcccagagacaugguguucagaaccagcagccccaagguggugcuguga

SEQ ID NO: 8815 - RNA, 1710 nt, Artificial Sequence
  derived and/or modified CDS sequence (opt4) from LASV(ISTH0595-NIG-2011;Clade II)__AIT17429__NP
augagcgccagcaaggaggugaagagcuuccuguggacccagagccugagaagagagcugagcggcuacugcagcaacaucaagcugcagguggugaaggacgcccaggcccugcugcacggccuggacuucagcgaggugagcaacgugcagagacugaugagaaagcagaagagagacgacagcgaccugaagagacugagagaccugaaccaggccgugaacaaccugguggagcugaagagcacccagcagaagagcauccugagagugggcacccugaccagcgacgaccugcugacccuggccgccgaccuggagaagcugaagagcaaggugaucagaaccgagagaccccugagcagcggcguguacaugggcaaccugagcgcccagcagcuggagcagagaagagcccugcugaacaugaucggcauggugggcggcgcccagggcacccagcccggcagagacggcguggugagagugugggacgugaagaaccccgaccugcugaacaaccaguucggcaccaugcccagccugacccuggccugccugaccaagcagggccagguggaccugaacgacgccgugcuggcccugaccgaccugggccugaucuacaccgccaaguaccccaacagcagcgaccuggacagacugagccagagccaccccauccugaacaugguggacaccaagaagagcagccugaacaucagcggcuacaacuucagccugggcgccgccgugaaggccggcgccugcaugcuggacggcggcaacaugcuggagaccaucaaggugaccccccagaccauggacggcauccugaagagcauccugaaggugaagagaagccugggcauguucgugagcgacgcccccggcgagagaaaccccuacgagaacauccuguacaagaucugccugagcggcgacggcuggcccuacaucgccagcagaaccagcaucgugggcagagccugggagaacaccaccguggaccuggagagcgacggcaagccccagaaggugggcaccgccggcagcaacaagagccugcagagcgccggcuuccccaccggccugaccuacagccagcugaugacccugaaggacagcaugaugcagcuggaccccagcgccaagaccuggaucgacaucgagggcagacccgaggaccccguggagaucgcccuguaccagcccaugagcggcugcuacauccacuucuucagagagcccaccgaccugaagcaguucaagcaggacgccaaguacagccacggcaucgacguggccgaccuguuccccgcccagcccggccugaccagcgccgugaucgaggcccugcccagaaacauggugcugaccugccagggcagcgacgacaucaagagacugcuggacagccagggcagaagagacaucaagcugaucgacaucgcccugagcaaggccgacagcagaagauucgagaacgccgugugggaccagugcaaggaccugugccacaugcacaccggcguggugguggagaagaagaagagaggcggcaaggaggagaucaccccccacugcgcccugauggacugcaucauguacgacgccgccgugagcggcggccugaacauccccgugcugagagccgugcugcccagagacaugguguucagaaccagcagccccaagguggugcuguga

SEQ ID NO: 8816 - RNA, 1710 nt, Artificial Sequence
  derived and/or modified CDS sequence (opt4) from LASV(ISTH0964-NIG-2011;Clade II)__AIT17431__NP
augagcgccagcaaggaggugaagagcuuccuguggacccagagccugagaagagagcugagcggcuacugcagcaacaucaagcugcagguggugaaggacgcccaggcccugcugcacggccuggacuucagcgaggugagcaacgugcagagacugaugagaaagcagaagagagacgacagcgaccugaagagacugagagaccugaaccaggccgugaacaaccugguggagcugaagagcacccagcagaagagcauccugagagugggcacccugaccagcgacgaccugcugacccuggccgccgaccuggagaagcugaagagcaaggugaucagaaccgagagaccccugagcagcggcguguacaugggcaaccugagcacccagcagcuggagcagagaagagcccugcugaacaugaucggcauggugggcggcgcccagggcacccagcccggcagagacggcguggugagagugugggacgugaagaaccccgaccugcugaacaaccaguucggcaccaugcccagccugacccuggccugccugaccaagcagggccagguggaccugaacgacgccgugcuggcccugaccgaccugggccugaucuacaccgccaaguaccccaacagcagcgaccuggacagacugagccagagccaccccauccugaacaugguggacaccaagaagagcagccugaacaucagcggcuucaacuucagccugggcgccgccgugaaggccggcgccugcaugcuggacggcggcaacaugcuggagaccaucaaggugaccccccagaccauggacggcauccugaagagcauccugaaggugaagaagagccugggcauguucgugagcgacacccccggcgagagaaaccccuacgagaacauccuguacaagaucugccugagcggcgacggcuggcccuacaucgccagcagaaccagcaucgugggcagagccugggagaacaccaccguggaccuggagagcgacggcaagccccagaaggugggcaccgccggcagcaacaagagccugcagagcgccggcuuccccaccggccugaccuacagccagcugaugacccugaaggacagcaugaugcagcuggaccccagcgccaagaccuggaucgacaucgagggcagacccgaggaccccguggagaucgcccuguaccagcccaugagcggcugcuacauccacuucuucagagagcccaccgaccugaagcaguucaagcaggacgccaaguacagccacggcaucgacguggccgaccuguuccccgcccagcccggccugaccagcgccgugaucgaggcccugcccagaaacauggugcugaccugccagggcagcgacgacaucaagagacugcuggacagccagggcagaagagacaucaagcugaucgacaucgcccugagcaaggccgacagcagaagauucgagaacgccgugugggaccagugcaaggaccugugccacaugcacaccggcguggugguggagaagaagaagagaggcggcaaggaggagaucaccccccacugcgcccugauggacugcaucauguacgacgccgccgugagcggcggccugaacauccccgugcugagagccgugcugcccagagacaugguguucagaaccgccagccccaagguggugcuguga

SEQ ID NO: 8817 - RNA, 1710 nt, Artificial Sequence
  derived and/or modified CDS sequence (opt4) from LASV(ISTH1038-NIG-2011;Clade II)__AIT17439__NP
augagcgccagcaaggaggugaagagcuuccuguggacccagagccugagaagagagcugagcggcuacugcagcagcaucaagcugcagguggugaaggacgcccaggcccugcugcacggccuggacuucagcgaggugagcaacgugcagagacugaugagaaagcagaagagagacgacagcgaccugaagagacugagagaccugaaccaggccgugaacaaccugguggagcugaagagcacccagcagaagagcauccugagagugggcacccugaccagcgacgaccugcugacccuggccgccgaccuggagaagcugaagagcaaggugaucagaaccgagagaccccugagcagcggcguguacaugggcaaccugagcacccagcagcuggagcagagaagagcccugcugaacaugaucggcauggugggcggcgcccagggcacccagcccggcagagacggcguggugagagugugggacgugaagaaccccgaccugcugaacaaccaguucggcaccaugcccagccugacccuggccugccugaccaagcagggccagguggaccugaacgacgccgugcuggcccugaccgaccugggccugaucuacaccgccaaguaccccaacagcagcgaccuggacagacugagccagagccaccccauccugaacaugguggacaccaagaagagcagccugaacaucagcggcuucaacuucagccugggcgccgccgugaaggccggcgccugcaugcuggacggcggcaacaugcuggagaccaucaaggugaccccccagaccauggacggcauccugaagagcauccugaaggugaagagaagccugggcauguucgugagcgacacccccggcgagagaaaccccuacgagaacauccuguacaagaucugccugagcggcgacggcuggcccuacaucgccagcagaaccagcaucgugggcagagccugggagaacaccaccguggaccuggagagcgacggcaagccccagaagaugggcaccgccggcagcaacaagagccugcagagcgccggcuuccccaccggccugaccuacagccagcugaugacccugaaggacagcaugaugcagcuggaccccagcgccaagaccuggaucgacaucgagggcagacccgaggaccccguggagaucgcccuguaccagcccgugagcggcugcuacauccacuucuucagagagcccaccgaccugaagcaguucaagcaggacgccaaguacagccacggcaucgacguggccgaccuguucagcgcccagcccggccugaccagcgccgugaucgaggcccugcccagaaacauggugcugaccugccagggcagcgacgacaucaagagacugcuggacagccagggcagaagagacaucaagcugaucgacaucgcccugagcaaggccgacagcagaagauucgagaacgccgugugggaccagugcaaggaccugugccacaugcacaccggcguggugguggagaagaagaagagaggcggcaaggaggagaucaccccccacugcgcccugauggacugcaucauguacgacgccgccgugagcggcggccugaacauccccguguucagagccgugcugcccagagacaugguguucagaaccagcagccccaagguggugcuguga

SEQ ID NO: 8818 - RNA, 1710 nt, Artificial Sequence
  derived and/or modified CDS sequence (opt4) from LASV(ISTH1048-NIG-2011;Clade II)__AIT17443__NP
augagcgccagcaaggaggugaagagcuuccuguggacccagagccugagaagagagcugagcggcuacugcagcagcaucaagcugcagguggugaaggacgcccaggcccugcugcacggccuggacuucagcgaggugagcaacgugcagagacugaugagaaagcagaagagagacgacagcgaccugaagagacugagagaccugaaccaggccgugaacaaccugguggagcugaagagcacccagcagaagagcauccugagagugggcacccugaccagcgacgaccugcugacccuggccgccgaccuggagaagcugaagagcaaggugaucagaaccgagagaccccugagcagcggcguguacaugggcaaccugagcacccagcagcuggagcagagaagagcccugcugaacaugaucggcauggugggcggcgcccagggcacccagcccggcagagacggcguggugagagugugggacgugaagaaccccgaccugcugaacaaccaguucggcaccaugcccagccugacccuggccugccugaccaagcagggccagguggaccugaacgacgccgugcuggcccugaccgaccugggccugaucuacaccgccaaguaccccaacagcagcgaccuggacagacugagccagagccaccccauccugaacaugguggacaccaagaagagcagccugaacaucagcggcuacaacuucagccugggcgccgccgugaaggccggcgccugcaugcuggacggcggcaacaugcuggagaccaucaaggugaccccccagaccauggacggcauccugaagagcauccugaaggugaagagaagccugggcauguucgugagcgacgcccccggcgagagaaaccccuacgagaacauccuguacaagaucugccugagcggcgacggcuggcccuacaucgccagcagaaccagcaucgugggcagagccugggagaacaccaccguggaccuggagagcgacggcaagccccagaaggugggcaccgccggcagcaacaagagccugcagagcgccggcuuccccaccggccugaccuacagccagcugaugacccugaaggacagcaugaugcagcuggaccccagcgccaagaccuggaucgacaucgagggcagacccgaggaccccguggagaucgcccuguaccagcccaugagcggcugcuacauccacuucuucagagagcccaccgaccugaagcaguucaagcaggacgccaaguacagccacggcaucgacguggccgaccuguuccccgcccagcccggccugaccagcgccgugaucgaggcccugcccagaaacauggugcugaccugccagggcagcgacgacaucaagaagcugcuggacagccagggcagaagagacaucaagcugaucgacaucgcccugagcaaggccgacagcagaagauucgagaacgccgugugggaccagugcaaggaccugugccacaugcacaccggcguggugguggagaagaagaagagaggcggcaaggaggagaucaccccccacugcgcccugauggacugcaucauguacgacgccgccgugagcggcggccugaacauccccgugcugagagccgugcugcccagagacaugguguucagaaccagcagccccaagguggugcuguga

SEQ ID NO: 8819 - RNA, 1710 nt, Artificial Sequence
  derived and/or modified CDS sequence (opt4) from LASV(ISTH1058-NIG-2011;Clade II)__AIT17447__NP
augagcgccagcaaggaggugaagagcuuccuguggacccagagccugagaagagagcugagcggcuacugcagcaacaucaagcugcagguggugaaggacgcccaggcccugcugcacggccuggacuucagcgaggugagcaacgugcagagacugaugagaaagcagaagagagacgacagcgaccugaagagacugagagaccugaaccaggccgugaacaaccugguggagcugaagagcacccagcagaagagcauccugagagugggcacccugaccagcgacgaccugcugacccuggccgccgaccuggagaagcugaagagcaaggugaucagaaccgagagaccccugagcagcggcguguacaugggcaaccugagcacccagcagcuggagcagagaagagcccugcugaacaugaucggcauggugggcggcgcccagggcacccagcccggcagagacggcguggugagagugugggacgugaagaaccccgaccugcugaacaaccaguucggcaccaugcccagccugacccuggccugccugaccaagcagggccagguggaccugaacgacgccgugcuggcccugaccgaccugggccugaucuacaccgccaaguaccccaacagcagcgaccuggacagacugagccagagccaccccauccugaacaugguggacaccaagaagagcagccugaacaucagcggcuacaacuucagccugggcgccgccgugaaggccggcgccugcaugcuggacggcggcaacaugcuggagaccaucaaggugaccccccagaccauggacggcauccugaagagcauccugaaggugaagaagagccugggcauguucgugagcgacacccccggcgagagaaaccccuacgagaacauccuguacaagaucugccugagcggcgacggcuggcccuacaucgccagcagaaccagcaucgugggcagagccugggagaacaccaccguggaccuggagagcgacggcaagccccagaaggugggcaccaccggcagcaacaagagccugcagagcgccggcuuccccaccggccugaccuacagccagcugaugacccugaaggacagcaugaugcagcuggaccccagcgccaagaccuggaucgacaucgagggcagacccgaggaccccguggagaucgcccuguaccagcccaugagcggcugcuacauccacuucuucagagagcccaccgaccugaagcaguucaagcaggacgccaaguacagccacggcaucgacgugaccgaccuguuccccgcccagcccggccugaccagcgccgugaucgaggcccugcccagaaacauggugcugaccugccagggcagcgacgacaucaagagacugcuggacagccagggcagaagagacaucaagcugaucgacaucgcccugagcaaggccgacagcagaagauucgagaacgccgugugggaccagugcaaggaccugugccacaugcacaccggcguggugguggagaagaagaagagaggcggcaaggaggagaucaccccccacugcgcccugauggacugcaucauguacgacgccgccgugagcggcggccugaacauccccgugcugagagccgugcugcccagagacaugguguucagaaccagcagccccaagguggugcuguga

SEQ ID NO: 8820 - RNA, 1710 nt, Artificial Sequence
  derived and/or modified CDS sequence (opt4) from LASV(ISTH1064-NIG-2011;Clade II)__AIT17451__NP
augagcgccagcaaggaggugaagagcuuccuguggacccagagccugagaagagagcugagcggcuacugcagcaacaucaagcugcagguggugaaggacgcccaggcccugcugcacggccuggacuucagcgaggugagcaacgugcagagacugaugagaaagcagaagagagacgacagcgaccugaagagacugagagaccugaaccaggccgugaacaaccugguggagcugaagagcacccagcagaagagcauccugagagugggcacccugaccagcgacgaccugcugacccuggccgccgaccuggagaagcugaagagcaaggugaucagaaccgagagaccccugagcagcggcguguacaugggcaaccugagcacccagcagcuggagcagagaagagcccugcugaacaugaucggcauggugggcggcgcccagggcacccagcccggcagagacggcguggugagagugugggacgugaagaaccccgaccugcugaacaaccaguucggcaccaugcccagccugacccuggccugccugaccaagcagggccagguggaccugaacgacgccgugcuggcccugaccgaccugggccugaucuacaccgccaaguuccccaacagcagcgaccuggacagacugagccagagccaccccauccugaacaugguggacaccaagaagagcagccugaacaucagcggcuacaacuucagccugggcgccgccgugaaggccggcgccugcaugcuggacggcggcaacaugcuggagaccaucaaggugaccccccagaccauggacggcauccugaagagcauccugaaggugaagaagagccugggcauguucgugagcgacacccccggcgagagaaaccccuacgagaacauccuguacaagaucugccugagcggcgacggcuggcccuacaucgccagcagaaccagcaucgugggcagagccugggagaacaccaccguggaccuggagagcgacggcaagccccagaaggugggcaccaccggcagcaacaagagccugcagagcgccggcuuccccaccggccugaccuacagccagcugaugacccugaaggacagcaugaugcagcuggaccccagcgccaagaccuggaucgacaucgagggcagacccgaggaccccguggagaucgcccuguaccagcccaugagcggcugcuacauccacuucuucagagagcccaccgaccugaagcaguucaagcaggacgccaaguacagccacggcaucgacguggccgaccuguuccccgcccagcccggccugaccagcgccgugaucgaggcccugcccagaaacauggugcugaccugccagggcagcgacgacaucaagagacugcuggacagccagggcagaagagacaucaagcugaucgacaucgcccugagcaaggccgacagcagaagauucgagaacgccgugugggaccagugcaaggaccugugccacaugcacaccggcguggugguggagaagaagaagagaggcggcaaggaggagaucaccccccacugcgcccugauggacugcaucauguacgacgccgccgugagcggcggccugaacauccccgugcugagagccgugcugcccagagacaugguguucagaaccagcagccccaagguggugcuguga

SEQ ID NO: 8821 - RNA, 1710 nt, Artificial Sequence
  derived and/or modified CDS sequence (opt4) from LASV(ISTH1069-NIG-2011;Clade II)__AIT17455__NP
augagcgccagcaaggaggugaagagcuuccuguggacccagagccugagaagagagcugagcggcuacugcagcagcaucaagcugcagguggugaaggacgcccaggcccugcugcacggccuggacuucagcgaggugagcaacgugcagagacugaugagaaagcagaagagagacgacagcgaccugaagagacugagagaccugaaccaggccgugaacaaccugguggagcugaagagcacccagcagaagagcgugcugagagugggcacccugaccagcgacgaccugcugacccuggccgccgaccuggagaagcugaagagcaaggugaucagaaccgagagaccccugagcagcggcguguacaugggcaaccugagcacccagcagcuggagcagagaagagcccugcugagcaugaucggcauggugggcggcgcccagggcacccagcccggcagagacggcguggugagagugugggacgugaagaaccccgaccugcugaacaaccaguucggcaccaugcccagccugacccuggccugccugaccaagcagggccagguggaccugaacgacgccgugcuggcccugaccgaccugggccugaucuacaccgccaaguaccccaacagcagcgaccuggacagacugagccagagccaccccauccugaacaugguggacaccaagaagagcagccugaacaucagcggcuacaacuucagccugggcgccgccgugaaggccggcgccugcaugcuggacggcggcaacaugcuggagaccaucaaggugaccccccagaccauggacggcauccugaagagcauccugaaggugaagagaagccugggcauguucgugagcgacacccccggcgagagaaaccccuacgagaacauccuguacaagaucugccugagcggcgacggcuggcccuacaucgccagcagaaccagcaucgugggcagagccugggagaacaccaccguggaccuggagagcgacggcaagccccagaaggugggcaccgccggcagcaacaagagccugcagagcgccggcuuccccaccggccugaccuacagccagcugaugacccugaaggacagcaugaugcagcuggaccccagcgccaagaccuggaucgacaucgagggcagacccgaggaccccguggagaucgcccuguaccagcccaugagcggcugcuacauccacuucuucagagagcccaccgaccugaagcaguucaagcaggacgccaaguacagccacggcaucgacguggccgaccuguuccccgcccagcccggccugaccagcgccgugaucgaggcccugcccagaaacauggugcugaccugccagggcagcgacgacaucaagagacugcuggacagccagggcagaagagacaucaagcugaucgacaucgcccugagcaaggccgacagcagaagauucgagaacgccgugugggaccagugcaaggaccugugccacaugcacaccggcguggugguggagaagaagaagagaggcggcaaggaggagaucaccccccacugcgcccugauggacugcaucauguacgacgccgccgugagcggcggccugaacauccccgugcugagagccgugcugcccagagacaugguguucagaaccagcagccccaagguggugcuguga

SEQ ID NO: 8822 - RNA, 1710 nt, Artificial Sequence
  derived and/or modified CDS sequence (opt4) from LASV(ISTH1096-NIG-2012;Clade II)__AIT17459__NP
augagcgccagcaaggaggugaagagcuuccuguggacccagagccugagaagagagcugagcggcuacugcagcagcaucaagcugcagguggugaaggacgcccaggcccugcugcacggccuggacuucagcgaggugagcaacgugcagagacugaugagaaagcagaagagagacgacagcgaccugaagagacugagagaccugaaccaggccgugaacaaccugguggagcugaagagcacccagcagaagagcauccugagagugggcacccugaccagcgacgaccugcugacccuggccgccgaccuggagaagcugaagagcaaggugaucagaaccgagagaccccugagcagcggcguguacaugggcaaccugagcacccagcagcuggagcagagaagagcccugcugaacaugaucggcauggugggcggcgcccagggcacccagcccggcagagacggcguggugagagugugggacgugaagaaccccgaccugcugaacaaccaguucggcaccaugcccagccugacccuggccugccugaccaagcagggccagguggaccugaacgacgccgugcuggcccugaccgaccugggccugaucuacaccgccaaguaccccaacagcagcgaccuggacagacugagccagagccaccccauccugaacaugguggacaccaagaagagcagccugaacaucagcggcuacaacuucagccugggcgccgccgugaaggccggcgccugcaugcuggacggcggcaacaugcuggagaccaucaaggugaccccccagaccauggacggcauccugaagagcauccugaaggugaagagaagccugggcauguucgugagcgacacccccggcgagagaaaccccuacgagaacauccuguacaagaucugccugagcggcgacggcuggcccuacaucgccagcagaaccagcaucgugggcagagccugggagaacaccaccguggaccuggagagcgacggcaagccccagaagaugggcaccgccggcagcaacaagagccugcagagcgccggcuuccccaccggccugaccuacagccagcugaugacccugaaggacagcaugaugcagcuggaccccagcgccaagaccuggaucgacaucgagggcagacccgaggaccccguggagaucgcccuguaccagcccgugagcggcugcuacauccacuucuucagagagcccaccgaccugaagcaguucaagcaggacgccaaguacagccacggcaucgacguggccgaccuguuccccgcccagcccggccugaccagcgccgugaucgaggcccugcccagaaacauggugcugaccugccagggcagcgacgacaucaagagacugcuggacagccagggcagaagagacaucaagcugaucgacaucgcccugagcaaggccgacagcagaagauucgagaacgccgugugggaccagugcaaggaccugugccacaugcacaccggcguggugguggagaagaagaagagaggcggcaaggaggagaucaccccccacugcgcccugauggacugcaucauguacgacgccgccgugagcggcggccugaacauccccgugcugagagccgugcugcccagagacaugguguucagaaccagcagccccaagguggugcuguga

SEQ ID NO: 8823 - RNA, 1710 nt, Artificial Sequence
  derived and/or modified CDS sequence (opt4) from LASV(ISTH1107-NIG-2012;Clade II)__AIT17463__NP
augagcgccagcaaggaggugaagagcuuccuguggacccagagccugagaagagagcugagcggcuacugcagcagcaucaagcugcagguggugaaggacgcccaggcccugcugcacggccuggacuucagcgaggugagcaacgugcagagacugaugagaaagcacaagagagacgacagcgaccugaagagacugagagaccugaaccaggccgugaacaaccugguggagcugaagagcacccagcagaagagcauccugagagugggcacccugaccagcgacgaccugcugacccuggccgccgaccuggagaagcugaagagcaaggugaucagaaccgagagaccccugagcagcggcguguacaugggcaaccugagcacccagcagcuggagcagagaagagcccugcugaacaugaucggcauggugggcggcgcccagagcacccagcccggcagagacggcguggugagagugugggacgugaagaaccccgaccugcugaacaaccaguucggcaccaugcccagccugacccuggccugccugaccaagcagggccagguggaccugaacgacgccgugcuggcccugaccgaccugggccugaucuacaccgccaaguaccccaacagcagcgaccuggacagacugagccagagccaccccauccugaccaugguggacaccaagaagagcagccugaacaucagcggcuucaacuucagccugggcgccgccgugaaggccggcgccugcaugcuggacggcggcaacaugcuggagaccaucaaggugaccccccagaccauggacggcauccugaagagcauccugaaggugaagaagagccugggcauguucgugagcgacacccccggcgagagaaaccccuacgagaacauccuguacaagaucugccugagcggcgacggcuggcccuacaucgccagcagaaccagcaucgugggcagagccugggagaacaccaucguggaccuggagaccgacggcaagccccagaaggugggcaccgccggcagcagcagaagccugcagagcgccggcuuccccaccggccugaccuacagccagcugaugacccugaaggacagcaugaugcagcuggaccccagcgccaagaccuggaucgacaucgagggcagacccgaggaccccguggagaucgcccuguaccagcccaugagcggcugcuacauccacuucuucagagagcccaccgaccugaagcaguucaagcaggacgccaaguacagccacggcaucgacguggccgaccuguuccccgcccagcccggccugaccagcgccgugaucgaggcccugcccagaaacauggugcugaccugccagggcagcgacgacaucaagaagcugcuggacagccagggcagaagagacaucaagcugaucgacaucgcccugagcaaggccgacagcagaagauucgagaacgccgugugggaccagugcaaggaccugugccacaugcacaccggcguggugguggagaagaagaagagaggcggcaaggaggagaucaccccccacugcgcccugauggacugcaucauguacgacgccgccgugagcggcggccugaacauccccgugcugagagccgugcugcccagagacaugguguucagaaccagcagccccaagguggugcuguga

SEQ ID NO: 8824 - RNA, 1710 nt, Artificial Sequence
  derived and/or modified CDS sequence (opt4) from LASV(ISTH1111-NIG-2011;Clade II)__AIT17467__NP
augagcgccagcaaggaggugaagagcuuccuguggacccagagccugagaagagagcugagcggcuacugcagcagcaucaagcugcagguggugaaggacgcccaggcccugcugcacggccuggacuucagcgaggugagcaacgugcagagacugaugagaaagcagaagagagacgacagcgaccugaagagacugagagaccugaaccaggccgugaacaaccugguggagcugaagagcacccagcagaagagcauccugagagugggcacccugaccagcgacgaccugcugacccuggccgccgaccuggagaagcugaagagcaaggugaucagaaccgagagaccccugagcagcggcguguacaugggcaaccugagcacccagcagcuggagcagagaagagcccugcugaacaugaucggcauggugggcggcacccagggcacccagcccggcagagacggcguggugagagugugggacgugaagaaccccgaccugcugaacaaccaguucggcaccaugcccagccugacccuggccugccugaccaagcagggccagguggaccugaacgacgccgugcuggcccugaccgaccugggccugaucuacaccgccaaguaccccaacagcagcgaccuggacagacugagccagagccaccccauccugaacaugguggacaccaagaagagcagccugaacaucagcggcuacaacuucagccugggcgccgccgugaaggccggcgccugcaugcuggacggcggcaacaugcuggagaccaucaaggugaccccccagaccauggacggcauccugaagagcauccugaaggugaagaagagccugggcauguucgugagcgacacccccggcgagagaaaccccuacgagaacauccuguacaagaucugccugagcggcgacggcuggcccuacaucgccagcagaaccagcaucgugggcagagccugggagaacaccaccguggaccuggagagcgacggcaagccccagaaggugggcaccgccggcagcaacaagagccugcagagcgccggcuuccccaccggccugaccuacagccagcugaugacccugaaggacagcaugaugcagcuggaccccagcgccaagaccuggaucgacaucgagggcagacccgaggaccccguggagaucgcccuguaccagcccaugagcggcugcuacauccacuucuucagagagcccaccgaccugaagcaguucaagcaggacgccaaguacagccacggcaucgacguggccgaccuguuccccgcccagcccggccugaccagcgccgugaucgaggcccugcccagaaacauggugcugaccugccagggcagcgacgacaucaagagacugcuggacagccagggcagaagagacaucaagcugaucgacaucagccugagcaaggccgacagcagaagauucgagaacgccgugugggaccagugcaaggaccugugccacaugcacaccggcguggugguggagaagaagaagagaggcggcaaggaggagaucaccccccacugcgcccugauggacugcaucauguacgacgccgccgugagcggcggccugaacauccccgugcugagagccgugcugcccagagacaugguguucagaaccagcagccccaagguggugcuguga

SEQ ID NO: 8825 - RNA, 1710 nt, Artificial Sequence
  derived and/or modified CDS sequence (opt4) from LASV(ISTH1121-NIG-2012;Clade II)__AIT17471__NP
augagcgccagcaaggaggugaagagcuuccuguggacccagagccugagaagagagcugagcggcuacugcagcagcaucaagcugcagguggugaaggacgcccaggcccugcugcacggccuggacuucagcgaggugagcaacgugcagagacugaugagaaagcagaagagagacgacagcgaccugaagagacugagagaccugaaccaggccgugaacaaccugguggagcugaagagcacccagcagaagagcauccugagagugggcacccugaccagcgacgaccugcugacccuggccgccgaccuggagaagcugaagagcaaggugaucagaaccgagagaccccugagcagcggcguguacaugggcaaccugagcacccagcagcuggagcagagaagagcccugcugaacaugaucggcauggugggcggcgcccagggcacccagcccggcagagacggcguggugagagugugggacgugaagaaccccgaccugcugaacaaccaguucggcaccaugcccagccugacccuggccugccugaccaagcagggccagguggaccugaacgacgccgugcuggcccugaccgaccugggccugaucuacaccgccaaguaccccaacagcagcgaccuggacagacugagccagagccaccccauccugaacaugguggacaccaagaagagcagccugaacaucagcggcuacaacuucagccugggcgccgccgugaaggccggcgccugcaugcuggacggcggcaacaugcuggagaccaucaaggugaccccccagaccauggacggcauccugaagagcauccugaaggugaagagaagccugggcauguucgugagcgacacccccggcgagagaaaccccuacgagaacauccuguacaagaucugccugagcggcgacggcuggcccuacaucgccagcagaaccagcaucgugggcagagccugggagaacaccaccguggaccuggagagcgacggcaagccccagaagaugggcaccaccggcagcaacaagagccugcagagcgccggcuuccccaccggccugaccuacagccagcugaugacccugaaggacagcaugaugcagcuggaccccagcgccaagaccuggaucgacaucgagggcagacccgaggaccccguggagaucgcccuguaccagcccaugagcggcugcuacauccacuucuucagagagcccaccgaccugaagcaguucaagcaggacgccaaguacagccacggcaucgacguggccgaccuguuccccgcccagcccggccugaccagcgccgugaucgaggcccugcccagaaacauggugcugaccugccagggcagcgacgacaucaagaagcugcuggacagccagggcagaagagacaucaagcugaucgacaucgcccugagcaaggccgacagcagaaaguucgagaacguggugugggaccagugcaaggaccugugccacaugcacaccggcguggugguggagaagaagaagagaggcggcaaggaggagaucaccccccacugcgcccugauggacugcaucauguacgacgccgccgugagcggcggccugaacauccccgugcugagagccgugcugcccagagacaugguguucagaaccagcagccccaagguggugcuguga

SEQ ID NO: 8826 - RNA, 1710 nt, Artificial Sequence
  derived and/or modified CDS sequence (opt4) from LASV(ISTH1129-NIG-2012;Clade II)__AIT17475__NP
augagcgccagcaaggaggugaagagcuuccuguggacccagagccugagaagagagcugagcggcuacugcagcagcaucaagcugcagguggugaaggacgcccaggcccugcugcacggccuggacuucagcgaggugagcaacgugcagagacugaugagaaagcagaagagagacgacagcgaccugaagagacugagagaccugaaccaggccgugaacaaccugguggagcugaagagcacccagcagaagagcgugcugagagugggcacccugaccagcgacgaccugcugacccuggccgccgaccuggagaagcugaagagcaaggugaucagaaccgagagaccccugagcagcggcguguacaugggcaaccugagcgcccagcagcuggagcagagaagagcccugcugagcaugaucggcauggugggcggcgcccagggcacccagcccggcagagacggcguggugagagugugggacgugaagaaccccgaccugcugaacaaccaguucggcaccaugcccagccugacccuggccugccugaccaagcagggccagguggaccugaacgacaccgugcuggcccugaccgaccugggccugaucuacaccgccaaguaccccaacagcagcgaccuggacagacugagccagagccaccccauccugaacaugguggacaccaagaagagcagccugaacaucagcggcuacaacuucagccugggcgccgccgugaaggccggcgccugcaugcuggacggcggcaacaugcuggagaccaucaaggugaccccccagaccauggacggcauccugaagagcauccugaaggugaagagaagccugggcauguucgugagcgacacccccggcgagagaaaccccuacgagaacauccuguacaagaucugccugagcggcgacggcuggcccuacaucgccagcagaaccagcaucgugggcagagccugggagaacaccaccguggaccuggagagcgacggcaagccccagaaggugggcaccgccggcagcaacaagagccugcagagcgccggcuuccccaccggccugaccuacagccagcugaugacccugaaggacagcaugaugcagcuggaccccagcgccaagaccuggaucgacaucgagggcagacccgaggaccccguggagaucgcccuguaccagcccaucagcggcugcuacauccacuucuucagagagcccaccgaccugaagcaguucaagcaggacgccaaguacagccacggcaucgacgugaccgaccuguuccccgcccagcccggccugaccagcgccgugaucgaggcccugcccagaaacauggugcugaccugccagggcagcgacgacaucaagagacugcuggacagccagggcagaagagacaucaagaucaucgacaucgcccugagcaaggccgacagcagaagauucgagaacgccgugugggaccagugcaaggaccugugccacaugcacaccggcguggugguggagaagaagaagagaggcggcaaggaggagaucaccccccacugcgcccugauggacugcaucauguacgacgccgccgugagcggcggccugaacauccccgugcugagagccgugcugcccagagacaugguguucagaaccagcagccccaagguggugcuguga

SEQ ID NO: 8827 - RNA, 1710 nt, Artificial Sequence
  derived and/or modified CDS sequence (opt4) from LASV(ISTH1137-NIG-2011;Clade II)__AIT17479__NP
augagcgccagcaaggaggugaagagcuuccuguggacccagagccugagaagagagcugagcggcuacugcagcaacaucaagcugcagguggugaaggacgcccaggcccugcugcacggccuggacuucagcgaggugagcaacgugcagagacugaugagaaagcagaagagagacgacagcgaccugaagagacugagagaccugaaccaggccgugaacaaccugguggagcugaagagcacccagcagaagagcgugcugagagugggcacccugaccagcgacgaccugcugacccuggccgccgaccuggagaagcugaagagcaaggugaucagaaccgagagaccccugagcagcggcguguacaugggcaaccugagcacccagcagcuggagcagagaagagcccugcugaacaugaucggcauggugggcggcgcccagggcacccagcccggcagagacggcguggugagagugugggacgugaagaaccccgaccugcugaacaaccaguucggcaccaugcccagccugacccuggccugccugaccaagcagggccagguggaccugaacgacgccgugcuggcccugaccgaccugggccugaucuacaccgccaaguaccccaacagcagcgaccuggacagacugagccagagccaccccauccugaacaugguggacaccaagaagagcagccugaacaucagcggcuacaacuucagccugggcgccgccgugaaggccggcgccugcaugcuggacggcggcaacaugcuggagaccaucaaggugaccccccagaccauggacggcauccugaagagcauccugaaggugaagagaagccugggcauguucgugagcgacacccccggcgagagaaaccccuacgagaacauccuguacaagaucugccugagcggcgacggcuggcccuacaucgccagcagaaccagcaucgugggcagagccugggagaacaccaccguggaccuggagagcgacggcaagccccagaaggugggcaccgccggcagcaacaagagccugcagagcgccggcuuccccaccggccugaccuacagccagcugaugacccugaaggacagcaugaugcagcuggaccccagcgccaagaccuggaucgacaucgagggcagacccgaggaccccguggagaucgcccuguaccagcccaugagcggcugcuacauccacuucuucagagagcccaccgaccugaagcaguucaagcaggacgccaaguacagccacggcaucgacguggccgaccuguuccccgcccagcccggccugaccagcgccgugaucgaggcccugcccagaaacauggugcugaccugccagggcagcgacgacaucaagaagcugcuggacagccagggcagaaaggacaucaagcugaucgacaucgcccugagcaagguggacagcagaagauucgagaacgccgugugggaccagugcaaggaccugugccacaugcacaccggcguggugguggagaagaagaagagaggcggcaaggaggagaucaccccccacugcgcccugauggacugcaucauguacgacgccgccgugagcggcggccugaacauccccgugcugagagccgugcugcccagagacaugguguucagaaccagcagccccaagguggugcuguga

SEQ ID NO: 8828 - RNA, 1710 nt, Artificial Sequence
  derived and/or modified CDS sequence (opt4) from LASV(ISTH2010-NIG-2012;Clade II)__AIT17483__NP
augagcgccagcaaggaggugaagagcuuccuguggacccagagccugagaagagagcugagcggcuacugcagcaacaucaagcugcagguggugaaggacgcccaggcccugcugcacggccuggacuucagcgaggugagcaacgugcagagacugaugagaaagcagaagagagacgacagcgaccugaagagacugagagaccugaaccaggccgugaacaaccugguggagcugaagagcacccagcagaagagcauccugagagugggcacccugaccagcgacgaccugcugacccuggccgccgaccuggagaagcugaagagcaaggugaucagaaccgagagaccccugagcagcggcguguacaugggcaaccugagcacccagcagcuggagcagagaagagcccugcugaaccugaucggcauggugggcggcgcccagggcacccagcccggcagagacggcguggugagagugugggacgugaagaaccccgaccugcugaacaaccaguucggcaccaugcccagccugacccuggccugccugaccaagcagggccagguggaccugaacgacgccgugcuggcccugaccgaccugggccugaucuacaccgccaaguaccccaacagcagcgaccuggacagacugagccagagccaccccauccugaacaugguggacaccaagaagagcagccugaacaucagcggcuucaacuucagccugggcgccgccgugaaggccggcgccugcaugcuggacggcggcaacaugcuggagaccaucaaggugaccccccagaccauggacggcauccugaagagcauccugaaggugaagaagagccugggcauguucgugagcgacacccccggcgagagaaaccccuacgagaacauccuguacaagaucugccugagcggcgacggcuggcccuacaucgccagcagaaccagcaucgugggcagagccugggagaacaccaccguggaccuggagagcgacggcaagccccacaaggugggcaccgccggcagcaacaagagccugcagagcgccggcuuccccaccggccugaccuacagccagcugaugacccugaaggacagcaugaugcagcuggaccccagcgccaagaccuggaucgacaucgagggcagacccgaggaccccguggagaucgcccuguaccagcccaugagcggcugcuacauccacuucuucagagagcccaccgaccugaagcaguucaagcaggacgccaaguacagccacggcaucgacguggccgaccuguuccccgcccagcccggccugaccagcgccgugaucgaggcccugcccagaaacauggugcugaccugccagggcagcgacgacaucaagagacugcuggacagccagggcagaagagacaucaagcugaucgacaucgcccugagcaaggccgacagcagaagauucgagaacgccgugugggaccagugcaaggaccugugccacaugcacaccggcguggugguggagaagaagaagagaggcggcaaggaggagaucaccccccacugcgcccugauggacugcaucauguacgacgccgccgugagcggcggccugaacauccccgugcugagagccgugcugcccagagacaugguguucagaaccagcagccccaagguggugcuguga

SEQ ID NO: 8829 - RNA, 1710 nt, Artificial Sequence
  derived and/or modified CDS sequence (opt4) from LASV(ISTH2020-NIG-2012;Clade II)__AIT17491__NP
augagcgccagcaaggaggugaagagcuuccuguggacccagagccugagaagagagcugagcggcuacugcagcaacaucaagcugcagguggugaaggacgcccaggcccugcugcacggccuggacuucagcgaggugagcaacgugcagagacugaugagaaagcagaagagagacgacggcgaccugaagagacugagagaccugaaccaggccgugaacaaccugguggagcugaagagcacccagcagaagagcgugcugagagugggcacccugaccagcgacgaccugcugacccuggccgccgaccuggagaagcugaagagcaaggugaucagaaccgagagaccccugagcagcggcguguacaugggcaaccugagcacccagcagcuggagcagagaagagcccugcugagcaugaucggcauggugggcggcgccagaggcacccagcccggcagagacggcguggugagagugugggacgugaagaaccccgaccugcugaacaaccaguucggcaccaugcccagccugacccuggccugccugaccaagcagggccagguggaccugaacgacguggugcuggcccugaccgaccugggccugaucuacaccgccaaguaccccaacagcagcgaccuggacagacugagccagagccaccccauccugaacaugguggacaccaagaagagcagccugaacaucagcggcuacaacuucagccugggcgccgccgugaaggccggcgccugcaugcuggacggcggcaacaugcuggagaccaucaaggugaccccccagaccauggacggcauccugaagagcauccugaaggugaagaagagccugggcauguucgugagcgacacccccggcgagagaaaccccuacgagaacauccuguacaagaucugccugagcggcgacggcuggcccuacaucgccagcagaaccagcaucgugggcagagccugggagaacaccaccguggaccuggagagcgacggcaagccccagaaggugggcgccgccggcagcaacaagagccugcagagcgccggcuuccccaccggccugaccuacagccagcugaugacccugaaggacagcaugaugcagcuggaccccagcgccaagaccuggaucgacaucgagggcagacccgaggaccccguggagaucgcccuguaccagcccaugagcggcugcuacauccacuucuucagagagcccaccgaccugaagcaguucaagcaggacgccaaguacagccacggcaucgacgugaccgaccuguucagcgcccagcccggccugaccagcgccgugaucgaggcccugcccagaaacauggugcugaccugccagggcagcgacgacaucaagagacugcuggacagccagggcagaagagacaucaagcugaucgacaucgcccugagcaaggccgacagcagaagauucgagaacgccgugugggaccagugcaaggaccugugccacaugcacaccggcguggugguggagaagaagaagagaggcggcaaggaggagaucaccccccacugcgcccugauggacugcaucauguacgacgccgccgugagcggcggccugaacauccccgugcugagagccgugcugcccagagacaugguguucagaaccagcagccccaagguggugcuguga

SEQ ID NO: 8830 - RNA, 1710 nt, Artificial Sequence
  derived and/or modified CDS sequence (opt4) from LASV(ISTH2025-NIG-2012;Clade II)__AIT17495__NP
augagcgccagcaaggaggugaagagcuuccuguggacccagagccugagaagagagcugagcggcuacugcagcaacaucaagcugcagguggugaaggacgcccaggcccugcugcacggccuggacuucagcgaggugagcaacgugcagagacugaugagaaagcagaagagagacgacagcgaccugaagagacugagagaccugaaccaggccgugaacaaccugguggagcugaagagcacccagcagaagagcauccugagagugggcacccugaccagcgacgaccugcugacccuggccgccgaccuggagaagcugaagagcaaggugaucagaaccgagagaccccugagcagcggcguguacaugggcaaccugagcacccagcagcuggagcagagaagagcccugcugaacaugaucggcauggugggcggcgcccagagcgcccagcccggcagagacggcguggugagagugugggacgugaagaaccccgaccugcugaacaaccaguucggcaccaugcccagccugacccuggccugccugaccaagcagggccagguggaccugaacgacgccgugcuggcccugaccgaccugggccugaucuacaccgccaaguaccccaacagcagcgaccuggacagacugagccagagccaccccauccugaacaugguggacaccaagaagagcagccugaacaucagcggcuucaacuucagccugggcgccgccgugaaggccggcgccugcaugcuggacggcggcaacaugcuggagaccaucaaggugaccccccagaccauggacggcauccugaagagcauccugaaggugaagagaagccugggcauguucgugagcgacgcccccggcgagagaaaccccuacgagaacauccuguacaagaucugccugagcggcgacggcuggcccuacaucgccagcagaaccagcaucgugggcagagccugggagaacaccaccguggaccuggagagcgacggcaagccccagaaggugggcaccgccggcagcaacaagagccugcagagcgccggcuuccccaccggccugaccuacagccagcugaugacccugaaggacagcaugaugcagcuggaccccagcgccaagaccuggaucgacaucgagggcagacccgaggaccccguggagaucgcccuguaccagcccaugagcggcugcuacauccacuucuucagagagcccaccgaccugaagcaguucaagcaggacgccaaguacagccacggcaucgacguggccgaccuguuccccgcccagcccggccugaccagcgccgugaucgaggcccugcccagaaacauggugcugaccugccagggcagcgacgacaucaagaagcugcuggacagccagggcagaagagacaucaagcugaucgacaucgcccugagcaaggccgacagcagaagauucgagaacgccgugugggaccagugcaaggaccugugccacaugcacaccggcguggugguggagaagaagaagagaggcggcaaggaggagaucaccccccacugcgcccugauggacugcaucauguacgacgccgccgugagcggcggccugaacauccccgugcugagagccgugcugcccagagacaugguguucagaaccagcagccccaagguggugcuguga

SEQ ID NO: 8831 - RNA, 1710 nt, Artificial Sequence
  derived and/or modified CDS sequence (opt4) from LASV(ISTH2031-NIG-2012;Clade II)__AIT17499__NP
augagcgccagcaaggaggugaagagcuuccuguggacccagagccugagaagagagcugagcggcuacugcagcagcaucaagcugcagguggugaaggacgcccaggcccugcugcacggccuggacuucagcgaggugagcaacgugcagagacugaugagaaagcagaagagagacgacagcgaccugaagagacugagagaccugaaccaggccgugaacaaccugguggagcugaagagcacccagcagaagagcauccugagagugggcacccugaccagcgacgaccugcugacccuggccgccgaccuggagaagcugaagagcaaggugaucagaaccgagagaccccugagcagcggcguguacaugggcaaccugagcacccagcagcuggagcagagaagagcccugcugaacaucaucggcauggugggcggcgcccagggcacccagcccggcagagacggcguggugagagugugggacgugaagaaccccgaccugcugaacaaccaguucggcaccaugcccagccugacccuggccugccugaccaagcagggccagguggaccugaacgacgccgugcuggcccugaccgaccugggccugaucuacaccgccaaguaccccaacagcagcgaccuggacagacugagccagagccaccccauccugaacaugguggacaccaagaagagcagccugaacaucagcggcuacaacuucagccugggcgccgccgugaaggccggcgccugcaugcuggacggcggcaacaugcuggagaccaucaaggugaccccccagaccauggacggcauccugaagagcauccugaaggugaagagaagccugggcauguucgugagcgacacccccggcgagagaaaccccuacgagaacauccuguacaagaucugccugagcggcgacggcuggcccuacaucgccagcagaaccagcaucgugggcagagccugggagaacaccaccguggaccuggagagcgacggcaagccccagaaggugggcgccgccggcagcaacaagagccugcagagcgccggcuuccccaccggccugaccuacagccagcugaugacccugaaggacagcaugaugcagcuggaccccagcgccaagaccuggaucgacaucgagggcagacccgaggaccccguggagaucgcccuguaccagcccaugagcggcugcuacauccacuucuucagagagcccaccgaccugaagcaguucaagcaggacgccaaguacagccacggcaucgacguggccgaccuguuccccgcccagcccggccugaccagcgccgugaucgaggcccugcccagaaacauggugcugaccugccagggcagcgacgacgugaagagacugcuggacagccagggcagaagagacaucaagcugaucgacaucgcccugagcaaggccgacagcagaagauucgagaacgccgugugggaccagugcaaggaccugugccacaugcacaccggcguggugguggagaagaagaagagaggcggcaaggaggagaucaccccccacugcgcccugauggacugcaucauguacgacgccgccgugagcggcggccugaacauccccgugcugagagccgugcugcccagagacaugguguucagaaccagcagccccaagguggugcuguga

SEQ ID NO: 8832 - RNA, 1710 nt, Artificial Sequence
  derived and/or modified CDS sequence (opt4) from LASV(ISTH2037-NIG-2012;Clade II)__AIT17503__NP
augagcagcagcaaggaggugaagagcuuccuguggacccagagccugagaagagagcugagcggcuacugcagcagcaucaagcugcagguggugaaggacgcccaggcccugcugcacggccuggacuucagcgaggugagcaacgugcagagacugaugagaaagcagaagagagacgacagcgaccugaagagacugagagaccugaaccaggccgugaacaaccugguggagcugaagagcacccagcagaagagcauccugagagugggcacccugaccagcgacgaccugcugacccuggccgccgaccuggagaagcugaagagcaaggugaucagaaccgagagaccccugagcagcggcguguacaugggcaaccugagcgcccagcagcuggagcagagaagagcccugcugaacaugaucggcauggugggcggcgcccagggcacccagcccggcagagacggcguggugagagugugggacgugaagaaccccgaccugcugaacaaccaguucggcaccaugcccagccugacccuggccugccugaccaagcagggccagguggaccugaacgacgccgugcuggcccugaccgaccugggccugaucuacaccgccaaguaccccaacagcagcgaccuggacagacugagccagagccaccccauccugaacaugguggacaccaagaagagcagccugaacaucagcggcuacaacuucagccugggcgccgccgugaaggccggcgccugcaugcuggacggcggcaacaugcuggagaccaucaaggugaccccccagaccauggacggcauccugaagagcauccugaaggugaagaagagccugggcauguucgugagcgacacccccggcgagagaaaccccuacgagaacauccuguacaagaucugccugagcggcgacggcuggcccuacaucgccagcagaaccagcaucgugggcagagccugggagaacaccaccguggaccuggagagcgacggcaagccccagaaggugggcaccgccggcagcaacaagagccugcagagcgccggcuuccccaccggccugaccuacagccagcugaugacccugaaggacagcaugaugcagcuggaccccagcgccaagaccuggaucgacaucgagggcagacccgaggaccccguggagaucgcccuguaccagcccaugagcggcugcuacauccacuucuucagagagcccaccgaccugaagcaguucaagcaggacgccaaguacagccacggcaucgacguggccgaccuguuccccgcccagcccggccugaccagcgccgugaucgaggcccugcccagaaacauggugcugaccugccagggcagcgacgacaucaagagacugcuggacagccagggcagaagagacaucaagcugaucgacaucgcccugagcaaggccgacagcagaagauucgagaacgccgugugggaccagugcaaggaccugugccacaugcacaccggcguggugguggagaagaagaagagaggcggcaaggaggagaucaccccccacugcgcccugauggacugcaucauguacgacgccgccgugagcggcggccugaacauccccgugcugagagccgugcugcccagagacaugguguucagaaccagcagccccaagguggugcuguga

SEQ ID NO: 8833 - RNA, 1710 nt, Artificial Sequence
  derived and/or modified CDS sequence (opt4) from LASV(ISTH2042-NIG-2012;Clade II)__AIT17507__NP
augagcgccagcaaggaggugaagagcuuccuguggacccagagccugagaagagagcugagcggcuacugcagcaacaucaagcugcagguggugaaggacgcccaggcccugcugcacggccuggacuucagcgaggugagcaacgugcagagacugaugagaaagcagaagagagacgacagcgaccugaagagacugagagaccugaaccaggccgugaacaaccugguggagcugaagagcacccagcagaagagcauccugagagugggcacccugaccagcgacgaccugcugacccuggccgccgaccuggagaagcugaagagcaaggugaucagaaccgagagaccccugagcagcggcguguacaugggcaaccugagcacccagcagcuggagcagagaagagcccugcugaaccugaucggcauggugggcggcgcccagggcacccagcccggcagagacggcguggugagagugugggacgugaagaaccccgaccugcugaacaaccaguucggcaccaugcccagccugacccuggccugccugaccaagcagggccagguggaccugaacgacgccgugcuggcccugaccgaccugggccugaucuacaccgccaaguaccccaacagcagcgaccuggacagacugagccagagccaccccauccugaacaugguggacaccaagaagagcagccugaacaucagcggcuucaacuucagccugggcgccgccgugaaggccggcgccugcaugcuggacggcggcaacaugcuggagaccaucaaggugaccccccagaccaucgacggcauccugaagagcauccugaaggugaagaagagccugggcauguucgugagcgacacccccggcgagagaaaccccuacgagaacauccuguacaagaucugccugagcggcgacggcuggcccuacaucgccagcagaaccagcaucgugggcagagccugggagaacaccaccguggaccuggagagcgacggcaagccccacaaggugggcaccgccggcagcaacaagagccugcagagcgccggcuuccccaccggccugaccuacagccagcugaugacccugaaggacagcaugaugcagcuggaccccagcgccaagaccuggaucgacaucgagggcagacccgaggaccccguggagaucgcccuguaccagcccaugagcggcugcuacauccacuucuucagagagcccaccgaccugaagcaguucaagcaggacgccaaguacagccacggcaucgacguggccgaccuguuccccgcccagcccggccugaccagcgccgugaucgaggcccugcccagaaacauggugcugaccugccagggcagcgacgacaucaagagacugcuggacagccagggcagaagagacaucaagcugaucgacaucgcccugagcaagguggacagcagaagauucgagaacgccgugugggaccagugcaaggaccugugccacaugcacaccggcguggugguggagaagaagaagagaggcggcaaggaggagaucaccccccacugcgcccugauggacugcaucauguacgacgccgccgugagcggcggccugaacauccccgugcugagagccgugcugcccagagacaugguguucagaaccagcagccccaagguggugcuguga

SEQ ID NO: 8834 - RNA, 1710 nt, Artificial Sequence
  derived and/or modified CDS sequence (opt4) from LASV(ISTH2046-NIG-2012;Clade II)__AIT17511__NP
augagcgccagcaaggaggugaagagcuuccuguggacccagagccugagaagagagcugagcggcuacugcagcaacaucaagcugcagguggugaaggacgcccaggcccugcugcacggccuggacuucagcgaggugagcaacgugcagagacugaugagaaagcagaagagagacgacggcgaccugaagagacugagagaccugaaccaggccgugaacaaccugguggagcugaagagcacccagcagaagagcauccugagagugggcacccugaccagcgacgaccugcugacccuggccgccgaccuggagaagcugaagagcaaggugaucagaaccgagagaccccugagcagcggcguguacaugggcaaccugagcacccagcagcuggagcagagaagagcccugcugaacaugaucggcauggugggcggcgcccagggcacccagcccggcagagacggcguggugagagugugggacgugaagaaccccgaccugcugaacaaccaguucggcaccaugcccagccugacccuggccugccugaccaagcagggccagguggaccugaacgacgccgugcuggcccugaccgaccugggccugaucuacaccgccaaguaccccaacagcagcgaccuggacagacugagccagagccaccccauccugaacaugguggacaccaagaagagcagccugaacaucagcggcuacaacuucagccugggcgccgccgugaaggccggcgccugcaugcuggacggcggcaacaugcuggagaccaucaaggugaccccccagaccaucgacggcauccugaagagcauccugaaggugaagaagagccugggcauguucgugagcgacacccccggcgagagaaaccccuacgagaacauccuguacaagaucugccugagcggcgacggcuggcccuacaucgccagcagaaccagcaucgugggcagagccugggagaacaccaccguggaccuggagagcgacggcaagccccagaaggugggcaccgccggcagcaacaagagccugcagagcgccggcuuccccaccggccugaccuacagccagcugaugacccugaaggacagcaugaugcagcuggaccccagcgccaagaccuggaucgacaucgagggcagacccgaggaccccguggagaucgcccuguaccagcccaugagcggcugcuacauccacuucuucagagagcccaccgaccugaagcaguucaagcaggacgccaaguacagccacggcaucgacgugaccgaccuguucagcgcccagcccggccugaccagcgccgugaucgaggcccugcccagaaacauggugcugaccugccagggcagcgacgacaucaagagacugcuggacagccagggcagaagagacaucaagcugaucgacaucgcccugagcaaggccgacagcagaagauucgagaacgccgugugggaccagugcaaggaccugugccacaugcacaccggcguggugguggagaagaagaagagaggcggcaaggaggagaucaccccccacugcgcccugauggacugcaucauguacgacgccgccgugagcggcggccugaacauccccgugcugagagccgugcugcccagagacaugguguucagaaccagcagccccaagguggugcuguga

SEQ ID NO: 8835 - RNA, 1710 nt, Artificial Sequence
  derived and/or modified CDS sequence (opt4) from LASV(ISTH2050-NIG-2012;Clade II)__AIT17515__NP
augagcgccagcaaggaggugaagagcuuccuguggacccagagccugagaagagagcugagcggcuacugcagcagcaucaagcugcagguggugaaggacgcccaggcccugcugcacggccuggacuucagcgaggugagcaacgugcagagacugaugagaaagcagaagagagacgacagcgaccugaagagacugagagaccugaaccaggccgugaacaaccugguggagcugaagagcacccagcagaagagcauccugagagugggcacccugaccagcgacgaccugcugacccuggccgccgaccuggagaagcugaagagcaaggugaucagaaccgagagaccccugagcagcggcguguacaugggcaaccugagcacccagcagcuggagcagagaagagcccugcugaacaugaucggcauggugggcggcgcccagggcacccagcccggcagagacggcguggugagagugugggacgugaagaaccccgaccugcugaacaaccaguucggcaccaugcccagccugacccuggccugccugaccaagcagggccagguggaccugaacgacgccgugcuggcccugaccgaccugggccugaucuacaccgccaaguaccccaacagcagcgaccuggacagacugagccagagccaccccauccugaacaugguggacaccaagaagagcagccugaacaucagcggcuacaacuucagccugggcgccgccgugaaggccggcgccugcaugcuggacggcggcaacaugcuggagaccaucaaggugaccccccagaccauggacggcauccugaagagcauccugaaggugaagagaagccugggcauguucgugagcgacacccccggcgagagaaaccccuacgagaacauccuguacaagaucugccugagcggcgacggcuggcccuacaucgccagcagaaccagcaucgugggcagagccugggagaacaccaccguggaccuggagagcgacggcaagccccagaaggugggcgccgccggcagcagcaagagccugcagagcgccggcuuccccaccggccugaccuacagccagcugaugacccugaaggacagcaugaugcagcuggaccccagcgccaagaccuggaucgacaucgagggcagacccgaggaccccguggagaucgcccuguaccagcccgugagcggcugcuacauccacuucuucagagagcccaccgaccugaagcaguucaagcaggacgccaaguacagccacggcaucgacguggccgaccuguuccccgcccagcccggccugaccagcgccgugaucgaggcccugcccagaaacauggugcugaccugccagggcagcgacgacaucaagagacugcuggacagccagggcagaagagacaucaagcugaucgacaucgcccugagcaaggccgacagcagaagauucgagaacgccgugugggaccagugcaaggaccugugccacaugcacaccggcguggugguggagaagaagaagagaggcggcaaggaggagaucaccccccacugcgcccugauggacugcaucauguacgacgccgccgugagcggcggccugaacauccccgugcugagagccgugcugcccagagacaugguguucagaaccagcagccccaagguggugcuguga

SEQ ID NO: 8836 - RNA, 1710 nt, Artificial Sequence
  derived and/or modified CDS sequence (opt4) from LASV(ISTH2057-NIG-2012;Clade II)__AIT17519__NP
augagcgccagcaaggaggugaagagcuuccuguggacccagagccugagaagagagcugagcggcuacugcagcaacaucaagcugcagguggugaaggacgcccaggcccugcugcacggccuggacuucagcgaggugagcaacgugcagagacugaugagaaagcagaagagagacgacagcgaccugaagagacugagagaccugaaccaggccgugaacaaccugguggagcugaagagcacccagcagaagagcauccugagagugggcacccugaccagcgacgaccugcugacccuggccgccgaccuggagaagcugaagagcaaggugaucagaaccgagagaccccugagcagcggcguguacaugggcaaccugagcgcccagcagcuggagcagagaagagcccugcugaacaugaucggcauggugggcggcgcccagggcacccagcccggcagagacggcguggugagagugugggacgugaagaaccccgaccugcugaacaaccaguucggcaccaugcccagccugacccuggccugccugaccaagcagggccagguggaccugaacgacgccgugcuggcccugaccgaccugggccugaucuacaccgccaaguaccccaacagcagcgaccuggacagacugagccagagccaccccauccugaacaugguggacaccaagaagagcagccugaacaucagcggcuucaacuucagccugggcgccgccgugaaggccggcgccugcaugcuggacggcggcaacaugcuggagaccaucaaggugaccccccagaccauggacggcauccugaagagcauccugaaggugaagagaagccugggcauguucgugagcgacacccccggcgagagaaaccccuacgagaacauccuguacaagaucugccugagcggcgacggcuggcccuacaucgccagcagaaccagcaucgugggcagagccugggagaacaccaccguggaccuggagagcgacggcaagccccagaaggugggcaccgccggcagcaacaagagccugcagagcgccggcuuccccaccggccugaccuacagccagcugaugacccugaaggacagcaugaugcagcuggaccccagcgccaagaccuggaucgacaucgagggcagacccgaggaccccguggagaucgcccuguaccagcccaugagcggcugcuacauccacuucuucagagagcccaccgaccugaagcaguucaagcaggacgccaaguacagccacggcaucgacguggccgaccuguuccccgcccagcccggccugaccagcgccgugaucgaggcccugcccagaaacauggugcugaccugccagggcagcgacgacaucaagagacugcuggacagccagggcagaagagacaucaagcugaucgacaucgcccugagcaaggccgacagcagaagauucgagaacgccgugugggaccagugcaaggaccugugccacaugcacaccggcguggugguggagaagaagaagagaggcggcaaggaggagaucaccccccacugcgcccugauggacugcaucauguacgacgccgccgugagcggcggccugaacauccccgugcugagagccgugcugcccagagacaugguguucagaaccagcagccccaagguggugcuguga

SEQ ID NO: 8837 - RNA, 1710 nt, Artificial Sequence
  derived and/or modified CDS sequence (opt4) from LASV(ISTH2064-NIG-2012;Clade II)__AIT17525__NP
augagcgccagcaaggaggugaagagcuuccuguggacccagagccugagaagagagcugagcggcuacugcagcagcaucaagcugcagguggugaaggacgcccaggcccugcugcacggccuggacuucagcgaggugagcaacgugcagagacugaugagaaagcagagaagagacgacagcgaccugaagagacugagagaccugaaccaggccgugaacaaccugguggagcugaagagcacccagcagaagagcauccugagagugggcacccugaccagcgacgaccugcugacccuggccgccgaccuggagaagcugaagagcaaggugaucagaaccgagagaccccugagcagcggcguguacaugggcaaccugagcacccagcagcuggagcagagaagagcccugcugaacaugaucggcauggugggcggcgcccagggcacccagcccggcagagacggcguggugagagugugggacgugaagaaccccgaccugcugaacaaccaguucggcaccaugcccagccugacccuggccugccugaccaagcagggccagguggaccugaacgacgccgugcuggcccugaccgaccugggccugaucuacaccgccaaguaccccaacagcagcgaccuggacagacugagccagagccaccccauccugaacaugguggacaccaagaagagcagccugaacaucagcggcuacaacuucagccugggcgccgccgugaaggccggcgccugcaugcuggacggcggcaacaugcuggagaccaucaaggugaccccccagaccguggacggcauccugaagagcauccugaaggugaagagaagccugggcauguucgugagcgacacccccggcgagagaaaccccuacgagaacauccuguacaagaucugccugagcggcgacggcuggcccuacaucgccagcagaaccagcaucgugggcagagccugggagaacaccaccguggaccuggagagcgacggcaagccccagaaggugggcaccgccggcagcaacaagagccugcagagcgccggcuuccccaccggccugaccuacagccagcugaugacccugaaggacagcaugaugcagcuggaccccagcgccaagaccuggaucgacaucgagggcagacccgaggaccccguggagaucgcccuguaccagcccaugagcggcugcuacauccacuucuucagagagcccaccgaccugaagcaguucaagcaggacgccaaguacagccacggcaucgacguggccgaccuguuccccacccagcccggccugaccagcgccgugaucgaggcccugcccagaaacauggugcugaccugccagggcagcgacgacaucaagagacugcuggacagccagggcagaagagacaucaagcugaucgacaucgcccugagcaaggccgacagcagaaaguucgagaacgccgugugggaccagugcaaggaccugugccacaugcacaccggcguggugguggagaagaagaagagaggcggcaaggaggagaucaccccccacugcgcccugauggacugcaucauguacgacgccgccgugagcggcggccugaacauccccgugcugagagccgugcugcccagagacaugguguucagaaccagcagccccaagguggugcuguga

SEQ ID NO: 8838 - RNA, 1710 nt, Artificial Sequence
  derived and/or modified CDS sequence (opt4) from LASV(ISTH2065-NIG-2012;Clade II)__AIT17529__NP
augagcgccagcaaggaggugaagagcuuccuguggacccagagccugagaagagagcugagcggcuacugcagcaacaucaagcugcagguggugaaggacgcccaggcccugcugcacggccuggacuucagcgaggugaacaacgugcagagacugaugagaaagcagaagagagacgacagcgaccugaagagacugagagaccugaaccaggccgugaacaaccugguggagcugaagagcacccagcagaagagcauccugagagugggcacccugaccagcgacgaccugcugacccuggccgccgaccuggagaagcugaagagcaaggugaucagaaccgagagaccccugagcagcggcguguacaugggcaaccugagcacccagcagcuggagcagagaagagcccugcugaacaugaucggcauggccggcggcacccagggcacccagcccggcagagacggcguggugagagugugggacgugaagaaccccgaccugcugaacaaccaguucggcaccaugcccagccugacccuggccugccugaccaagcagggccagguggaccugaacgacgccgugcuggcccugaccgaccugggccugaucuacaccgccaaguaccccaacagcagcgaccuggacagacugagccagagccaccccauccugaacaugguggacaccaagaagagcagccugaacaucagcggcuacaacuucagccugggcgccgccgugaaggccggcgccugcaugcuggacggcggcaacaugcuggagaccaucaaggugaccccccagaccauggacggcauccugaagagcauccugaaggugaagagaagccugggcauguucgugagcgacacccccggcgagagaaaccccuacgagaacauccuguacaagaucugccugagcggcgacggcuggcccuacaucgccagcagaaccagcaucgugggcagagccugggagaacaccaccguggaccuggagagcgacggcaagccccagaaggugggcaccgccggcagcaacaagagccugcagagcgccggcuuccccaccggccugaccuacagccagcugaugacccugaaggacagcaugaugcagcuggaccccagcgccaagaccuggaucgacaucgagggcagacccgaggaccccguggagaucgcccuguaccagcccaugagcggcugcuacauccacuucuucagagagcccaccgaccugaagcaguucaagcaggacgccaaguacagccacggcaucgacguggccgaccuguuccccgcccagcccggccugaccagcgccgugaucgaggcccugcccagaaacauggugcugaccugccagggcagcgacgacaucaagaagcugcuggacagccagggcagaagagacaucaagcugaucgacaucagccugagcaagaucgacagcagaaaguucgagaacgccgugugggaccagugcaaggaccugugccacaugcacaccggcguggugguggagaagaagaagagaggcggcaaggaggagaucaccccccacugcgcccugauggacugcaucauguucgacgccgccgugagcggcggccugaacauccccgugcugagagccgugcugcccagagacaugguguucagaaccagcagccccaagguggugcuguga

SEQ ID NO: 8839 - RNA, 1710 nt, Artificial Sequence
  derived and/or modified CDS sequence (opt4) from LASV(ISTH2094-NIG-2012;Clade II)__AIT17539__NP
augagcgccagcaaggaggugaagagcuuccuguggacccagagccugagaagagagcugagcggcuacugcagcaacaucaagcugcagguggugaaggacgcccaggcccugcugcacggccuggacuucagcgaggugagcaacgugcagagacugaugagaaagcagaagagagacgacggcgaccugaagagacugagagaccugaaccaggccgugaacaaccugguggagcugaagagcacccagcagaagagcgugcugagagugggcacccugaccagcgacgaccugcugauccuggccgccgaccuggagaagcugaagagcaaggugaucagaaccgagagaccccugagcagcggcguguacaugggcaaccugagcacccagcagcuggagcagagaaaggcccugcugagcaugaucggcauggugggcggcgcccagggcacccagcccggcagagacggcguggugagagugugggacgugaagaaccccgaccugcugaacaaccaguucggcaccaugcccagccugacccuggccugccugaccaagcagggccagguggaccugaacgacgccgugcuggcccugaccgaccugggccugaucuacaccgccaaguaccccaacagcagcgaccuggacagacugagccagagccaccccauccugaacaugguggacaccaagaagagcagccugaacaucagcggcuacaacuucagccugggcgccgccgugaaggccggcgccugcaugcuggacggcggcaacaugcuggagaccaucaaggugaccccccagaccauggacggcauccugaagagcauccugaaggugaagagaagccugggcauguucgugagcgacacccccggcgagagaaaccccuacgagaacauccuguacaagaucugccugagcggcgacggcuggcccuacaucgccagcagaaccagcaucgugggcagagccugggagaacaccaccguggaccuggagagcgacggcaagccccagaaggugggcagcgccggcagcaacaagagccugcagagcgccggcuuccccaccggccugaccuacagccagcugaugacccugaaggacagcaugaugcagcuggaccccagcgccaagaccuggaucgacaucgagggcagacccgaggaccccguggagaucgcccuguaccagcccaugagcggcugcuacauccacuucuucagagagcccaccgaccugaagcaguucaagcaggacgccaaguacagccacggcaucgacgugaccgaccuguucagcgcccagcccggccugaccagcgccgugaucgaggcccugcccagaaacauggugcugaccugccagggcagcgacgacaucaagaagcugcuggacagccagggcagaagagacaucaagcugaucgacaucagccugggcaaggccgacagcagaagauucgagaacgccgugugggaccagugcaaggaccugugccacaugcacaccggcguggugguggagaagaagaagagaggcggcaaggaggagaucaccccccacugcgcccugauggacugcaucauguucgacgccgccgugagcggcggccugaacauccccauccugagagccgugcugcccagagacaugguguucagaaccagcagccccaagguggugcuguga

SEQ ID NO: 8840 - RNA, 1710 nt, Artificial Sequence
  derived and/or modified CDS sequence (opt4) from LASV(ISTH2129-NIG-2012;Clade II)__AIT17545__NP
augagcgccagcaaggaggugaagagcuuccuguggacccagagccugagaagagagcugagcggcuacugcagcaacaucaagcugcagguggugaaggacgcccaggcccugcugcacggccuggacuucagcgaggugagcaacgugcagagacugaugagaaagcagaagagagacgacagcgaccugaagagacugagagaccugaaccaggccgugaacaaccugguggagcugaagagcacccagcagaagagcgugcugagagugggcacccugaccagcgacgaccugcugacccuggccgccgaccuggagaagcugaagagcaaggugaucagaaccgagagaccccugagcagcggcguguacaugggcaaccugagcacccagcagcuggagcagagaagagcccugcugaacaugaucggcauggugggcggcgcccagggcacccagcccggcagagacggcguggugagagugugggacgugaagaaccccgaccugcugaacaaccaguucggcaccaugcccagccugacccuggccugccugaccaagcagggccagguggaccugaacgacgccgugcuggcccugaccgaccugggccugaucuacaccgccaaguaccccaacagcagcgaccuggacagacugagccagagccaccccauccugaacaugguggacaccaagaagagcagccugaacaucagcggcuacaacuucagccugggcgccgccgugaaggccggcgccugcaugcuggacggcggcaacaugcuggagaccaucaaggugaccccccagaccauggacggcauccugaagagcauccugaaggugaagaagagccugggcauguucgugagcgacacccccggcgagagaaaccccuacgagaacauccuguacaagaucugccugagcggcgacggcuggcccuacaucgccagcagaaccagcaucgugggcagagccugggagaacaccaccguggaccuggagagcgacggcaagccccagaaggugggcaucgccggcagcaacaagagccugcagagcgccggcuuccccaccggccugaccuacagccagcugaugacccugaaggacagcaugaugcagcuggaccccagcgccaagaccuggaucgacaucgagggcagacccgaggaccccguggagaucgcccuguaccagcccaugagcggcugcuacauccacuucuucagagagcccaccgaccugaagcaguucaagcaggacgccaaguacagccacggcaucgacguggccgaccuguucagcgcccagcccggccugaccagcgccgugaucgaggcccugcccagaaacauggugcugaccugccagggcagcgacgacaucaagagacugcuggacagccagggcagaagagacaucaagcugaucgacaucgcccugagcaaggccgacagcagaaaguucgagaacgccgugugggaccagugcaaggaccugugccacaugcacaccggcguggugguggagaagaagaagagaggcggcaaggaggagaucaccccccacugcgcccugauggacugcaucauguacgacgccgccgugagcggcggccuggacauccccgugcugagagccgugcugcccagagacaugguguucagaaccagcagccccaagguggugcuguga

SEQ ID NO: 8841 - RNA, 1710 nt, Artificial Sequence
  derived and/or modified CDS sequence (opt4) from LASV(ISTH2217-NIG-2012;Clade II)__AIT17549__NP
augagcgccagcaaggaggugaagagcuuccuguggacccagagccugagaagagagcugagcggcuacugcagcaacaucaagcugcagguggugaaggacgcccaggcccugcugcacggccuggacuucagcgaggugagcaacgugcagagacugaugagaaagcagaagagagacgacagcgaccugaagagacugagagaccugaaccaggccgugaacaaccugguggagcugaagagcacccagcagaagagcauccugagagugggcacccugaccagcgacgaccugcugacccuggccgccgaccuggagaagcugaagagcaaggugaucagaaccgagagaccccugagcagcggcguguacaugggcaaccugagcacccagcagcuggagcagagaagagcccugcugaacaugaucggcauggugggcggcgcccagggcacccagcccggcagagacggcguggugagagugugggacgugaagaaccccgaccugcugaacaaccaguucggcaccaugcccagccugacccuggccugccugaccaagcagggccagguggaccugaacgacguggugcuggcccugaccgaccugggccugaucuacaccgccaaguaccccaacagcagcgaccuggacagacugagccagagccaccccauccugaacaugguggacaccaagaagagcagccugaacaucagcggcuacaacuucagccugggcgccgccgugaaggccggcgccugcaugcuggacggcggcaacaugcuggagaccaucaaggugaccccccagaccauggacggcauccugaagagcauccugaaggugaagaagagccugggcauguucgugagcgacacccccggcgagagaaaccccuacgagaacauccuguacaagaucugccugagcggcgacggcuggcccuacaucgccagcagaaccagcaucgugggcagagccugggagaacaccaccguggaccuggagagcgacggcaagccccagaaggugggcaccgugggcagcaacaagagccugcagagcgccggcuuccccaccggccugaccuacagccagcugaugacccugaaggacagcaugaugcagcuggaccccagcgccaagaccuggaucgacaucgagggcagacccgaggaccccguggagaucgcccuguaccagcccaugagcggcugcuacauccacuucuucagagagcccaccgaccugaagcaguucaagcaggacgccaaguacagccacggcaucgacguggccgaccuguuccccgcccagcccggccugaccagcgccgugaucgaggcccugcccagaaacauggugcugaccugccagggcagcgacgacaucaagaagcugcuggacagccagggcagaagagacaucaagcugaucgacaucgcccugagcaaggccgacagcagaaaguucgagaacgccgugugggaccagugcaaggaccugugccacaugcacaccggcguggugguggagaagaagaagagaggcggcaaggaggagaucaccccccacugcgcccugauggacugcaucauguacgacgccgccgugagcggcggccugaacauccccgugcugagagccgugcugcccagagacaugguguucagaaccagcagccccaagguggugcuguga

SEQ ID NO: 8842 - RNA, 1710 nt, Artificial Sequence
  derived and/or modified CDS sequence (opt4) from LASV(ISTH2271-NIG-2012;Clade II)__AIT17553__NP
augagcgccagcaaggaggugaagagcuuccuguggacccagagccugagaagagagcugagcggcuacugcagcagcaucaagcugcagguggugaaggacgcccaggcccugcugcacggccuggacuucagcgaggugagcaacgugcagagacugaugagaaagcagaagagagacgacagcgaccugaagagacugagagaccugaaccaggccgugaacaaccugguggagcugaagagcacccagcagaagagcauccugagagugggcacccugaccagcgacgaccugcugacccuggccgccgaccuggagaagcugaagagcaaggugaucagaaccgagagaccccugagcagcggcguguacaugggcaaccugagcacccagcagcuggagcagagaagagcccugcugaacaugaucggcauggugggcggcgcccagggcacccagcccggcagagacggcguggugagagugugggacgugaagaaccccgaccugcugaacaaccaguucggcaccaugcccagccugacccuggccugccugaccaagcagggccagguggaccugaacgacgccgugcuggcccugaccgaccugggccugaucuacaccgccaaguaccccaacagcagcgaccuggacagacugagccagagccaccccauccugaacaugguggacaccaagaagagcagccugaacaucagcggcuacaacuucagccugggcgccgccgugaaggccggcgccugcaugcuggacggcggcaacaugcuggagaccaucaaggugaccccccagaccauggacggcauccugaagagcauccugaaggugaagagaagccugggcauguucgugagcgacacccccggcgagagaaaccccuacgagaacauccuguacaagaucugccugagcggcgacggcuggcccuacaucgccagcagaaccagcaucgugggcagagccugggagaacaccaccguggaccuggagagcgacggcaagccccagaagaugggcaccgccggcagcaacaagagccugcagagcgccggcuuccccaccggccugaccuacagccagcugaugacccugaaggacagcaugaugcagcuggaccccagcgccaagaccuggaucgacaucgagggcagacccgaggaccccguggagaucgcccuguaccagcccaugagcggcugcuacauccacuucuucagagagcccaccgaccugaagcaguucaagcaggacgccaaguacagccacggcaucgacguggccgaccuguuccccgcccagcccggccugaccagcgccgugaucgaggcccugcccagaaacauggugcugaccugccagggcagcgacgacaucaagaagcugcuggacagccagggcagaagagacaucaagcugaucgacaucgcccugagcaaggccgacagcagaagauucgagaacgccgugugggaccagugcaaggaccugugccacaugcacaccggcguggugguggagaagaagaagagaggcggcaaggaggagaucaccccccacugcgcccugauggacugcaucauguacgacgccgccgugagcggcggccugaacauccccgugcugagagccgugcugcccagagacaugguguucagaaccagcagccccaagguggugcuguga

SEQ ID NO: 8843 - RNA, 1710 nt, Artificial Sequence
  derived and/or modified CDS sequence (opt4) from LASV(ISTH2312-NIG-2012;Clade II)__AIT17561__NP
augagcgccagcaaggaggugaagagcuuccuguggacccagagccugagaagagagcugagcggcuacugcagcaacaucaagcugcagguggugaaggacgcccaggcccugcugcacggccuggacuucagcgaggugagcaacgugcagagacugaugagaaagcagaagagagacgacagcgaccugaagagacugagagaccugaaccaggccgugaacaaccugguggagcugaagagcacccagcagaagagcauccugagagugggcacccugaccagcgacgaccugcugacccuggccgccgaccuggagaagcugaagagcaaggugaucagaaccgagagaccccugagcagcggcguguacaugggcaaccugagcacccagcagcuggagcagagaagagcccugcugaacaugaucggcauggugggcggcgcccagggcacccagcccggcagagacggcguggugagagugugggacgugaagaaccccgaccugcugaacaaccaguucggcaccaugcccagccugacccuggccugccugaccaagcagggccagguggaccugaacgacgccgugcuggcccugaccgaccugggccugaucuacaccgccaaguaccccaacagcagcgaccuggacagacugagccagagccaccccauccugaacaugguggacaccaagaagagcagccugaacaucagcggcuacaacuucagccugggcgccgccgugaaggccggcgccugcaugcuggacggcggcaacaugcuggagaccaucaaggugaccccccagaccaucgacggcauccugaagagcauccugaaggugaagaagagccugggcauguucgugagcgacacccccggcgagagaaaccccuacgagaacauccuguacaagaucugccugagcggcgacggcuggcccuacaucgccagcagaaccagcaucgugggcagagccugggagaacaccaccguggaccuggagagcgacggcaagccccagaaggugggcaccgugggcagcaacaagagccugcagagcgccggcuuccccaccggccugaccuacagccagcugaugacccugaaggacagcaugaugcagcuggaccccagcgccaagaccuggaucgacaucgagggcagacccgaggaccccguggagaucgcccuguaccagcccaugagcggcugcuacauccacuucuucagagagcccaccgaccugaagcaguucaagcaggacgccaaguacagccacggcaucgacguggccgaccuguuccccgcccagcccggccugaccagcgccgugaucgaggcccugcccagaaacauggugcugaccugccagggcagcgacgacaucaagagacugcuggacagccagggcagaagagacaucaagcugaucgacaucgcccugagcaaggccgacagcagaagauucgagaacgccgugugggaccagugcaaggaccugugccacaugcacaccggcguggugguggagaagaagagaagaggcggcaaggaggagaucaccccccacugcgcccugauggacugcaucauguacgacgccgccgugagcggcggccugaacauccccgugcugagagccgugcugcccagagacaugguguucagaaccagcagccccaagguggugcuguga

SEQ ID NO: 8844 - RNA, 1710 nt, Artificial Sequence
  derived and/or modified CDS sequence (opt4) from LASV(ISTH2316-NIG-2012;Clade II)__AIT17565__NP
augagcgccagcaaggagaucaagagcuuccuguggacccagagccugagaagagagcugagcggcuacugcagcagcaucaagcugcagguggugaaggacgcccaggcccugcugcacggccuggacuucagcgaggugagcaacgugcagagacugaugagaaagcagaagagagacgacagcgaccugaagagacugagagaccugaaccaggccgugaacaaccugguggagcugaagagcacccagcagaagagcauccugagagugggcacccugaccagcgacgaccugcugacccuggccgccgaccuggagaagcugaagagcaaggugaucagaaccgagagaccccugagcagcggcguguacaugggcaaccugagcacccagcagcuggagcagagaagagcccugcugaacaugaucggcauggugggcggcgcccagggcacccagcccggcagagacggcguggugagagugugggacgugaagaaccccgaccugcugaacaaccaguucggcaccaugcccagccugacccuggccugccugaccaagcagggccagguggaccugaacgacgccgugcuggcccugaccgaccugggccugaucuacaccgccaaguaccccaacagcagcgaccuggacagacugagccagagccaccccauccugaacaugguggacaccaagaagagcagccugaacaucagcggcuacaacuucagccugggcgccgccgugaaggccggcgccugcaugcuggacggcggcaacaugcuggagaccaucaaggugaccccccagaccauggacggcauccugaagagcauccugaaggugaagagaagccugggcauguucgugagcgacgcccccggcgagagaaaccccuacgagaacauccuguacaagaucugccugagcggcgacggcuggcccuacaucgccagcagaaccagcaucgugggcagagccugggagaacaccaccguggaccuggagagcgacggcaagccccagaaggugggcaccgccggcagcaacaagagccugcagagcgccggcuuccccaccggccugaccuacagccagcugaugacccugaaggacagcaugaugcagcuggaccccagcgccaagaccuggaucgacaucgagggcagacccgaggaccccguggagaucgcccuguaccagcccaugagcggcugcuacauccacuucuucagagagcccaccgaccugaagcaguucaagcaggacgccaaguacagccacggcaucgacguggccgaccuguuccccgcccagcccggccugaccagcgccgugaucgaggcccugcccagaaacauggugcugaccugccagggcagcgacgacaucaagagacugcuggacagccagggcagaagagacaucaagcugaucgacaucgcccugagcaaggccgacagcagaaaguucgagaacgccgugugggaccagugcaaggaccugugccacaugcacaccggcguggugguggagaagaagaagagaggcggcaaggaggagaucaccccccacugcgcccugauggacugcaucauguacgacgccgccgugagcggcggccugaacauccccgugcugagagccgugcugcccagagacaugguguucagaaccagcagccccaagguggugcuguga

SEQ ID NO: 8845 - RNA, 1710 nt, Artificial Sequence
  derived and/or modified CDS sequence (opt4) from LASV(ISTH2334-NIG-2012;Clade II)__AIT17569__NP
augagcgccagcaaggaggugaagagcuuccuguggacccagagccugagaagagagcugagcggcuacugcagcaacaucaagcugcagguggugaaggacgcccaggcccugcugcacggccuggacuucagcgaggugagcaacgugcagagacugaugagaaagcagaagagagacgacagcgaccugaagagacugagagaccugaaccaggccgugaacaaccugguggagcugaagagcacccagcagaagagcauccugagagugggcacccugaccagcgacgaccugcugacccuggccgccgaccuggagaagcugaagagcaaggugaucagaaccgagagaccccugagcagcggcguguacaugggcaaccugagcacccagcagcuggagcagagaagagcccugcugaacaugaucggcauggugggcggcgcccagggcacccagcccggcagagacggcguggugagagugugggacgugaagaaccccgaccugcugaacaaccaguucggcaccaugcccagccugacccuggccugccugaccaagcagggccagguggaccugaacgacgccgugcuggcccugaccgaccugggccugaucuacaccgccaaguuccccaacagcagcgaccuggacagacugagccagagccaccccauccugaacaugguggacaccaagaagagcagccugaacaucagcggcuacaacuucagccugggcgccgccgugaaggccggcgccugcaugcuggacggcggcaacaugcuggagaccaucaaggugaccccccagaccauggacggcauccugaagagcauccugaaggugaagaagagccugggcauguucgugagcgacacccccggcgagagaaaccccuacgagaacauccuguacaagaucugccugagcggcgacggcuggcccuacaucgccagcagaaccagcaucgugggcagagccugggagaacaccaccguggaccuggagagcgacggcaagccccagaaggugggcaccaccggcagcaacaagagccugcagagcgccggcuuccccaccggccugaccuacagccagcugaugacccugaaggacagcaugaugcagcuggaccccagcgccaagaccuggaucgacaucgagggcagacccgaggaccccguggagaucgcccuguaccagcccaugagcggcugcuacauccacuucuucagagagcccaccgaccugaagcaguucaagcaggacgccaaguacagccacggcaucgacguggccgaccuguuccccgcccagcccggccugaccagcgccgugaucgaggcccugcccagaaacauggugcugaccugccagggcagcgacgacaucaagagacugcuggacagccagggcagaagagacaucaagcugaucgacaucgcccugagcaaggccgacagcagaagauucgagaacgccgugugggaccagugcaaggaccugugccacaugcacaccggcguggugguggagaagaagaagagaggcggcaaggaggagaucaccccccacugcgcccugauggacugcaucauguacgacgccgccgugagcggcggccugaaccugcccgugcugagagccgugcugcccagagacaugguguucagaaccagcagccccaagguggugcuguga

SEQ ID NO: 8846 - RNA, 1710 nt, Artificial Sequence
  derived and/or modified CDS sequence (opt4) from LASV(ISTH2358-NIG-2012;Clade II)__AIT17573__NP
augagcgccagcaaggaggugaagagcuuccuguggacccagagccugagaagagagcugagcggcuacugcagcaacaucaagcugcagguggugaaggacgcccaggcccugcugcacggccuggacuucagcgaggugagcaacgugcagagacugaugagaaagcagaagagagacgacagcgaccugaagagacugagagaccugaaccaggccgugaacaaccugguggagcugaagagcacccagcagaagagcauccugagagugggcacccugaccagcgacgaccugcugacccuggccgccgaccuggagaagcugaagagcaaggugaucagaaccgagagaccccugagcagcggcguguacaugggcaaccugagcacccagcagcuggagcagagaagagcccugcugaacaugaucggcauggugggcggcgcccagggcacccagcccggcagagacggcguggugagagugugggacgugaagaaccccgaccugcugaacaaccaguucggcaccaugcccagccugacccuggccugccugaccaagcagggccagguggaccugaacgacgccgugcuggcccugaccgaccugggccugaucuacaccgccaaguaccccaacagcagcgaccuggacagacugagccagagccaccccauccugaacaugguggacaccaagaagagcagccugaacaucagcggcuacaacuucagccugggcgccgccgugaaggccggcgccugcaugcuggacggcggcaacaugcuggagaccaucaaggugaccccccagaccauggacggcauccugaagagcauccugaaggugaagaagagccugggcauguucgugagcgacacccccggcgagagaaaccccuacgagaacauccuguacaagaucugccugagcggcgacggcuggcccuacaucgccagcagaaccagcaucgugggcagagccugggagaacaccaccguggaccuggagagcgacggcaagccccagaaggugggcaccgccggcagcaacaagagccugcagagcgccggcuuccccaccggccugaccuacagccagcugaugacccugaaggacagcaugaugcagcuggaccccagcgccaagaccuggaucgacaucgagggcagacccgaggaccccguggagaucgcccuguaccagcccaugagcggcugcuacauccacuucuucagagagcccaccgaccugaagcaguucaagcaggacgccaaguacagccacggcaucgacaucgccgaccuguuccccgcccagcccggccugaccagcgccgugaucgaggcccugcccagaaacauggugcugaccugccagggcagcgacgacaucaagagacugcuggacagccagggcagaagagacaucaagcugaucgacaucgcccugagcaaggccgacagcagaagauucgagaacgccgugugggaccagugcaaggaccugugccacaugcacaccggcguggugguggagaagaagaagagaggcggcaaggaggagaucaccccccacugcgcccugauggacugcaucauguacgacgccgccgugagcggcggccugaacauccccgugcugagagccgugcugcccagagacaugguguucagaaccagcagccccaagguggugcuguga

SEQ ID NO: 8847 - RNA, 1710 nt, Artificial Sequence
  derived and/or modified CDS sequence (opt4) from LASV(ISTH2376-NIG-2012;Clade II)__AIT17577__NP
augagcgccagcaaggaggugaagagcuuccuguggacccagagccugagaagagagcugagcggcuacugcagcagcaucaagcugcagguggugaaggacgcccaggcccugcugcacggccuggacuucagcgaggugagcaacgugcagagacugaugagaaagcagaagagagacgacagcgaccugaagagacugagagaccugaaccaggccgugaacaaccugguggagcugaagagcacccagcagaagagcauccugagagugggcacccugaccagcgacgaccugcugacccuggccgccgaccuggagaagcugaagagcaaggugaucagaaccgagagaccccugagcagcggcguguacaugggcaaccugagcacccagcagcuggagcagagaagagcccugcugaacaugaucggcauggugggcggcgcccagggcacccagcccggcagagacggcguggugagagugugggacgugaagaaccccgaccugcugaacaaccaguucggcaccaugcccagccugacccuggccugccugaccaagcagggccagguggaccugaacgacgccgugcuggcccugaccgaccugggccugaucuacaccgccaaguaccccaacagcagcgaccuggacagacugagccagagccaccccauccugaacaugguggacaccaagaagagcagccugaacaucagcggcuacaacuucagccugggcgccgccgugaaggccggcgccugcaugcuggacggcggcaacaugcuggagaccaucaaggugaccccccagaccauggacggcauccugaagagcauccugaaggugaagagaagccugggcauguucgugagcgacacccccggcgagagaaaccccuacgagaacauccuguacaagaucugccugagcggcgacggcuggcccuacaucgccagcagaaccagcaucgccggcagagccugggagaacaccaccguggaccuggagagcgacggcaagccccagaaggugggcgccgccggcagcaacaagagccugcagagcgccggcuuccccaccggccugaccuacagccagcugaugacccugaaggacagcaugaugcagcuggaccccagcgccaagaccuggaucgacaucgagggcagacccgaggaccccguggagaucgcccuguaccagcccaugagcggcugcuacauccacuucuucagagagcccaccgaccugaagcaguucaagcaggacgccaaguacagccacggcaucgacguggccgaccuguuccccgcccagcccggccugaccagcgccgugaucgaggcccugcccagaaacauggugcugaccugccagggcagcgacgacaucaagagacugcuggacagccagggcagaagagacaucaagcugaucgacaucgcccugagcaaggccgacagcagaagauucgagaacgccgugugggaccagugcagagaccugugccacaugcacaccggcguggugguggagaagaagaagagaggcggcaaggaggagaucaccccccacugcgcccugauggacugcaucauguacgacgccgccgugagcggcggccugaacauccccgugcugagagccgugcugcccagagacaugguguucagaaccagcagccccaagguggugcuguga

SEQ ID NO: 8848 - RNA, 1710 nt, Artificial Sequence
  derived and/or modified CDS sequence (opt4) from LASV(Lassa virus/H.sapiens-wt/NGA/2015/ISTH_0543;Clade II)__AVO03640__NP
augagcgccagcaaggaggugaagagcuuccuguggacccagagccugagaagagagcugagcggcuacugcagcaacaucaagcugcagguggugaaggacgcccaggcccugcugcacggccuggacuucagcgaggugagcaacgugcagagacugaugagaaagcagaagagagacgacagcgaccugaagagacugagagaccugaaccaggccgugaacaaccugguggagcugaagagcacccagcagaagagcauccugagagugggcacccugaccagcgacgaccugcugacccuggccgccgaccuggagaagcugaagagcaaggugaucagaaccgagagaccccugagcagcggcguguacaugggcaaccugagcacccagcagcuggagcagagaagagcccugcugaacaugaucggcauggugggcggcgcccagggcacccagcccggcagagacggcguggugagagugugggacgugaagaaccccgaccugcugaacaaccaguucggcaccaugcccagccugacccuggccugccugaccaagcagggccagguggaccugaacgacgccgugcuggcccugaccgaccugggccugaucuacaccgccaaguaccccaacagcagcgaccuggacagacugagccagagccaccccauccugaacaugguggacaccaagaagagcagccugaacaucagcggcuacaacuucagccugggcgccgccgugaaggccggcgccugcaugcuggacggcggcaacaugcuggagaccaucaaggugaccccccagaccauggacggcauccugaagagcauccugaaggugaagaagagccugggcauguucgugagcgacacccccggcgagagaaaccccuacgagaacauccuguacaagaucugccugagcggcgacggcuggcccuacaucgccagcagaaccagcaucgugggcagagccugggagaacaccaccguggaccuggagagcgacggcaagccccagaaggugggcagcgccggcagcaacaagagccugcagagcgccggcuuccccaccggccugaccuacagccagcugaugacccugaaggacagcaugaugcagcuggaccccagcgccaagaccuggaucgacaucgagggcagacccgaggaccccguggagaucgcccuguaccagcccaugagcggcugcuacauccacuucuucagagagcccaccgaccugaagcaguucaagcaggacgccaaguacagccacggcaucgacguggccgaccuguuccccgcccagcccggccugaccagcgccgugaucgaggcccugcccagaaacauggugcugaccugccagggcagcgacgacaucaagagacugcuggacagccagggcagaaaggacaucaagcugaucgacaucgcccugagcaaggccgacagcagaagauucgagaacgccgugugggaccagugcaaggaccugugccacaugcacaccggcguggugguggagaagaagaagagaggcggcaaggaggagaucaccccccacugcgcccugauggacugcaucauguacgacgccgccgugagcggcggccugaacauccccgugcugagagccgugcugcccagagacaugguguucagaaccagcagccccaagguggugcuguga

SEQ ID NO: 8849 - RNA, 1710 nt, Artificial Sequence
  derived and/or modified CDS sequence (opt4) from LASV(Lassa virus/H.sapiens-wt/NGA/2015/ISTH_0547;Clade II)__AVO03584__NP
augagcgccagcaaggaggugaagagcuuccuguggacccagagccugagaagagagcugagcggcuacugcagcagcaucaagcugcagguggugaaggacgcccaggcccugcugcacggccuggacuucagcgaggugagcaacgugcagagacugaugagaaagcagaagagagacgacagcgaccugaagagacugagagaccugaaccaggccgugaacaaccugguggagcugaagagcacccagcagaagagcauccugagagugggcacccugaccagcgacgaccugcugacccuggccgccgaccuggagaagcugaagagcaaggugaucagaaccgagagaccccugagcagcggcguguacaugggcaaccugagcacccagcagcuggagcagagaagagcccugcugaacaugaucggcauggugggcggcgcccagggcacccagcccggcagagacggcguggugagagugugggacgugaagaaccccgaccugcugaacaaccaguucggcaccaugcccagccugacccuggccugccugaccaagcagggccagguggaccugaacgacgccgugcuggcccugaccgaccugggccugaucuacaccgccaaguaccccaacagcagcgaccuggacagacugagccagagccaccccauccugaacaugguggacaccaagaagagcagccugaacaucagcggcuacaacuucagccugggcgccgccgugaaggccggcgccugcaugcuggacggcggcaacaugcuggagaccaucaaggugaccccccagaccauggacggcauccugaagagcauccugaaggugaagagaagccugggcauguucgugagcgacacccccggcgagagaaaccccuacgagaacauccuguacaagaucugccugagcggcgacggcuggcccuacaucgccagcagaaccagcaucgugggcagagccugggagaacaccaccguggaccuggagagcgacggcaagccccagaaggugggcguggccggcagcaacaagagccugcagagcgccggcuuccccaccggccugaccuacagccagcugaugacccugaaggacagcaugaugcagcuggaccccagcgccaagaccuggaucgacaucgagggcagacccgaggaccccguggagaucgcccuguaccagcccaugagcggcugcuacauccacuucuucagagagcccaccgaccugaagcaguucaagcaggacgccaaguacagccacggcaucgacguggccgaccuguuccccgcccagcccggccugaccagcgccgugaucgaggcccugcccagaaacauggugcugaccugccagggcagcgacgacaucaagagacugcuggacagccagggcagaagagacaucaagcugaucgacaucgcccugagcaaggccgacagcagaagauucgagaacgccgugugggaccagugcaaggaccugugccacaugcacaccggcguggugguggagaagaagaagagaggcggcaaggaggagaucaccccccacugcgcccugauggacugcaucauguacgacgccgccgugagcggcggccugaacauccccgugcugagagccgugcugcccagagacaugguguucagaaccagcagccccaagguggugcuguga

SEQ ID NO: 8850 - RNA, 1710 nt, Artificial Sequence
  derived and/or modified CDS sequence (opt4) from LASV(Lassa virus/H.sapiens-wt/NGA/2015/ISTH_0574;Clade II)__AVO03658__NP
augagcgccagcaaggaggugaagagcuuccuguggacccagagccugagaagagagcugagcggcuacugcagcaacaucaagcugcagguggugaaggacgcccaggcccugcugcacggccuggacuucagcgaggugagcaacgugcagagacugaugagaaagcagaagagagacgacagcgaccugaagagacugagagaccugaaccaggccgugaacaaccugguggagcugaagagcacccagcagaagagcauccugagagugggcacccugaccagcgacgaccugcugacccuggccgccgaccuggagaagcugaagagcaaggugaucagaaccgagagaccccugagcagcggcguguacaugggcaaccugagcacccagcagcuggagcagagaagagcccugcugaacaugaucggcauggugggcggcacccagggcacccagcccggcagagacggcguggugagagugugggacgugaagaaccccgaccugcugaacaaccaguucggcaccaugcccagccugacccuggccugccugaccaagcagggccagguggaccugaacgacgccgugcuggcccugaccgaccugggccugaucuacaccgccaaguaccccaacagcagcgaccuggacagacugagccagagccaccccauccugaacaugguggacaccaagaagagcagccugaacaucagcggcuacaacuucagccugggcgccgccgugaaggccggcgccugcaugcuggacggcggcaacaugcuggagaccaucaaggugaccccccagaccauggacggcauccugaagagcauccugaaggugaagaagagccugggcauguucgugagcgacacccccggcgagagaaaccccuacgagaacauccuguacaagaucugccugagcggcgacggcuggcccuacaucgccagcagaaccagcaucgugggcagagccugggagaacaccaccguggaccuggagagcgagggcaagccccagaaggugggcaccgccggcagcaacaagagccugcagagcgccggcuuccccaccggccugaccuacagccagcugaugacccugaaggacagcaugaugcagcuggaccccagcgccaagaccuggaucgacaucgagggcagacccgaggaccccguggagaucgcccuguaccagcccaugagcggcugcuacauccacuucuucagagagcccaccgaccugaagcaguucaagcaggacgccaaguacagccacggcaucgacguggccgaccuguuccccgcccagcccggccugaccagcgccgugaucgaggcccugcccagaaacauggugcugaccugccagggcagcgacgacaucaagagacugcuggacagccagggcagaagagacaucaagcugaucgacaucagccugagcaaggccgacagcagaagauucgagaacgccgugugggaccagugcaaggaccugugccacaugcacaccggcguggugguggagaagaagaagagaggcggcaaggaggagaucaccccccacugcgcccugauggacugcaucauguacgacgccgccgugagcggcggccugaacauccccgugcugagagccgugcugcccagagacaugguguucagaaccagcagccccaagguggugcuguga

SEQ ID NO: 8851 - RNA, 1710 nt, Artificial Sequence
  derived and/or modified CDS sequence (opt4) from LASV(Lassa virus/H.sapiens-wt/NGA/2015/ISTH_0682;Clade II)__AVO03626__NP
augagcgccagcaaggaggugaagagcuuccuguggacccagagccugagaagagagcugagcggcuacugcagcagcaucaagcugcagguggugaaggacgcccaggcccugcugcacggccuggacuucagcgaggugagcaacgugcagagacugaugagaaagcagaagagagacgacagcgaccugaagagacugagagaccugaaccaggccgugaacaaccugguggagcugaagagcacccagcagaagagcgugcugagagugggcacccugaccagcgacgaccugcugacccuggccgccgaccuggagaagcugaagagcaaggugaucagaaccgagagaccccugagcagcggcguguacaugggcaaccugagcacccagcagcuggagcagagaagagcccugcugagcaugaucggcauggugggcggcacccagggcacccagcccggcagagacggcguggugagagugugggacgugaagaaccccgaccugcugaacaaccaguucggcaccaugcccagccugacccuggccugccugaccaagcagggccagguggaccugaacgacgccgugcuggcccugaccgaccugggccugaucuacaccgccaaguaccccaacagcagcgaccuggacagacugagccagagccaccccauccugaacaugguggacaccaagaagagcagccugaacaucagcggcuacaacuucagccugggcgccgccgugaaggccggcgccugcaugcuggacggcggcaacaugcuggagaccaucaaggugaccccccagaccauggacggcauccugaagagcauccugaaggugaagaagagccugggcauguucgugagcgacacccccggcgagagaaaccccuacgagaacauccuguacaagaucugccugagcggcgacggcuggcccuacaucgccagcagaaccagcaucgugggcagagccugggagaacaccaccguggaccuggagagcaacggcaagccccagaaggugggcaccgccggcagcaacaagagccugcagagcgccggcuuccccaccggccugaccuacagccagcugaugacccugaaggacagcaugaugcagcuggaccccagcgccaagaccuggaucgacaucgagggcagacccgaggaccccguggagaucgcccuguaccagcccaugagcggcugcuacauccacuucuucagagagcccaccgaccugaagcaguucaagcaggacgccaaguacagccacggcaucgacguggccgaccuguuccccgcccagcccggccugaccagcgccgugaucgaggcccugcccagaaacauggugcugaccugccagggcagcgacgacaucaagagacugcuggacagccagggcagaagagacaucaagcugaucgacaucagccugagcaaggccgacagcagaaaguucgagaacgccgugugggaccagugcaaggaccugugccacaugcacaccggcguggugguggagaagaagaagagaggcggcaaggaggagaucaccccccacugcgcccugauggacugcaucauguacgacgccgccgugagcggcggccugaacauccccgugcugagagccgugcugcccagagacaugguguucagaaccagcagccccaagguggugcuguga

SEQ ID NO: 8852 - RNA, 1710 nt, Artificial Sequence
  derived and/or modified CDS sequence (opt4) from LASV(Lassa virus/H.sapiens-wt/NGA/2015/ISTH_0687;Clade II)__AVO03582__NP
augagcgccagcaaggaggugaagagcuuccuguggacccagagccugagaagagagcugagcggcuacugcagcagcaucaagcugcagguggugaaggacgcccaggcccugcugcacggccuggacuucagcgaggugagcaacgugcagagacugaugagaaagcagaagagagacgacagcgaccugaagagacugagagaccugaaccaggccgugaacaaccugguggagcugaagagcacccagcagaagagcauccugagagugggcacccugaccagcgacgaccugcugacccuggccgccgaccuggagaagcugaagagcaaggugaucagaaccgagagaccccugagcagcggcguguacaugggcaaccugagcacccagcagcuggagcagagaagagcccugcugaacaugaucggcauggugggcggcgcccagagcacccagcccggcagagacggcguggugagagugugggacgugaagaaccccgaccugcugaacaaccaguucggcaccaugcccagccugacccuggccugccugaccaagcagggccagguggaccugaacgacgccgugcuggcccugaccgaccugggccugaucuacaccgccaaguaccccaacagcagcgaccuggacagacugagccagagccaccccauccugaacaugguggacaccaagaagagcagccugaacaucagcggcuacaacuucagccugggcgccgccgugaaggccggcgccugcaugcuggacggcggcaacaugcuggagaccaucaaggugaccccccagaccauggacggcauccugaagagcauccugaaggugaagagaagccugggcauguucgugagcgacacccccggcgagagaaaccccuacgagaacauccuguacaagaucugccugagcggcgacggcuggcccuacaucgccagcagaaccagcaucgugggcagagccugggagaacaccaccguggaccuggagagcgacggcaagccccagaaggugggcgccaccggcagcaacaagagccugcagagcgccggcuuccccaccggccugaccuacagccagcugaugacccugaaggacagcaugaugcagcuggaccccagcgccaagaccuggaucgacaucgagggcagacccgaggaccccguggagaucgcccuguaccagcccaucagcggcugcuacauccacuucuucagagagcccaccgaccugaagcaguucaagcaggacgccaaguacagccacggcaucgacguggccgaccuguuccccgcccagcccggccugaccagcgccgugaucgaggcccugcccagaaacauggugcugaccugccagggcagcgacgacaucaagagacugcuggacagccagggcagaagagacaucaagcugaucgacaucgcccugagcaaggccgacagcagaagauucgagaacgccgugugggaccagugcaaggaccugugccacaugcacaccggcguggugguggagaagaagaagagaggcggcaaggaggagaucaccccccacugcgcccugauggacugcaucauguacgacgccgccgugagcggcggccugaacauccccgugcugagagccgugcugcccagagacaugguguucagaaccagcagccccaagguggugcuguga

SEQ ID NO: 8853 - RNA, 1710 nt, Artificial Sequence
  derived and/or modified CDS sequence (opt4) from LASV(Lassa virus/H.sapiens-wt/NGA/2015/ISTH_0736;Clade II)__AVO03574__NP
augagcgccagcaaggaggugaagagcuuccuguggacccagagccugagaagagagcugagcggcuacugcagcaacaucaagcugcagguggugaaggacgcccaggcccugcugcacggccuggacuucagcgaggugagcaacgugcagagacugaugagaaagcagaagagagacgacagcgaccugaagagacugagagaccugaaccaggccgugaacaaccugguggagcugaagagcacccagcagaagagcgugcugagagugggcacccugaccagcgacgaccugcugacccuggccgccgaccuggagaagcugaagagcaaggugaucagaaccgagagaccccugagcagcggcguguacaugggcaaccugagcacccagcagcuggagcacagaagagcccugcugaacaugaucggcauggugggcggcgcccagggcacccagcccggcagagacggcguggugagagugugggacgugaagaaccccgaccugcugaacaaccaguucggcaccaugcccagccugacccuggccugccugaccaagcagggccagguggaccugaacgacgccgugcuggcccugaccgaccugggccugaucuacaccgccaaguaccccaacagcagcgaccuggacagacugagccagagccaccccauccugaacaugguggacaccaagaagagcagccugaacaucagcggcuacaacuucagccugggcgccgccgugaaggccggcgccugcaugcuggacggcggcaacaugcuggagaccaucaaggugaccccccagaccauggacggcauccugaagagcauccugaaggugaagagaagccugggcauguucgugagcgacacccccggcgagagaaaccccuacgagaacauccuguacaagaucugccugagcggcgacggcuggcccuacaucgccagcagaaccagcaucgugggcagagccugggagaacaccaccguggaccuggagagcgacggcaagccccagaaggugggcaccgccggcagcaacaagagccugcagagcgccggcuuccccaccggccugaccuacagccagcugaugacccugaaggacagcaugaugcagcuggaccccagcgccaagaccuggaucgacaucgagggcagacccgaggaccccguggagaucgcccuguaccagcccaucagcggcugcuacauccacuucuucagagagcccaccgaccugaagcaguucaagcaggacgccaaguacagccacggcaucgacguggccgaccuguuccccgcccagcccggccugaccagcgccgugaucgaggcccugcccagaaacauggugcugaccugccagggcagcgacgacaucaagagacugcuggacagccagggcagaagagacaucaagcugaucgacaucgcccugagcaaggccgacagcagaagauucgagaacgccgugugggaccagugcaaggaccugugccacaugcacaccggcguggugguggagaagaagaagagaggcggcaaggaggagaucaccccccacugcgcccugauggacugcaucauguacgacgccgccgugagcggcggccugaacauccccgugcugagagccgugcugcccagagacaugguguucagaaccagcagccccaagguggugcuguga

SEQ ID NO: 8854 - RNA, 1710 nt, Artificial Sequence
  derived and/or modified CDS sequence (opt4) from LASV(Lassa virus/H.sapiens-wt/NGA/2015/ISTH_0789;Clade II)__AVO03552__NP
augagcgccagcaaggaggugaagagcuuccuguggacccagagccugagaagagagcugagcggcuacugcagcaacaucaagcugcagguggugaaggacgcccaggcccugcugcacggccuggacuucagcgaggugagcaacgugcagagacugaugagaaagcagaagagagacgacggcgaccugaagagacugagagaccugaaccaggccgugaacaaccugguggagcugaagagcacccagcagaagagcgugcugagagugggcacccugagcagcgacgaccugcugauccuggccgccgaccuggagaagcugaagagcaaggugaucagaaccgagagaccccugagcagcggcguguacaugggcaaccugagcagccagcagcuggaccagagaagagcccugcugaacaugaucggcaugaccggcggcggccagggcgccaacgccggcagagacggcaucgugagagugugggacgugaagaacgccgagcugcugaacaaccaguucggcaccaugcccagccugacccuggccugccugaccaagcagggccagguggaccugaacgacgccgugcaggcccugaccgaccugggccugaucuacaccgccaaguaccccaacagcagcgaccuggacagacugagccagagccaccccauccugaacaugaucgacaccaagaagagcagccugaacaucagcggcuacaacuucagccugggcgccgccgugaaggccggcgccugcaugcuggacggcggcaacaugcuggagaccaucaaggugagcccccagaccauggacggcauccugaagagcauccugaaggugaagagaagccugggcauguucgugagcgacgcccccggcgagagaaaccccuacgagaacauccuguacaagaucugccugagcggcgacggcuggcccuacaucgccagcagaaccagcaucaucggcagagccugggagaacaccgugguggaccuggagagcgacaacaagccccagaagcugggcaacagcggcagcaacagaagccugcagagcgccggcuaccccgccggccugaccuacagccagcugaugacccugaaggacagcaugcugcagcuggaccccaacgccaagaccuggauggacguggagggcagacccgacgaccccguggagaucgcccuguaccagcccagcagcggcugcuacauccacuucuucagagagcccaccgaccugaagcaguucaagcaggacgccaaguacagccacggcaucgacgugggcgaccuguucgccgcccagcccggccugaccagcgccgugaucgaggcccugcccagaaacauggugaucaccugccagggcagcgaggacaucaagaagcugcuggagagccagggcagaaaggacaucaagcugguggacaucagcaugagcaagcuggacagcagaaaguucgagaacgccgugugggaccaguacaaggaccugugccacaugcacaccggcaucgugguggagaagaagaagagaggcggcaaggaggagaucaccccccacugcgcccugauggacugcaucauguucgacgccgccguggugggcggccuggacgccaagauccugagagccgugcugcccagagacaugguguucagaaccagcacccccaagguggugcuguga

SEQ ID NO: 8855 - RNA, 1710 nt, Artificial Sequence
  derived and/or modified CDS sequence (opt4) from LASV(Lassa virus/H.sapiens-wt/NGA/2015/ISTH_0821;Clade II)__AVO03642__NP
augagcgccagcaaggaggugaagagcuuccuguggacccagagccugagaagagagcugagcggcuacugcagcaacaucaagcugcagguggugaaggacgcccaggcccugcugcacggccuggacuucagcgaggugagcaacgugcagagacugaugagaaagcagaagagagacgacagcgaccugaagagacugagagaccugaaccaggccgugaacaaccugguggagcugaagagcacccagcagaagagcauccugagagugggcacccugaccagcgacgaccugcugacccuggccgccgaccuggagaagcugaagagcaaggugaucagaaccgagagaccccugagcagcggcguguacaugggcaaccugagcacccagcagcuggagcagagaagagcccugcugaacaugaucggcauggugggcggcgcccagggcacccagcccggcagagacggcguggugagagugugggacgugaagaaccccgaccugcugaacaaccaguucggcaccaugcccagccugacccuggccugccugaccaagcagggccagguggaccugaacgacgccgugcuggcccugaccgaccugggccugaucuacaccgccaaguaccccaacagcagcgaccuggacagacugagccagagccaccccauccugaacaugguggacaccaagaagagcagccugaacaucagcggcuacaacuucagccugggcgccgccgugaaggccggcgccugcaugcuggacggcggcaacaugcuggagaccaucaaggugaccccccagaccauggacggcauccugaagagcauccugaaggugaagagaagccugggcauguucgugagcgacacccccggcgagagaaaccccuacgagaacauccuguacaagaucugccugagcggcgacggcuggcccuacaucgccagcagaaccagcaucgugggcagagccugggagaacaccaccguggaccuggagagcgacggcaagccccagaaggugggcaucgccggcagcaacaagagccugcagagcgccggcuuccccaccggccugaccuacagccagcugaugacccugaaggacagcaugaugcagcuggaccccagcgccaagaccuggaucgacaucgagggcagacccgaggaccccguggagaucgcccuguaccagcccaugagcggcugcuacauccacuucuucagagagcccaccgaccugaagcaguucaagcaggacgccaaguacagccacggcaucgacguggccgaccuguuccccgcccagcccggccugaccagcgccgugaucgaggcccugcccagaaacauggugcugaccugccagggcagcgacgacaucaagaagcugcuggacagccagggcagaaaggacaucaagcugaucgacaucgcccugagcaagguggacagcagaagauucgagaacgccgugugggaccagugcaaggaccugugccacaugcacaccggcguggugguggagaagaagaagagaggcggcaaggaggagaucaccccccacugcgcccugauggacugcaucauguacgacgccgccgugagcggcggccugaacauccccgugcugagagccgugcugcccagagacaugguguucagaaccagcagccccaagguggugcuguga

SEQ ID NO: 8856 - RNA, 1710 nt, Artificial Sequence
  derived and/or modified CDS sequence (opt4) from LASV(Lassa virus/H.sapiens-wt/NGA/2015/ISTH_0831;Clade II)__AVO03546__NP
augagcgccagcaaggaggugaagagcuuccuguggacccagagccugagaagagagcuggccggcuacugcagcaacaucaagcugcagguggugaaggacgcccaggcccugcugcacggccuggacuucagcgaggugagcaacgugcagagacugaugagaaagcagaagagagacgacagcgaccugaagagacugagagaccugaaccaggccgugaacaaccugguggagcugaagagcacccagcagaagagcauccugagagugggcacccugagcagcgacgaccugcugacccuggccgccgaccuggagaagcugaagagcaaggugaucagaaccgagagaccccugagcagcggcguguacaugggcaaccugagcacccagcagcuggaccagagaagagcccugcugaacaugaucggcauggugggcggcagccagggcaccagcgccggcagagacggcaucgugagagugugggacgugagaaaccccgagcugcugaacaaccaguucggcaccaugcccagccugacccuggccugccugaccaagcagggccagguggaccugaacgacgccgugcaggcccugaccgaccugggccugaucuacaccgccaaguaccccaacagcagcgaccuggacagacugagccagagccaccccauccugaacaugaucgacaccaagaagagcagcaucaacaucagcggcuacaacuucagccugggcgccgccgugaaggccggcgccugcaugcuggacggcggcaacaugcuggagaccaucaaggugagcccccagagcauggacggcauccugaagagcauccugaaggugaagagaagccugggcauguucgugagcgacacccccggcgagagaaaccccuacgagaacauccuguacaagaucugccugagcggcgacggcuggcccuacaucgccagcagaaccagcaucaccggcagagccugggagaacaccgugguggaccuggagagcgacaacaagcccaagaagcccggcaacaacgagagcaacagaagccugcagagcgccggcuuccccgccggccugaccuacagccagcugaugacccugaaggacagcaugcugcagcuggaccccaacgccaagaccuggauggacaucgagggcagacccgacgaccccguggagaucgcccuguaccagcccaacagcggcugcuacauccacuucuucagagagcccaccgaccugaagcaguucaagcaggacgccaaguacagccacggcaucgacaucagcgaccuguucgccgcccagcccggccugaccagcgccgugaucgaggcccugcccagaaacauggugaucaccugccagggcagcgaggacaucaagaagcugcuggagagccagggcagaaaggacaucagacugguggacaucagccugagcaaggccgacagcagaaaguucgagaacgccgugugggaccaguacaaggaccugugccacaugcacaccggcaucgugguggagaagaagaagaagggcggcaaggaggagaucaccccccacugcgcccugauggacugcaucauguucgacgccgccgugaugaacggccuggacgccagagugcugagagccgugcugcccagagacaugguguucagaaccagcacccccagaguggugcuguga

SEQ ID NO: 8857 - RNA, 1710 nt, Artificial Sequence
  derived and/or modified CDS sequence (opt4) from LASV(Lassa virus/H.sapiens-wt/NGA/2016/ISTH_0009;Clade II)__AVO03572__NP
augagcgccagcaaggaggugaagagcuuccuguggacccagagccugagaagagagcugagcggcuacugcagcaacaucaagcugcagguggugaaggacgcccaggcccugcugcacggccuggacuucagcgaggugagcaacgugcagagacugaugagaaagcagaagagagacgacagcgaccugaagagacugagagaccugaaccaggccgugaacaaccugguggagcugaagagcacccagcagaagagcauccugagagugggcacccugaccagcgacgaccugcugacccuggccgccgaccuggagaagcugaagagcaaggugaucagaaccgagagaccccugagcagcggcguguacaugggcaaccugagcacccagcagcuggagcagagaagagcccugcugaacaugaucggcauggugggcggcgcccagggcacccagcccggcagagacggcguggugagagugugggacgugaagaaccccgaccugcugaacaaccaguucggcaccaugcccagccugacccuggccugccugaccaagcagggccagguggaccugaacgacgccgugcuggcccugaccgaccugggccugaucuacaccgccaaguaccccaacagcagcgaccuggacagacugagccagagccaccccauccugaacaugguggacaccaagaagagcagccugaacaucagcggcuacaacuucagccugggcgccgccgugaaggccggcgccugcaugcuggacggcggcaacaugcuggagaccaucaaggugaccccccagaccauggacggcauccugaagagcauccugaaggugaagaagagccugggcauguucgugagcgacacccccggcgagagaaaccccuacgagaacauccuguacaagaucugccugagcggcgacggcuggcccuacaucgccagcagaaccagcaucgugggcagagccugggagaacaccaccguggaccuggagagcgacggcaagccccagaaggugggcagcgccggcagcaacaagagccugcagagcgccggcuuccccaccggccugaccuacagccagcugaugacccugaaggacagcaugaugcagcuggaccccagcgccaagaccuggaucgacaucgagggcagacccgaggaccccguggagaucgcccuguaccagcccaugagcggcugcuacauccacuucuucagagagcccaccgaccugaagcaguucaagcaggacgccaaguacagccacggcaucgacguggccgaccuguuccccgcccagcccggccugaccagcgccgugaucgaggcccugcccagaaacauggugcugaccugccagggcagcgacgacaucaagagacugcuggacagccagggcagaagagacaucaagcugaucgacaucgcccugagcaaggccgacagcagaagauucgagaacgccgugugggaccagugcaaggaccugugccacaugcacaccggcguggugguggagaagaagaagagaggcggcaaggaggagaucaccccccacugcgcccugauggacugcaucauguacgacgccgccgugagcggcggccugaacauccccgugcugagagccgugcugcccagagacaugguguucagaaccagcagccccaagguggugcuguga

SEQ ID NO: 8858 - RNA, 1710 nt, Artificial Sequence
  derived and/or modified CDS sequence (opt4) from LASV(Lassa virus/H.sapiens-wt/NGA/2016/ISTH_0017;Clade II)__AVO03568__NP
augagcgccagcaaggaggugaagagcuuccuguggacccagagccugagaagagagcugagcggcuacugcagcagcaucaagcugcagguggugaaggacgcccaggcccugcugcacggccuggacuucagcgaggugagcaacgugcagagacugaugagaaagcagaagagagacgacagcgaccugaagagacugagagaccugaaccaggccgugaacaaccugguggagcugaagagcacccagcagaagagcauccugagagugggcacccugaccagcgacgaccugcugacccuggccgccgaccuggagaagcugaagagcaaggugaucagaaccgagagaccccugagcagcggcguguacaugggcaaccugagcacccagcagcuggagcagagaagagcccugcugaacaugaucggcauggccggcggcgcccagggcacccagcccggcagagacggcguggugagagugugggacgugaagaaccccgaccugcugaacaaccaguucggcaccaugcccagccugacccuggccugccugaccaagcagggccagguggaccugaacgacgccgugcuggcccugaccgaccugggccugaucuacaccgccaaguaccccaacagcagcgaccuggacagacugagccagagccaccccauccugaacaugguggacaccaagaagagcagccugaacaucagcggcuacaacuucagccugggcgccgccgugaaggccggcgccugcaugcuggacggcggcaacaugcuggagaccaucaaggugaccccccagaccauggacggcauccugaagagcauccugaaggugaagagaagccugggcauguucgugagcgacgcccccggcgagagaaaccccuacgagaacauccuguacaagaucugccugagcggcgacggcuggcccuacaucgccagcagaaccagcaucgugggcagagccugggagaacaccaccguggaccuggagagcgacggcaagccccagaaggugggcgccaccggcagcaacaagagccugcagagcgccggcuuccccaccggccugaccuacagccagcugaugacccugaaggacagcaugaugcagcuggaccccagcgccaagaccuggaucgacaucgagggcagacccgaggaccccguggagguggcccuguaccagcccgugagcggcugcuacauccacuucuucagagagcccaccgaccugaagcaguucaagcaggacgccaaguacagccacggcaucgacguggccgaccuguuccccgcccagcccggccugaccagcgccgugaucgaggcccugcccagaaacauggugcugaccugccagggcagcgacgacaucaagaagcugcuggacagccagggcagaaaggacaucaagcugaucgacaucgcccugagcaaggccgacagcagaagauucgagaacgccgugugggaccagugcaaggaccugugccacaugcacaccggcguggugguggagaagaagaagagaggcggcaaggaggagaucaccccccacugcgcccugauggacugcaucauguacgacgccgccgugagcggcggccugaacauccccgugcugagagccgugcugcccagagacaugguguucagaaccagcagccccaagguggugcuguga

SEQ ID NO: 8859 - RNA, 1710 nt, Artificial Sequence
  derived and/or modified CDS sequence (opt4) from LASV(Lassa virus/H.sapiens-wt/NGA/2016/ISTH_0035;Clade II)__AVO03620__NP
augagcgccagcaaggaggugaagagcuuccuguggacccagagccugagaagagagcugagcggcuacugcagcagcaucaagcugcagguggugaaggacgcccaggcccugcugcacggccuggacuucagcgaggugagcaacgugcagagacugaugagaaagcagaagagagacgacagcgaccugaagagacugagagaccugaaccaggccgugaacaaccugguggagcugaagagcacccagcagaagagcauccugagagugggcacccugaccagcgacgaccugcugacccuggccgccgaccuggagaagcugaagagcaaggugaucagaaccgagagaccccugagcagcggcguguacaugggcaaccugagcagccagcagcuggagcagagaagagcccugcugaacaugaucggcauggugggcggcgcccagggcacccagcccggcagagacggcguggugagagugugggacgugaagaaccccgaccugcugaacaaccaguucggcaccaugcccagccugacccuggccugccugaccaagcagggccagguggaccugaacgacgccgugcuggcccugaccgaccugggccugaucuacaccgccaaguaccccaacagcagcgaccuggacagacugagccagagccaccccauccugaacaugguggacaccaagaagagcagccugaacaucagcggcuacaacuucagccugggcgccgccgugaaggccggcgccugcaugcuggacggcggcaacaugcuggagaccaucaaggugaccccccagaccauggacggcauccugaagagcauccugaaggugaagagaagccugggcauguucgugagcgacacccccggcgagagaaaccccuacgagaacauccuguacaagaucugccugagcggcgacggcuggcccuacaucgccagcagaaccagcaucgugggcagagccugggagaacaccaccguggaccuggagagcgacggcaagccccagaaggugggcagcgccggcagcaacaagagccugcagagcgccggcuuccccaccggccugaccuacagccagcugaugacccugaaggacagcaugaugcagcuggaccccagcgccaagaccuggaucgacaucgagggcagacccgaggaccccguggagaucgcccuguaccagcccaucagcggcugcuacauccacuucuucagagagcccaccgaccugaagcaguucaagcaggacgccaaguacagccacggcaucgacguggccgaccuguuccccgcccagcccggccugaccagcgccgugaucgaggcccugcccagaaacauggugcugaccugccagggcagcgacgacaucaagagacugcuggacagccagggcagaagagacaucaagcugaucgacaucgcccugagcaaggccgacagcagaagauucgagaacgccgugugggaccagugcaaggaccugugccacaugcacaccggcguggugguggagaagaagaagagaggcggcaaggaggagaucaccccccacugcgcccugauggacugcaucauguacgacgccgccgugagcggcggccugaacauccccgugcugagagccgugcugcccagagacaugguguucagaaccagcagccccaagguggugcuguga

SEQ ID NO: 8860 - RNA, 1710 nt, Artificial Sequence
  derived and/or modified CDS sequence (opt4) from LASV(Lassa virus/H.sapiens-wt/NGA/2016/ISTH_0104;Clade II)__AVO03632__NP
augagcgccagcaaggaggugaagagcuuccuguggacccagagccugagaagagagcugagcggcuacugcagcaacaucaagcugcagguggugaaggacgcccaggcccugcugcacggccuggacuucagcgaggugagcaacgugcagagacugaugagaaagcagaagagagacgacagcgaccugaagagacugagagaccugaaccaggccgugaacaaccugguggagcugaagagcacccagcagaagagcauccugagagugggcacccugaccagcgacgaccugcugacccuggccgccgaccuggagaagcugaagagcaaggugaucagaaccgagagaccccugagcagcggcguguacaugggcaaccugagcacccagcagcuggagcagagaagagcccugcugaacaugaucggcauggugggcggcacccagagcacccagcccggcagagacggcguggugagagugugggacgugaagaaccccgaccugcugaacaaccaguucggcaccaugcccagccugacccuggccugccugaccaagcagggccagguggaccugaacgacgccgugcuggcccugaccgaccugggccugaucuacaccgccaaguaccccaacagcagcgaccuggacagacugagccagagccaccccauccugaacaugguggacaccaagaagagcagccugaacaucagcggcuacaacuucagccugggcgccgccgugaaggccggcgccugcaugcuggacggcggcaacaugcuggagaccaucaaggugaccccccagaccauggacggcauccugaagagcauccugaaggugaagagaagccugggcauguucgugagcgacacccccggcgagagaaaccccuacgagaacauccuguacaagaucugccugagcggcgacggcuggcccuacaucgccagcagaaccagcaucgugggcagagccugggagaacaccaccguggaccuggagagcgacggcaagccccagaaggugggcaccaccggcagcaacaagagccugcagagcgccggcuuccccaccggccugaccuacagccagcugaugacccugaaggacagcaugaugcagcuggaccccagcgccaagaccuggaucgacaucgagggcagacccgaggaccccguggagaucgcccuguaccagcccaugagcggcugcuacauccacuucuucagagagcccaccgaccugaagcaguucaagcaggacgccaaguacagccacggcaucgacguggccgaccuguuccccgcccagcccggccugaccagcgccgugaucgaggcccugcccagaaacauggugcugaccugccagggcagcgacgacaucaagaagcugcuggacagccagggcagaagagacaucaagcugaucgacaucagccugagcaaggccgacagcagaaaguucgagaacgccgugugggaccagugcaaggaccugugccacaugcacaccggcguggugguggagaagaagaagagaggcggcaaggaggagaucaccccccacugcgcccugauggacugcaucauguucgacgccgccgugagcggcggccugaacauccccgugcugagagccgugcugcccagagacaugguguucagaaccagcagccccaagguggugcuguga

SEQ ID NO: 8861 - RNA, 1710 nt, Artificial Sequence
  derived and/or modified CDS sequence (opt4) from LASV(Lassa virus/H.sapiens-wt/NGA/2016/ISTH_0133;Clade II)__AVO03636__NP
augagcgccagcaaggaggugaagagcuuccuguggacccagagccugagaagagagcugagcggcuacugcagcaacaucaagcugcagguggugaaggacgcccaggcccugcugcacggccuggacuucagcgaggugagcaacgugcagagacugaugagaaagcagaagagagacgacagcgaccugaagagacugagagaccugaaccaggccgugaacaaccugguggagcugaagagcacccagcagaagagcauccugagagugggcacccugaccagcgacgaccugcugacccuggccgccgaccuggagaagcugaagagcaaggugaucagaaccgagagaccccugagcagcggcguguacaugggcaaccugagcgcccagcagcuggagcagagaagagcccugcugaacaugaucggcauggugggcggcacccagggcacccagcccggcagagacggcguggugagagugugggacgugaagaaccccgaccugcugaacaaccaguucggcaccaugcccagccugacccuggccugccugaccaagcagggccagguggaccugaacgacgccgugcuggcccugaccgaccugggccugaucuacaccgccaaguaccccaacgccagcgaccuggacagacugagccagagccaccccauccugaacaugguggacaccaagaagagcagccugaacaucagcggcuacaacuucagccugggcgccgccgugaaggccggcgccugcaugcuggacggcggcaacaugcuggagaccaucaaggugaccccccagaccauggacggcauccugaagagcgugcugaaggugaagaagagccugggcauguucgugagcgacacccccggcgagagaaaccccuacgagaacauccuguacaagaucugccugagcggcgacggcuggcccuacaucgccagcagaaccagcaucgugggcagagccugggagaacaccaccguggaccuggagagcgacggcaagccccagaagaucggccccgccggcagcaacaagagccugcagagcgccggcuuccccgccggccugaccuacagccagcugaugacccugaaggacagcaugaugcagcuggaccccagcgccaagaccuggaucgacaucgagggcagacccgaggaccccguggagaucgcccuguaccagcccaugagcggcugcuacauccacuucuucagagagcccaccgaccugaagcaguucaagcaggacgccaaguacagccacggcaucgacgugaccgaccuguucagcgcccagcccggccugaccagcgccgugaucgaggcccugcccagaaacauggugcugaccugccagggcagcgacgacaucaagagacugcuggacagccagggcagaagagacaucaagcugaucgacaucagccugagcaagguggacagcagaagauucgagaacgccgugugggaccagugcaaggaccugugccacaugcacaccggcguggugguggagaagaagaagagaggcggcaaggaggagaucaccccccacugcgcccugauggacugcaucauguacgacgccgccgugagcggcggccugaacauccccgugcugagagccgugcugcccagagacaugguguucagaaccagcagccccaagguggugcuguga

SEQ ID NO: 8862 - RNA, 1710 nt, Artificial Sequence
  derived and/or modified CDS sequence (opt4) from LASV(Lassa virus/H.sapiens-wt/NGA/2016/ISTH_0146;Clade II)__AVO03634__NP
augagcgccagcaaggaggugaagagcuuccuguggacccagagccugagaagagagcugagcggcuacugcagcaacaucaagcugcagguggugaaggacgcccaggcccugcugcacggccuggacuucagcgaggugagcaacgugcagagacugaugagaaagcagaagagagacgacagcgaccugaagagacugagagaccugaaccaggccgugaacaaccugguggagcugaagagcacccagcagaagagcauccugagagugggcacccugaccagcgacgaccugcugacccuggccgccgaccuggagaagcugaagagcaaggugaucagaaccgagagaccccugagcagcggcguguacaugggcaaccugagcgcccagcagcuggagcagagaagagcccugcugaacaugaucggcauggccggcggcgcccagagcacccagcccggcagagacggcguggugagagugugggacgugaagaaccccgaccugcugaacaaccaguucggcaccaugcccagccugacccuggccugccugaccaagcagggccagguggaccugaacgacgccgugcuggcccugaccgaccugggccugaucuacaccgccaaguaccccaacagcagcgaccuggacagacugagccagagccaccccauccugaacaugguggacaccaagaagagcagccugaacaucagcggcuacaacuucagccugggcgccgccgugaaggccggcgccugcaugcuggacggcggcaacaugcuggagaccaucaagaucaccccccagaccauggacggcauccugaagagcauccugaaggugaagagaagccugggcauguucgugagcgacacccccggcgagagaaaccccuacgagaacauccuguacaagaucugccugagcggcgacggcuggcccuacaucgccagcagaaccagcaucgugggcagagccugggagaacaccaccguggaccuggagagcgacggcaagccccagaaggugggcaccaucggcagcaacaagagccugcagagcgccggcuuccccaccggccugaccuacagccagcugaugacccugaaggacagcaugaugcagcuggaccccagcgccaagaccuggaucgacaucgagggcagacccgaggaccccguggagaucgcccuguaccagcccaugagcggcugcuacauccacuucuucagagagcccaccgaccugaagcaguucaagcaggacgccaaguacagccacggcaucgacguggccgaccuguuccccgcccagcccggccugaccagcgccgugaucgaggcccugcccagaaacauggugcugaccugccagggcagcgacgacaucaagagacugcuggacagccagggcagaagagacaucaagcugaucgacaucgcccugagcaaggccgacagcagaagauucgagaacgccgugugggaccagugcaaggaccugugccacaugcacaccggcguggugguggagaagaagaagagaggcggcaaggaggagaucaccccccacugcgcccugauggacugcaucauguacgacgccgccgugagcggcggccugaacauccccgugcugagagccgugcugcccagagacaugguguucagaaccagcagccccaagguggugcuguga

SEQ ID NO: 8863 - RNA, 1710 nt, Artificial Sequence
  derived and/or modified CDS sequence (opt4) from LASV(Lassa virus/H.sapiens-wt/NGA/2016/ISTH_0187;Clade II)__AVO03550__NP
augagcgugagcaaggaggugaagagcuuccuguggacccagagccugagaagagagcugagcggcuacugcagcaacaucaagcugcagguggugaaggacgcccaggcccugcugcacggccuggacuucagcgaggugagcaacgugcagagacugaugagaaagcagagaagagacgacggcgaccugaagagacugagagaccugaaccaggccgugaacaaccugguggagcugaagagcacccagcagaagagcgugcugagagugggcacccugagcagcgacgaccugcuggugcuggccgccgaccuggagaagcugaagagcaaggugaucagaaccgagagaccccugagcagcggcguguacaugggcaaccugagcagccagcagcuggaccagagaagagcccugcugaacaugaucggcaugaccggcggcaacagaggcggcagcgccagcagcgacggcaucgugagagugugggacgugaagaacgccgagcugcugaacaaccaguucggcaccaugcccagccugacccuggccugccugaccaagcagggccagguggaccugaacgacgccgugcaggcccugaccgaccugggccugaucuacaccgccaaguaccccaacagcagcgaccuggacagacuggcccagagccaccccauccugaacaugaucgacaccaagaagagcagccugaacaucagcggcuacaacuucagccugggcgccgccgugaaggccggcgccugcaugcuggacggcggcaacaugcuggagaccaucaaggugagcccccagaccaucgacggcauccugaagaccauccugaaggugaagaagagccugggcauguucaucagcgacgugcccggcgagagaaaccccuacgagaacauccuguacaagaucugccugagcggcgacggcuggcccuacaucgccagcagaaccagcaucgugggcagagccugggagaacaccgugguggaccuggagagcgacaacaagccccagaagaccggcaacggcggcagcaacaagagccugcagagcgccggcuucgccgccggccugaccuacagccagcugaugacccugaaggacagcaugcugcagcuggaccccaacagcaagaccuggauggacaucgagggcagacccgaggaccccguggagaucgcccuguaccagcccagcagcggcugcuacauccacuucuucagagagcccaccgaccugaagcaguucaagcaggacgccaaguacagccacggcaucgacgugaccgaccuguucgccgcccagcccggccugaccagcgccgugaucgaggcccugcccagaaacauggugaucaccugccagggcagcgaggacaucagaaagcugcuggagagccagggcagaagagacaucaagcugaucgacaucagccugaacaaggccgacagcagaaaguucgagaacgccgugugggaccaguucaaggaccugugccacaugcacaccggcguggugguggagaagaagaagagaggcggcaaggaggagaucaccccccacugcgcccugauggacugcaucauguucgacgccgccgugagcggcggccuggacaccaaggugcugagagccgugcugcccagagacaugguguucagaaccagcacccccaagguggugcuguga

SEQ ID NO: 8864 - RNA, 1710 nt, Artificial Sequence
  derived and/or modified CDS sequence (opt4) from LASV(Lassa virus/H.sapiens-wt/NGA/2016/ISTH_0419;Clade II)__AVO03540__NP
augagcgccagcaaggaggugaagagcuuccuguggacccagagccugagaagagagcugagcggcuacugcagcaacaucaagcugcagguggugaaggacgcccaggcccugcugcacggccuggacuucagcgaggugagcaacgugcagagacugaugagaaagcagaagagagacgacggcgaccugaagagacugagagaccugaaccaggccgugaacaaccugguggagcugaagagcacccagcagaagagcgugcugagagugggcacccugagcagcgacgaccugcugacccuggccgccgaccuggagaagcugaagagcaaggugaucagaaccgagagaccccugagcagcggcguguacaugggcaaccugagcagccagcagcuggaccagagaagagcccugcugaacaugaucggcaugaccggcggcggccagggcgccagcgccggcagagacggcaucgugagagugugggacgugaagaacgccgagcugcugaacaaccaguucggcaccaugcccagccugacccuggccugccugaccaagcagggccagguggaccugaacgacgccgugcaggcccugaccgaccugggccugaucuacaccgccaaguaccccaacagcagcgaccuggacagacugagccagagccaccccauccugaacaugaucgacaccaagaagagcagccugaacaucagcggcuacaacuucagccugggcgccgccgugaaggccggcgccugcaugcuggacggcggcaacaugcuggagaccaucagagugagcccccagaccauggacggcauccugaagagcauccugaaggugaagagaagccugggcauguucgugagcgacauccccggcgagagaaaccccuacgagaacauccuguacaagaucugccugagcggcgacggcuggcccuacaucgccagcagaaccagcaucaccggcagagccugggagaacaccaucguggaccuggagagcgacagcagaccccagaagcccggcaacagcggcagcaacagaagccugcagagcgccggcuuccccgccggccugaccuacagccagcugaugacccugaaggacagcaugcugcagcuggaccccaacgccaagaccuggauggacaucgagggcagacccgacgaccccguggagaucgcccuguaccagcccagcagcggcugcuacauccacuucuucagagagcccaccgaccugaagcaguucaagcaggacgccaaguacagccacggcaucgacgugggcgaccuguucaccgcccagcccggccugaccagcgccgugcuggaggcccugcccagaaacauggugaucaccugccagggcagcgaggacaucaagaagcugcuggagagccagggcagaaaggacaucaagcugguggacaucagcaugagcaagcccgacagcagaaaguucgagaacgccgugugggaccaguacaaggaccugugccacaugcacaccggcaucgugguggagaagaagaagagaggcggcaaggaggagaucaccccccacugcgcccugauggacugcaucauguucgacgccgccguggugggcggccuggacgccaagauccugagagccgugcugcccagagacaugguguucagaaccagcacccccaagguggugcuguga

SEQ ID NO: 8865 - RNA, 1710 nt, Artificial Sequence
  derived and/or modified CDS sequence (opt4) from LASV(Lassa virus/H.sapiens-wt/NGA/2016/ISTH_0447;Clade II)__AVO03560__NP
augagcgccagcaaggaggugagaagcuuccuguggacccagagccugagaagagagcugagcggcuacugcagcagcaucaagcugcagguggugaaggacgcccaggcccugcugcacggccuggacuucagcgaggugagcaacgugcagagacugaugagaaagcagaagagagacgacagcgaccugaagagacugagagaccugaaccaggccgugaacaaccugguggagcugaagagcacccagcagaagagcauccugagagugggcacccugaccagcgacgaccugcugacccuggccgccgaccuggagaagcugaagagcaaggugaucagaaccgagagaccccugagcagcggcguguacaugggcaaccugagcagccagcagcuggagcagagaagagcccugcugaacaugaucggcauggugggcggcgcccagggcacccagcccggcagagacggcguggugagagugugggacgugaagaaccccgaccugcugaacaaccaguucggcaccaugcccagccugacccuggccugccugaccaagcagggccagguggaccugaacgacgccgugcuggcccugaccgaccugggccugaucuacaccgccaaguaccccaacagcagcgaccuggacagacugagccagagccaccccauccugaacaugguggacaccaagaagagcagccugaacaucagcggcuacaacuucagccugggcgccgccgugaaggccggcgccugcaugcuggacggcggcaacaugcuggagaccaucaaggugaccccccagaccauggacggcauccugaagagcauccugaaggugaagagaagccugggcauguucgugagcgacacccccggcgagagaaaccccuacgagaacauccuguacaagaucugccugagcggcgacggcuggcccuacaucgccagcagaaccagcaucgugggcagagccugggagaacaccaccguggaccuggagagcgacggcaagccccagaaggugggcgccgccggcagcaccaagagccugcagagcgccggcuuccccaccggccugaccuacagccagcugaugacccugaaggacagcaugaugcagcuggaccccagcgccaagaccuggaucgacaucgagggcagacccgaggaccccguggagaucgcccuguaccagcccaugagcggcugcuacauccacuucuucagagagcccaccgaccugaagcaguucaagcaggacgccaaguacagccacggcaucgacguggccgaccuguuccccgcccagcccggccugaccagcgccgugaucgaggcccugcccagaaacauggugcugaccugccagggcagcgacgacaucaagagacugcuggacagccagggcagaagagacaucaagcugaucgacaucgcccugagcaagguggacagcagaagauucgagaacgccgugugggaccagugcaaggaccugugccacaugcacaccggcguggugguggagaagaagaagagaggcggcaaggaggagaucaccccccacugcgcccugauggacugcaucauguacgacgccgccgugagcggcggccugaacauccccgugcugagagccgugcugcccagagacaugguguucagaaccagcagccccaagguggugcuguga

SEQ ID NO: 8866 - RNA, 1710 nt, Artificial Sequence
  derived and/or modified CDS sequence (opt4) from LASV(Lassa virus/H.sapiens-wt/NGA/2016/ISTH_0543;Clade II)__AVO03596__NP
augagcgccagcaaggaggugaagagcuuccuguggacccagagccugagaagagagcugagcggcuacugcagcaacaucaagcugcagguggugaaggacgcccaggcccugcugcacggccuggacuucagcgaggugagcaacgugcagagacugaugagaaagcagaagagagacgacggcgaccugaagagacugagagaccugaaccaggccgugaacaaccugguggagcugaagagcacccagcagaagagcgugcugagagugggcacccugaccagcgacgaccugcugauccuggccgccgaccuggagaagcugaagagcaaggugaucagaaccgagagaccccugagcagcggcguguacaugggcaaccugagcacccagcagcuggagcagagaaaggcccugcugagcaugaucggcauggugggcggcgcccagggcacccagcccggcagagacggcguggugagagugugggacgugaagaaccccgaccugcugaacaaccaguucggcaccaugcccagccugacccuggccugccugaccaagcagggccagguggaccugaacgacgccgugcuggcccugaccgaccugggccugaucuacaccgccaaguaccccaacagcagcgaccuggacagacugagccagagccaccccauccugaacaugguggacaccaagaagagcagccugaacaucagcggcuacaacuucagccugggcgccgccgugaaggccggcgccugcaugcuggacggcggcaacaugcuggagaccaucaaggugaccccccagaccauggacggcauccugaagagcauccugaaggugaagagaagccugggcauguucgugagcgacacccccggcgagagaaaccccuacgagaacauccuguacaagaucugccugagcggcgacggcuggcccuacaucgccagcagaaccagcaucgugggcagagccugggagaacaccaccguggaccuggagagcgacggcaagccccagaaggugggcaccgccggcagcaacaagagccugcagagcgccggcuuccccaccggccugaccuacagccagcugaugacccugaaggacagcaugaugcagcuggaccccagcgccaagaccuggaucgacaucgagggcagacccgaggaccccguggagaucgcccuguaccagcccaugagcggcugcuacauccacuucuucagagagcccaccgaccugaagcaguucaagcaggacgccaaguacagccacggcaucgacgugaccgaccuguucagcgcccagcccggccugaccagcgccgugaucgaggcccugcccagaaacauggugcugaccugccagggcagcgacgacaucaagaagcugcuggacagccagggcagaagagacaucaagcugaucgacaucagccugagcaaggccgacagcagaagauucgagaacgccgugugggaccagugcaaggaccugugccacaugcacaccggcguggugguggagaagaagaagagaggcggcaaggaggagaucaccccccacugcgcccugauggacugcaucauguucgacgccgccgugagcggcggccugaacauccccauccugagagccgugcugcccagagacaugguguucagaaccagcagccccaagguggugcuguga

SEQ ID NO: 8867 - RNA, 1710 nt, Artificial Sequence
  derived and/or modified CDS sequence (opt4) from LASV(Lassa virus/H.sapiens-wt/NGA/2016/ISTH_0565;Clade II)__AVO03638__NP
augagcgccagcaaggaggugaagagcuuccuguggacccagagccugagaagagagcugagcggcuacugcagcaacaucaagcugcagguggugaaggacgcccaggcccugcugcacggccuggacuucagcgaggugagcaacgugcagagacugaugagaaagcagaagagagacgacggcgaccugaagagacugagagaccugaaccaggccgugaacaaccugguggagcugaagagcacccagcagaagagcgugcugagagugggcacccugaccagcgacgaccugcugacccuggccgccgaccuggagaagcugaagagcaaggugaucagaaccgagagaccccugagcagcggcguguacaugggcaaccugagcacccagcagcuggagcagagaaaggcccugcugagcaugaucggcauggugggcggcgcccagggcacccagcccggcagagacggcguggugagagugugggacgugaagaaccccgaccugcugaacaaccaguucggcaccaugcccagccugacccuggccugccugaccaagcagggccagguggaccugaacgacgccgugcuggcccugaccgaccugggccugaucuacaccgccaaguaccccaacagcagcgaccuggacagacugagccagagccaccccauccugaacaugguggacaccaagaagagcagccugaacaucagcggcuacaacuucagccugggcgccgccgugaaggccggcgccugcaugcuggacggcggcaacaugcuggagaccaucaaggugaccccccagaccauggacggcauccugaagagcauccugaaggugaagagaagccugggcauguucgugagcgacacccccggcgagagaaaccccuacgagaacauccuguacaagaucugccugagcggcgacggcuggcccuacaucgccagcagaaccagcaucgugggcagagccugggagaacaccaccguggaccuggagagcgacggcaagccccagaaggugggcaccgccggcagcaacaagagccugcagagcgccggcuuccccaccggccugaccuacagccagcugaugacccugaaggacagcaugaugcagcuggaccccagcgccaagaccuggaucgacaucgagggcagacccgaggaccccguggagaucgcccuguaccagcccaugagcggcugcuacauccacuucuucagagagcccaccgaccugaagcaguucaagcaggacgccaaguacagccacggcaucgacgugaccgaccuguucagcgcccagcccggccugaccagcgccgugaucgaggcccugcccagaaacauggugcugaccugccagggcagcgacgacaucaagaagcugcuggacagccagggcagaagagacaucaagcugaucgacaucagccugagcaaggccgacagcagaagauucgagaacgccgugugggaccagugcaaggaccugugccacaugcacaccggcguggugguggagaagaagaagagaggcggcaaggaggagaucaccccccacugcgcccugauggacugcaucauguucgacgccgccgugagcggcggccugaacauccccauccugagagccgugcugcccagagacaugguguucagaaccagcagccccaagguggugcuguga

SEQ ID NO: 8868 - RNA, 1710 nt, Artificial Sequence
  derived and/or modified CDS sequence (opt4) from LASV(Lassa virus/H.sapiens-wt/NGA/2016/ISTH_0610;Clade II)__AVO03586__NP
augagcgccagcaaggaggugaagagcuuccuguggacccagagccugagaagagagcugagcggcuacugcagcaacaucaagcugcagguggugaaggacgcccaggcccugcugcacggccuggacuucagcgaggugagcaacgugcagagacugaugagaaagcagaagagagacgacagcgaccugaagagacugagagaccugaaccaggccgugaacaaccugguggagcugaagagcacccagcagaagagcgugcugagagugggcacccugaccagcgacgaccugcugacccuggccgccgaccuggagaagcugaagagcaaggugaucagaaccgagagaccccugagcagcggcguguacaugggcaaccugagcgcccagcagcuggagcagagaagagcccugcugaacaugaucggcauggugggcggcgcccagggcacccagcccggcagagacggcguggugagagugugggacgugaagaaccccgaccugcugaacaaccaguucggcaccaugcccagccugacccuggccugccugaccaagcagggccagguggaccugaacgacguggugcuggcccugaccgaccugggccugaucuacaccgccaaguaccccaacagcagcgaccuggacagacugagccagagccaccccauccugaacaugguggacaccaagaagagcagccugaacaucagcggcuacaacuucagccugggcgccgccgugaaggccggcgccugcaugcuggacggcggcaacaugcuggagaccaucaaggugaccccccagaccauggacggcauccugaagagcauccugaaggugaagaagagccugggcauguucgugagcgacacccccggcgagagaaaccccuacgagaacauccuguacaagaucugccugagcggcgacggcuggcccuacaucgccagcagaaccagcaucaugggcagagccugggagaacaccaccguggaccuggagagcgacggcaagccccagaaggugggcaccgccggcagcaacaagagccugcagagcgccggcuuccccaccggccugaccuacagccagcugaugacccugaaggacagcaugaugcagcuggaccccagcgccaagaccuggaucgacaucgagggcagacccgaggaccccguggagaucgcccuguaccagcccaugagcggcugcuacauccacuucuucagagagcccaccgaccugaagcaguucaagcaggacgccaaguacagccacggcaucgacgugaccgaccuguucagcgcccagcccggccugaccagcgccgugaucgaggcccugcccagaaacauggugcugaccugccagggcagcgacgacaucaagagacugcuggacagccagggcagaagagacaucaagcugaucgacaucgcccugagcaaggccgacagcagaagauucgagaacgccgugugggaccagugcaaggaccugugccacaugcacaccggcguggugguggagaagaagaagagaggcggcaaggaggagaucaccccccacugcgcccugauggacugcaucauguacgacgccgccgugagcggcggccugaacauccccgugcugagagccgugcugcccagagacaugguguucagaaccagcagccccaagguggugcuguga

SEQ ID NO: 8869 - RNA, 1710 nt, Artificial Sequence
  derived and/or modified CDS sequence (opt4) from LASV(Lassa virus/H.sapiens-wt/NGA/2016/ISTH_0621;Clade II)__AVO03544__NP
augagcgccagcaaggaggugaagagcuuccuguggacccagagccugagaagagagcugagcggcuacugcagcaacaucaagcugcagguggugaaggacgcccaggcccugcugcacggccuggacuucagcgaggugagcaacgugcagagacugaugagaaagcagaagagagacgacggcgaccugaagagacugagagaccugaaccaggccgugaacaaccugguggagcugaagagcacccagcagaagagcgugcugagagugggcacccugagcagcgacgaccugcugauccuggccgccgaccuggagaagcugaagagcaaggugaucagaaccgagagaccccugagcagcggcguguacaugggcaaccugagcagccagcagcuggaccagagaagagcccugcugaacaugaucggcaugaccggcggcagccagggcaccaacaccggcagagacggcaucgugagaaucugggacgugaagaacgccgagcugcugaacaaccaguucggcaccaugcccagccugacccuggccugccugaccaagcagggccagguggaccugaacgacgccgugcaggcccugaccgaccugggccugaucuacaccgccaaguaccccaacagcagcgaccuggacagacugagccagagccaccccauccugaacaugaucgacaccaagaagagcagccugaacaucagcggcuacaacuucagccugggcgccgccgugaaggccggcgccugcaugcuggacggcggcaacaugcuggagaccaucaaggugagcccccagaccauggacggcauccugaagagcauccugaaggugaagaagagccugggcauguucgugagcgacacccccggcgagagaaaccccuacgagaacauccuguacaagaucugccugagcggcgacggcuggcccuacaucgccagcagaaccagcaucaccggcagagccugggagaacaccaucguggaccuggagaccgacaacaagagccagaagcccggcaacagcggcagcaacagaagccugcagagcgccggcuuccccgccggccugaccuacagccagcugaugacccugaaggacagcaugcugcagcuggaccccaacgccaagaccuggauggacaucgagggcagacccgacgaccccguggagaucgcccuguaccagcccagcagcggcugcuacauccacuucuucagagagcccaccgaccugaagcaguucaagcaggacgccaaguacagccacggcaucgacgugagcgaccuguucgccgcccagcccggccugaccagcgccgugaucgaggcccugcccagaaacauggugaucaccugccagggcagcgaggacaucagaaagcugcuggagagccagggcagaagagacaucaagcugguggacaucagccugagcaagagcgacagcagaaaguucgagaacguggugugggaccaguucaaggaccugugccacaugcacaccggcguggugguggagaagaagaagaagggcggcaaggaggagaucaccccccacugcgcccugauggacugcaucauguucgacgccgccgugaugggcggccuggacgccagagugcugagagccgugcugcccagagacaugguguucagaaccagcacccccaagguggugcuguga

SEQ ID NO: 8870 - RNA, 1710 nt, Artificial Sequence
  derived and/or modified CDS sequence (opt4) from LASV(Lassa virus/H.sapiens-wt/NGA/2016/ISTH_0701;Clade II)__AVO03630__NP
augagcgccagcaaggaggugaagagcuuccuguggacccagagccugagaagagagcugagcggcuacugcagcaacaucaagcugcagguggugaaggacgcccaggcccugcugcacggccuggacuucagcgaggugagcaacgugcagagacugaugagaaagcagaagagagacgacagcgaccugaagagacugagagaccugaaccaggccgugaacaaccugguggagcugaagagcacccagcagaagagcauccugagagugggcacccugaccagcgacgaccugcugauccuggccgccgaccuggagaagcugaagagcaaggugaucagaaccgagagaccccugagcagcggcguguacaugggcaaccugagcacccagcagcuggagcagagaagagcccugcugaaccugaucggcauggugggcggcgcccagggcacccagcccggcagagacggcguggugagagugugggacgugaagaaccccgaccugcugaacaaccaguucggcaccaugcccagccugacccuggccugccugaccaagcagggccagguggaccugaacgacgccgugcuggcccugaccgaccugggccugaucuacaccgccaaguaccccaacagcagcgaccuggacagacugagccagagccaccccauccugaacaugguggacaccaagaagagcagccugaacaucagcggcuucaacuucagccugggcgccgccgugaaggccggcgccugcaugcuggacggcggcaacaugcuggagaccaucaaggugaccccccagaccauggacggcauccugaagagcauccugaaggugaagagaagccugggcauguucgugagcgacacccccggcgagagaaaccccuacgagaacauccuguacaagaucugccugagcggcgacggcuggcccuacaucgccagcagaaccagcaucgugggcagagccugggagaacaccaccguggaccuggagagcgacggcaagccccacaaggugggcaccgccggcagcaacaagagccugcagagcgccggcuuccccaccggccugaccuacagccagcugaugacccugaaggacagcaugaugcagcuggaccccagcgccaagaccuggaucgacaucgagggcagacccgaggaccccguggagaucgcccuguaccagcccaugagcggcugcuacauccacuucuucagagagcccaccgaccugaagcaguucaagcaggacgccaaguacagccacggcaucgacguggccgaccuguuccccgcccagcccggccugaccagcgccgugaucgaggcccugcccagaaacauggugcugaccugccagggcagcgacgacaucaagagacugcuggacagccagggcagaagagacaucaagcugaucgacaucgcccugagcaaggccgacagcagaagauucgagaacgccgugugggaccagugcaaggaccugugccacaugcacaccggcguggugguggagaagaagaagagaggcggcaaggaggagaucaccccccacugcgcccugauggacugcaucauguacgacgccgccgugagcggcggccugaacauccccgugcugagagccgugcugcccagagacaugguguucagaaccagcagccccaagguggugcuguga

SEQ ID NO: 8871 - RNA, 1710 nt, Artificial Sequence
  derived and/or modified CDS sequence (opt4) from LASV(Lassa virus/H.sapiens-wt/NGA/2016/ISTH_0702;Clade II)__AVO03558__NP
augagcgccagcaaggaggugaagagcuuccuguggacccagagccugagaagagagcugagcggcuacugcagcaacaucaagcugcagguggugaaggacgcccaggcccugcugcacggccuggacuucagcgaggugagcaacgugcagagacugaugagaaagcagaagagagacgacagcgaccugaagagacugagagaccugaaccaggccgugaacaaccugguggagcugaagagcacccagcagaagagcauccugagagugggcacccugaccagcgacgaccugcugacccuggccgccgaccuggagaagcugaagagcaaggugaucagaaccgagagaccccugagcagcggcguguacaugggcaaccugagcacccagcagcuggagcagagaagagcccugcugagcaugaucggcauggugggcggcacccagggcacccagcccggcagagacggcguggugagagugugggacgugaagaaccccgaccugcugaacaaccaguucggcaccaugcccagccugacccuggccugccugaccaagcagggccagguggaccugaacgacgccgugcuggcccugaccgaccugggccugaucuacaccgccaaguaccccaacagcagcgaccuggacagacugagccagagccaccccauccugaacaugguggacaccaagaagagcagccugaacaucagcggcuacaacuucagccugggcgccgccgugaaggccggcgccugcaugcuggacggcggcaacaugcuggagaccaucaaggugaccccccagaccauggacggcauccugaagagcauccugaaggugaagaagagccugggcauguucgugagcgacacccccggcgagagaaaccccuacgagaacauccuguacaagaucugccugagcggcgacggcuggcccuacaucgccagcagaaccagcaucgugggcagagccugggagaacaccaccguggaccuggagagcgacggcaagccccagaaggugggcaccgccggcagcaacaagagccugcagagcgccggcuuccccaccggccugaccuacagccagcugaugacccugaaggacagcaugaugcagcuggaccccagcgccaagaccuggaucgacaucgagggcagacccgaggaccccguggagaucgcccuguaccagcccaugagcggcugcuacauccacuucuucagagagcccaccgaccugaagcaguucaagcaggacgccaaguacagccacggcaucgacguggccgaccuguuccccgcccagcccggccugaccagcgccgugaucgaggcccugcccagaaacauggugcugaccugccagggcagcgacgacaucaagagacugcuggacagccagggcagaagagacaucaagcugaucgacaucagccugagcaaggccgacagcagaagauucgagaacgccgugugggaccagugcaaggaccugugccacaugcacaccggcguggugguggagaagaagaagagaggcggcaaggaggagaucaccccccacugcgcccugauggacugcaucauguacgacgccgccgugagcggcggccugaacauccccgugcugagagccgugcugcccagagacaugguguucagaaccagcagccccaagguggugcuguga

SEQ ID NO: 8872 - RNA, 1710 nt, Artificial Sequence
  derived and/or modified CDS sequence (opt4) from LASV(Lassa virus/H.sapiens-wt/NGA/2016/ISTH_0717;Clade II)__AVO03548__NP
augagcgugagcaaggaggugaagagcuuccuguggacccagagccugagaagagagcugagcggcuacugcagcaacaucaaggugcagguggugaaggacgcccaggcccugcugcacggccuggacuucagcgaggugagcaacgugcagagacugaugagaaagcagaagagagacgacggcgaccugaagagacugagagaccugaaccaggccgugaacaaccugguggagcugaagagcacccagcagaagagcgugcugagagugggcacccugagcagcgacgaccugcuggugcuggccgccgaccuggagaagcugaagagcaaggugaucagaaccgagagaccccugagcagcggcaucuacaugggcaaccugagcagccagcagcuggaccagagaaaggcccugcugaacaugaucggcaugaccggcggcaacgugggcagaaacaccaccggcgacggcguggugagagugugggacgugaagaacgccgagcugcugaacaaccaguucggcaccaugcccagccugacccuggccugccugaccaagcagggccagguggaccugaacgacgccgugcuggcccugaccgaccugggccugaucuacaccgccaaguaccccaacagcagcgaccuggacagacuggcccagagccaccccauccugagcaugaucgacaccaagaagagcagccugaacaucagcggcuacaacuucagccugggcgccgccgugaaggccggcgccugcaugcuggacggcggcaacaugcuggagaccaucaaggugagcccccagaccaucgacggcauccugaagagcauccugaaggugaagagaagccugggcauguucaucagcgacacccccggcgagagaaaccccuacgagaacauccuguacaagaucugccugagcggcgacggcuggcccuacaucgccagcagaaccagcaucgugggcagagccugggagaacaccgugguggaccuggagagcgacaacaagccccagaagaccggcaacggcggcagcaacaagagccugcagagcgccggcuucgccgccggccugaccuacagccagcugaugacccugaaggacagcaugcugcagcuggaccccaacgccaagaccuggauggacaucgagggcagacccgaggaccccguggagaucgcccuguaccagcccagcagcggcugcuacauccacuucuucagagagcccaccgaccugaagcaguucaagcaggacgccaaguacagccacggcaucgacgugaccgaccuguucgccgcccagcccggccugaccagcgccgugaucgaggcccugcccagaaacauggugaucaccugccagggcagcgaggacaucagaaagcugcuggagagccagggcagaagagacaucaagcugaucgacaucagccugagcaagguggacagcagaaaguucgagaacgccgugugggaccaguucaaggaccugugccacaugcacaccggcaucgugguggagaagaagaagagaggcggcaaggaggagaucaccccccacugcgcccugauggacugcaucauguucgacgccgccgugagcggcggcguggacgccaaggugcugagagccgugcugcccagagacaugguguucagaaccagcacccccaagguggugcuguga

SEQ ID NO: 8873 - RNA, 1710 nt, Artificial Sequence
  derived and/or modified CDS sequence (opt4) from LASV(Lassa virus/H.sapiens-wt/NGA/2016/ISTH_0753;Clade II)__AVO03610__NP
augagcgccagcaaggaggugaagagcuuccuguggacccagagccugagaagagagcugagcggcuacugcagcagcaucaagcugcagguggugaaggacgcccaggcccugcugcacggccuggacuucagcgaggugagcaacgugcagagacugaugagaaagcagaagagagacgacagcgaccugaagagacugagagaccugaaccaggccgugaacaaccugguggagcugaagagcacccagcagaagagcauccugagagugggcacccugaccagcgacgaccugcugacccuggccgccgaccuggagaagcugaagagcaaggugaucagaaccgagagaccccugagcagcggcguguacaugggcaaccugagcacccagcagcuggagcagagaagagcccugcugaacaugaucggcauggugggcggcgcccagggcacccagcccggcagagacggcguggugagagugugggacgugaagaaccccgaccugcugaacaaccaguucggcaccaugcccagccugacccuggccugccugaccaagcagggccagguggaccugaacgacgccgugcuggcccugaccgaccugggccugaucuacaccgccaaguaccccaacagcagcgaccuggacagacugagccagagccaccccauccugaacaugguggacaccaagaagagcagccugaacaucagcggcuacaacuucagccugggcgccgccgugaaggccggcgccugcaugcuggacggcggcaacaugcuggagaccaucaaggugaccccccagaccauggacggcauccugaagagcgugcugaaggugaagagaagccugggcauguucgugagcgacacccccggcgagagaaaccccuacgagaacauccuguacaagaucugccugagcggcgacggcuggcccuacaucgccagcagaaccagcaucgugggcagagccugggagaacaccaccguggaccuggagagcgacggcaagccccagaaggugggcgccgccggcagcaacaagagccugcagagcgccggcuuccccaccggccugaccuacagccagcugaugacccugaaggacagcaugaugcagcuggaccccagcgccaagaccuggaucgacaucgagggcagacccgaggaccccguggagaucgcccuguaccagcccaugagcggcugcuacauccacuucuucagagagcccaccgaccugaagcaguucaagcaggacgccaaguacagccacggcaucgacguggccgaccuguuccccgcccagcccggccugaccagcgccgugaucgaggcccugcccagaaacauggugcugaccugccagggcagcgacgacaucaagagacugcuggacagccagggcagaagagacaucaagcugaucgacaucgcccugagcaaggccgacagcagaagauucgagaacgccgugugggaccagugcaaggaccugugccacaugcacaccggcguggugguggagaagaagaagagaggcggcaaggaggagaucaccccccacugcgcccugauggacugcaucauguacgacgccgccgugagcggcggccugaacauccccgugcugagagccgugcugcccagagacaugguguucagaaccagcagccccaagguggugcuguga

SEQ ID NO: 8874 - RNA, 1710 nt, Artificial Sequence
  derived and/or modified CDS sequence (opt4) from LASV(Lassa virus/H.sapiens-wt/NGA/2016/ISTH_0759;Clade II)__AVO03594__NP
augagcgccagcaaggaggugaagagcuuccuguggacccagagccugagaagagagcugagcggcuacugcagcagcaucaagcugcagguggugaaggacgcccaggcccugcugcacggccuggacuucagcgaggugagcaacgugcagagacugaugagaaagcagaagagagacgacagcgaccugaagagacugagagaccugaaccaggccgugaacaaccugguggagcugaagagcacccagcagaagagcauccugagagugggcacccugaccagcgacgaccugcugacccuggccgccgaccuggagaagcugaagagcaaggugaccagaaccgagagaccccugagcagcggcguguacaugggcaaccugagcacccagcagcuggagcagagaagagcccugcugaacaugaucggcauggugggcggcgcccagggcacccagcccggcagagacggcguggugagagugugggacgugaagaaccccgaccugcugaacaaccaguucggcaccaugcccagccugacccuggccugccugaccaagcagggccagguggaccugaacgacgccgugcuggcccugaccgaccugggccugaucuacaccgccaaguaccccaacagcagcgaccuggacagacugagccagagccaccccauccugaacaugguggacaccaagaagagcagccugaacaucagcggcuacaacuucagccugggcgccgccgugaaggccggcgccugcaugcuggacggcggcaacaugcuggagaccaucaaggugaccccccagaccauggacggcauccugaagagcauccugaaggugaagagaagccugggcauguucgugagcgacgcccccggcgagagaaaccccuacgagaacauccuguacaagaucugccugagcggcgacggcuggcccuacaucgccagcagaaccagcaucgugggcagagccugggagaacaccaccguggaccuggagagcgacggcaagccccagaaggugggcaccgccggcagcaacaagagccugcagagcgccggcuuccccaccggccugaccuacagccagcugaugacccugaaggacagcaugaugcagcuggaccccagcgccaagaccuggaucgacaucgagggcagacccgaggaccccguggagaucgcccuguaccagcccaugagcggcugcuacauccacuucuucagagagcccaccgaccugaagcaguucaagcaggacgccaaguacagccacggcaucgacguggccgaccuguuccccgcccagcccggccugaccagcgccgugaucgaggcccugcccagaaacauggugcugaccugccagggcagcgacgacaucaagaagcugcuggacagccagggcagaagagacaucaagcugaucgacaucgcccugagcagagccgacagcagaagauucgagaacgccgugugggaccagugcaaggaccugugccacaugcacaccggcguggugguggagaagaagaagagaggcggcaaggaggagaucaccccccacugcgcccugauggacugcaucauguacgacgccgccgugagcggcggccugaacauccccgugcugagagccgugcugcccagagacaugguguucagaaccagcagccccaagguggugcuguga

SEQ ID NO: 8875 - RNA, 1710 nt, Artificial Sequence
  derived and/or modified CDS sequence (opt4) from LASV(Lassa virus/H.sapiens-wt/NGA/2016/ISTH_0777;Clade II)__AVO03616__NP
augagcgccagcaaggaggugaagagcuuccuguggacccagagccugagaagagagcugagcggcuacugcagcaacaucaagcugcagguggugaaggacgcccaggcccugcugcacggccuggacuucagcgaggugagcaacgugcagagacugaugagaaagcagaagagagacgacggcgaccugaagagacugagagaccugaaccaggccgugaacaaccugguggagcugaagagcacccagcagaagagcgugcugagagugggcacccugaccagcgacgaccugcugacccuggccgccgaccuggagaagcugaagagcaaggugaucagaaccgagagaccccugagcagcggcguguacaugggcaaccugagcacccagcagcuggagcagagaaaggugcugcugagcaugaucggcauggugggcggcacccagagagcccagcccggcaaggacggcguggugagagugugggacgugaagaaccccgaccugcugaacaaccaguucggcaccaugcccagccugacccuggccugccugaccaagcagggccagguggaccugaacgacaccgugcuggcccugaccgaccugggccugaucuacaccgccaaguaccccaacagcagcgaccuggacagacugagccagagccaccccauccugaacaugguggacaccaagaagagcagccugaacaucagcggcuacaacuucagccugggcgccgccgugaaggccggcgccugcaugcuggacggcggcaacaugcuggagaccaucaaggugaccccccagaccauggacggcauccugaagagcauccugaaggugaagagaagccugggcauguucgugagcgacacccccggcgagagaaaccccuacgagaacauccuguacaagaucugccugagcggcgacggcuggcccuacaucgccagcagaaccagcaucgugggcagagccugggagaacaccaccguggaccuggagagcgacggcaagccccagaaggugggcaccgccggcagcaacaagagccugcagagcgccggcuuccccaccggccugaccuacagccagcugaugacccugaaggacagcaugaugcagcuggaccccagcgccaagaccuggaucgacaucgagggcagacccgaggaccccguggagaucgcccuguaccagcccgugagcggcugcuacauccacuucuucagagagcccaccgaccugaagcaguucaagcaggacgccaaguacagccacggcaucgacgugaccgaccuguucagcgcccagcccggccugaccagcgccgugaucgaggcccugcccagaaacauggugcugaccugccagggcagcgacgacaucaagaagcugcuggacagccagggcagaagagacaucaagcugaucgacaucagccugagcaaguucgacagcagaaaguucgagaacgccgugugggaccagugcaaggaccugugccacaugcacaccggcguggugguggagaagaagaagagaggcggcaaggaggagaucaccccccacugcgcccugauggacugcaucauguucgacgccgccgugagcggcggccugaacauccccauccugagagccgugcugcccagagacaugguguucagaaccagcagccccaagguggugcuguga

SEQ ID NO: 8876 - RNA, 1707 nt, Artificial Sequence
  derived and/or modified CDS sequence (opt4) from LASV(Lassa virus/H.sapiens-wt/NGA/2016/ISTH_0779;Clade II)__AVO03656__NP
agcgugagcaaggaggugaagagcuuccuguggacccagagccugagaagagagcugagcggcuacugcagcaacaucaagcugcagguggugaaggacgcccaggcccugcugcacggccuggacuucagcgaggugagcaacgugcagagacugaugagaaagcagaagagagacgacaacgaccugaagagacugagagaccugaaccaggccgugaacaaccugguggagcugaagagcgugcagcagaagagcauccugagagugggcacccugagcagcgacgaccugcugauccuggccgccgaccuggagaagcugaagagcaaggugaucagaaccgagagaccccugagcagcggcguguacaugggcaaccugagcagccagcagcuggagcagagaaaggcccugcugaacaugaucggcaugaccggcggcagccagggcgcccagcccggcagagacggcguggugagagugugggacgugaagaacagcgaccugcugaacaaccaguucggcaccaugcccagccugacccuggccugccugaccaagcagggccagguggaccugaacgacgccgugcuggcccugaccgaccugggccugaucuacaccgccaaguaccccaacaccagcgaccuggacagacugagccagagccaccccauccugaacaugguggacaccaagaagagcagccugaacaucagcggcuacaacuucagccugggcgccgccgugaaggccggcgccugcaugcuggacggcggcaacaugcuggagaccaucaaggugaccccccagaccauggacggcauccugaagagcauccugaaggugaagagagcccugggcauguucgugagcgacacccccggcgagagaaaccccuacgagaacauccuguacaagaucugccugagcggcgagggcuggcccuacaucgccagcagaaccagcaucaccggcagagccugggagaacaccaucguggaccuggagagcgacagcaagccccagaagaugggcaccaccggcagcaacaagagccugcagagcgccggcuuccccgccggccugaccuacagccagcugaugacccugaaggacagcaugaugcagcuggaccccagcgccaagaccuggaucgacaucgagggcagacccgaggaccccguggagaucgcccuguaccagcccaucagcggcugcuacauccacuucuucagagagcccaccgaccugaagcaguucaagcaggacgccaaguacagccacggcaucgacguggccgaccuguucagcgcccagcccggccugaccagcgccgugaucgaggcccugcccagaaacauggugcugaccugccagggcagcgacgacaucaagaagcugcuggacagccagggcagaagagacaucaagcugaucgacaucagccugaacaaggccgacagcagaagauucgagaacgccgugugggaccagugcaaggaccugugccacaugcacaccggcguggugguggagaagaagaagagaggcggcaaggaggagaucaccccccacugcgcccugauggacugcaucauguucgacgccgccgugagcggcggccugaacauccccauccugagagccgugcugcccagagacaugguguucagaaccagcagccccaagguggugcuguga

SEQ ID NO: 8877 - RNA, 1710 nt, Artificial Sequence
  derived and/or modified CDS sequence (opt4) from LASV(Lassa virus/H.sapiens-wt/NGA/2016/ISTH_0917;Clade II)__AVO03536__NP
augagcgccagcaaggaggugaagagcuuccuguggacccagagccugagaagagagcugagcggcuacugcagcaacaucaagcugcagguggugaaggacgcccaggcccugcugcacggccuggacuucagcgaggugagcaacgugcagagacugaugagaaagcagaagagagacgacagcgaccugaagagacugagagaccugaaccaggccgugaacaaccugguggagcugaagagcacccagcagaagagcauccugagagugggcacccugagcagcgacgaccugcugacccuggccaccgaccuggagaagcugaagagcaaggugaucagaaccgagagaccccugagcagcggcguguacaugggcaaccugagcacccagcagcuggaccagagaagagcccugcugaacaugaucggcauggugggcggcagccagggcaccagcgccggcagagacggcaucgugagagugugggacgugagaaaccccgagcugcugaacaaccaguucggcaccaugcccagccugacccuggccugccugaccaagcagggccagguggaccugaacgacgccgugcaggcccugaccgaccugggccugaucuacaccgccaaguaccccaacagcagcgaccuggacagacugagccagagccaccccauccugaacaugaucgacaccaagaagagcagcaucaacaucagcggcuacaacuucagccugggcgccgccgugaaggccggcgccugcaugcuggacggcggcaacaugcuggagaccaucaaggugagcccccagagcaucgacggcauccugaagagcauccugaaggugaagagaacccugggcauguucgugagcgacacccccggcgagagaaaccccuacgagaacauccuguacaagaucugccugagcggcgacggcuggcccuacaucgccagcagaaccagcaucaccggcagagccugggagaacaccgugguggaccuggagagcgacgacaagcccaagaagcccggcaacaacgagagcaacagaagccugcagagcgccggcuuccccgccggccugaccuacagccagcugaugacccugaaggacagcaugcugcagcuggaccccaacgccaagaccuggauggacaucgagggcagacccgacgaccccguggagaucgcccuguaccagcccaacagcggcugcuacauccacuucuucagagagcccaccgaccugaagcaguucaagcaggacgccaaguacagccacggcaucgacaucggcgaccuguucgccagccagcccggccugaccagcgccgugaucgaggcccugcccagaaacauggugaucaccugccagggcagcgaggacaucaagaagcugcuggagagccagggcagaaaggacaucagacugguggacaucagccugagcaaggccgacagcagaaaguucgagaacgccgugugggaccaguacaaggaccugugccacaugcacaccggcaucgugguggagaagaagaagaagggcggcaaggaggagaucaccccccacugcgcccugauggacugcaucauguucgacgccgccgugaugggcggccuggacgccaaggugcugagagccgugcugcccagagacaugguguucagaaccagcacccccagaguggugcuguga

SEQ ID NO: 8878 - RNA, 1710 nt, Artificial Sequence
  derived and/or modified CDS sequence (opt4) from LASV(Lassa virus/H.sapiens-wt/NGA/2016/ISTH_0919;Clade II)__AVO03660__NP
augagcgccagcaaggaggugaagagcuuccuguggacccagagccugagaagagagcugagcggcuacugcagcaacaucaagcugcagguggugaaggacgcccaggcccugcugcacggccuggacuucagcgaggugagcaacgugcagagacugaugagaaagcagaagagagacgacagcgaccugaagagacugagagaccugaaccaggccgugaacaaccugguggagcugaagagcacccagcagaagagcauccugagagugggcacccugaccagcgacgaccugcugacccuggccgccgaccuggagaagcugaagagcaaggugaucagaaccgagagaccccugagcagcggcguguacaugggcaaccugagcacccagcagcuggagcagagaagagcccugcugaaccugaucggcauggugggcggcgcccagggcgcccagcccggcagagacggcguggugagagugugggacgugaagaaccccgaccugcugaacaaccaguucggcaccaugcccagccugacccuggccugccugaccaagcagggccagguggaccugaacgacguggugcuggcccugaccgaccugggccugaucuacaccgccaaguaccccaacagcagcgaccuggacagacugagccagagccaccccauccugaacaugguggacaccaagaagagcagccugaacaucagcggcuucaacuucagccugggcgccgccgugaaggccggcgccugcaugcuggacggcggcaacaugcuggagaccaucaaggugaccccccagaccauggacggcauccugaagagcauccugaaggugaagaagagccugggcauguucgugagcgacacccccggcgagagaaaccccuacgagaacauccuguacaagaucugccugagcggcgacggcuggcccuacaucgccagcagaaccagcaucgugggcagagccugggagaacaccaccguggaccuggagagcgacggcaagccccacaaggugggcaccgccggcagcaacaagagccugcagagcgccggcuuccccaccggccugaccuacagccagcugaugacccugaaggacagcaugaugcagcuggaccccagcgccaagaccuggaucgacaucgagggcagacccgaggaccccguggagaucgcccuguaccagcccaugagcggcugcuacauccacuucuucagagagcccaccgaccugaagcaguucaagcaggacgccaaguacagccacggcaucgacguggccgaccuguuccccgcccagcccggccugaccagcgccgugaucgaggcccugcccagaaacauggugcugaccugccagggcagcgacgacaucaagagacugcuggacagccagggcagaagagacaucaagcugaucgacaucgcccugagcaaggccgacagcagaagauucgagaacgccgugugggaccagugcaaggaccugugccacaugcacaccggcguggugguggagaagaagaagagaggcggcaaggaggagaucaccccccacugcgcccugauggacugcaucauguacgacgccgccgugagcggcggccugaacauccccgugcugagagccgugcugcccagagacaugguguucagaaccagcagccccaagguggugcuguga

SEQ ID NO: 8879 - RNA, 1710 nt, Artificial Sequence
  derived and/or modified CDS sequence (opt4) from LASV(Lassa virus/H.sapiens-wt/NGA/2016/ISTH_1006;Clade II)__AVO03644__NP
augagcgccagcaaggaggugaagagcuuccuguggacccagagccugagaagagagcugagcggcuacugcagcaacaucaagcugcagguggugaaggacgcccaggcccugcugcacggccuggacuucagcgaggugagcaacgugcagagacugaugagaaagcagaagagagacgacagcgaccugaagagacugagagaccugaaccaggccgugaacaaccugguggagcugaagagcacccagcagaagagcauccugagagugggcacccugaccagcgacgaccugcugacccuggccgccgaccuggagaagcugaagagcaaggugaucagaaccgagagaccccugagcagcggcguguacaugggcaaccugagcacccagcagcuggagcagagaagagcccugcugaacaugaucggcauggugggcggcacccagggcacccagcccggcagagacggcguggugagagugugggacgugaagaaccccgaccugcugaacaaccaguucggcaccaugcccagccugacccuggccugccugaccaagcagggccagguggaccugaacgacgccgugcuggcccugaccgaccugggccugaucuacaccgccaaguaccccaacagcagcgaccuggacagacugagccagagccaccccauccugaacaugguggacaccaagaagagcagccugaacaucagcggcuacaacuucagccugggcgccgccgugaaggccggcgccugcaugcuggacggcggcaacaugcuggagaccaucaaggugaccccccagaccauggacggcauccugaagagcauccugaaggugaagaagagccugggcauguucgugagcgacacccccggcgagagaaaccccuacgagaacauccuguacaagaucugccugagcggcgacggcuggcccuacaucgccagcagaaccagcaucgugggcagagccugggagaacaccaccguggaccuggagagcgacggcaagccccagaaggugggcaccgccggcagcaacaagagccugcagagcgccggcuuccccaccggccugaccuacagccagcugaugacccugaaggacagcaugaugcagcuggaccccagcgccaagaccuggaucgacaucgagggcagacccgaggaccccguggagaucgcccuguaccagcccaugagcggcugcuacauccacuucuucagagagcccaccgaccugaagcaguucaagcaggacgccaaguacagccacggcaucgacguggccgaccuguuccccgcccagcccggccugaccagcgccgugaucgaggcccugcccagaaacauggugcugaccugccagggcagcgacgacaucaagagacugcuggacagccagggcagaagagacaucaagcugaucgacaucagccugagcaaggccgacagcagaagauucgagaacgccgugugggaccagugcaaggaccugugccacaugcacaccggcguggugguggagaagaagaagagaggcggcaaggaggagaucaccccccacugcgcccugauggacugcaucauguacgacgccgccgugagcggcggccugaacauccccgugcugagagccgugcugcccagagacaugguguucagaaccagcagccccaagguggugcuguga

SEQ ID NO: 8880 - RNA, 1710 nt, Artificial Sequence
  derived and/or modified CDS sequence (opt4) from LASV(Lassa virus/H.sapiens-wt/NGA/2016/ISTH_1026;Clade II)__AVO03590__NP
augagcgccagcaaggaggugaagagcuuccuguggacccagagccugagaagagagcugagcggcuacugcagcaacaucaagcugcagguggugaaggacgcccaggcccugcugcacggccuggacuucagcgaggugagcaacgugcagagacugaugagaaagcagaagagagacgacagcgaccugaagagacugagagaccugaaccaggccgugaacaaccugguggagcugaagagcacccagcagaagagcauccugagagugggcacccugaccagcgacgaccugcugacccuggccgccgaccuggagaagcugaagagcaaggugaucagaaccgagagaccccugagcagcggcguguacaugggcaaccugagcgcccagcagcuggagcagagaagagcccugcugaaccugaucggcauggugggcggcgcccagggcacccagcccggcagagacggcguggugagagugugggacgugaagaaccccgaccugcugaacaaccaguucggcaccaugcccagccugacccuggccugccugaccaagcagggccagguggaccugaacgacgccgugcuggcccugaccgaccugggccugaucuacaccgccaaguaccccaacagcagcgaccuggacagacugagccagagccaccccauccugaacaugguggacaccaagaagagcagccugaacaucagcggcuucaacuucagccugggcgccgccgugaaggccggcgccugcaugcuggacggcggcaacaugcuggagaccaucaaggugaccccccagaccaucgacggcauccugaagagcauccugaaggugaagaagagccugggcauguucgugagcgacacccccggcgagagaaaccccuacgagaacauccuguacaagaucugccugagcggcgacggcuggcccuacaucgccagcagaaccagcaucgugggcagagccugggagaacaccaccguggaccuggagagcgacggcaagccccacaaggugggcaccgccggcagcaacaagagccugcagagcgccggcuuccccaccggccugaccuacagccagcugaugacccugaaggacagcaugaugcagcuggaccccagcgccaagaccuggaucgacaucgagggcagacccgaggaccccguggagaucgcccuguaccagcccaugagcggcugcuacauccacuucuucagagagcccaccgaccugaagcaguucaagcaggacgccaaguacagccacggcaucgacguggccgaccuguuccccgcccagcccggccugaccagcgccgugaucgaggcccugcccagaaacauggugcugaccugccagggcagcgacgacaucaagagacugcuggacagccagggcagaagagacaucaagcugaucgacaucgcccugagcaaggccgacagcagaagauucgagaacgccgugugggaccagugcaaggaccugugccacaugcacaccggcguggugguggagaagaagaagagaggcggcaaggaggagaucaccccccacugcgcccugauggacugcaucauguacgacgccgccgugagcggcggccugaacauccccgugcugagagccgugcugcccagagacaugguguucagaaccagcagccccaagguggugcuguga

SEQ ID NO: 8881 - RNA, 1710 nt, Artificial Sequence
  derived and/or modified CDS sequence (opt4) from LASV(Lassa virus/H.sapiens-wt/NGA/2016/ISTH_1070;Clade II)__AVO03652__NP
augagcgccagcaaggaggugaagagcuuccuguggacccagagccugagaagagagcugagcggcuacugcagcaacaucaagcugcagguggugaaggacgcccaggcccugcugcacggccuggacuucagcgaggugagcaacgugcagagacugaugagaaagcagaagagagacgacggcgaccugaagagacugagagaccugaaccaggccgugaacaaccugguggagcugaagagcacccagcagaagagcgugcugagagugggcacccugaccagcgacgaccugcugacccuggccgccgaccuggagaagcugaagagcaaggugaucagaaccgagagaccccugagcagcggcguguacaugggcaaccugagcacccagcagcuggagcagagaagagcccugcugagcaugaucggcauggugggcggcgcccagggcacccagcccggcagagacggcguggugagagugugggacgugaagaaccccgaccugcugaacaaccaguucggcaccaugcccagccugacccuggccugccugaccaagcagggccagguggaccugaacgacguggugcuggcccugaccgaccugggccugaucuacaccgccaaguaccccaacagcagcgaccuggacagacugagccagagccaccccauccugaacaugguggacaccaagaagagcagccugaacaucagcggcuacaacuucagccugggcgccgccgugaaggccggcgccugcaugcuggacggcggcaacaugcuggagaccaucaaggugaccccccagaccauggacggcauccugaagagcauccugaaggugaagaagagccugggcauguucgugagcgacacccccggcgagagaaaccccuacgagaacauccuguacaagaucugccugagcggcgacggcuggcccuacaucgccagcagaaccgccaucgugggcagagccugggagaacaccaccguggaccuggagagcgacggcaagccccagaaggugggcgccaccggcagcaacaagagccugcagagcgccggcuuccccaccggccugaccuacagccagcugaugacccugaaggacagcaugaugcagcuggaccccagcgccaagaccuggaucgacaucgagggcagacccgaggaccccguggagaucgcccuguaccagcccaugagcggcugcuacauccacuucuucagagagcccaccgaccugaagcaguucaagcaggacgccaaguacagccacggcaucgacgugaccgaccuguucagcgcccagcccggccugaccagcgccgugaucgaggcccugcccagaaacauggugcugaccugccagggcagcgacgacaucaagagacugcuggacagccagggcagaagagacaucaagcugaucgacaucgcccugagcaaggccgacagcagaagauucgagaacgccgugugggaccagugcaaggaccugugccacaugcacaccggcguggugguggagaagaagaagagaggcggcaaggaggagaucaccccccacugcgcccugauggacugcaucauguacgacgccgccgugagcggcggccugaacauccccgugcugagagccgugcugcccagagacaugguguucagaaccagcagccccaagguggugcuguga

SEQ ID NO: 8882 - RNA, 1710 nt, Artificial Sequence
  derived and/or modified CDS sequence (opt4) from LASV(Lassa virus/H.sapiens-wt/NGA/2016/ISTH_1150;Clade II)__AVO03628__NP
augagcgccagcaaggaggugaagagcuuccuguggacccagagccugagaagagagcugagcggcuacugcagcagcaucaagcugcagguggugaaggacgcccaggcccugcugcacggccuggacuucagcgaggugagcaacgugcagagacugaugagaaagcagaagagagacgacagcgaccugaagagacugagagaccugaaccaggccgugaacaaccugguggagcugaagagcacccagcagaagagcauccugagagugggcacccugaccagcgacgaccugcugacccuggccgccgaccuggagaagcugaagagcaaggugaucagaaccgagagaccccugagcagcggcguguacaugggcaaccugagcacccagcagcuggagcagagaagagcccugcugagcaugaucggcauggugggcggcgcccagggcacccagcccggcagagacggcguggugagagugugggacgugaagaaccccgaccugcugaacaaccaguucggcaccaugcccagccugacccuggccugccugaccaagcagggccagguggaccugaacgacaccgugcuggcccugaccgaccugggccugaucuacaccgccaaguaccccaacagcagcgaccuggacagacugagccagagccaccccauccugaacaugguggacaucaagaagagcagccugaacaucagcggcuacaacuucagccugggcgccgccgugaaggccggcgccugcaugcuggacggcggcaacaugcuggagaccaucaaggugaccccccagaccauggacggcauccugaagagcauccugaaggugaagagaagccugggcauguucgugagcgacacccccggcgagagaaaccccuacgagaacauccuguacaagaucugccugagcggcgacggcuggcccuacaucgccagcagaaccagcaucgugggcagagccugggagaacaccaccguggaccuggagagcgacggcaagccccagaaggugggcaccgccggcagcaacaagagccugcagagcgccggcuuccccaccggccugaccuacagccagcugaugacccugaaggacagcaugaugcagcuggaccccagcgccaagaccuggaucgacaucgagggcagacccgaggaccccguggagaucgcccuguaccagcccaugagcggcugcuacauccacuucuucagagagcccaccgaccugaagcaguucaagcaggacgccaaguacagccacggcaucgacgugaccgaccuguucagcgcccagcccggccugaccagcgccgugaucgaggcccugcccagaggcauggugcugaccugccagggcagcgacgacaucaagaagcugcuggacagccagggcagaagagacaucaagcugaucgacaucagccugagcaaggccgacagcagaagauucgagaacgccgugugggaccagugcaaggaccugugccacaugcacaccggcguggugguggagaagaagaagagaggcggcaaggaggagaucaccccccacugcgcccugauggacugcaucauguucgacgccgccgugagcggcggccugaacauccccauccugagagccgugcugcccagagacaugguguucagaaccagcagccccaagguggugcuguga

SEQ ID NO: 8883 - RNA, 1710 nt, Artificial Sequence
  derived and/or modified CDS sequence (opt4) from LASV(Lassa virus/H.sapiens-wt/NGA/2016/ISTH_1174;Clade II)__AVO03556__NP
augagcgccagcaaggaggugaagagcuuccuguggacccagagccugagaagagagcugagcggcuacugcagcaacaucaagcugcagguggugaaggacgcccaggcccugcugcacggccuggacuucagcgaggugagcaacgugcagagacugaugagaaagcagaagagagacgacagcgaccugaagagacugagagaccugaaccaggccgugaacaaccugguggagcugaagagcacccagcagaagagcauccugagagugggcacccugaccagcgacgaccugcugacccuggccgccgaccuggagaagcugaagagcaaggugaucagaaccgagagaccccugagcagcggcguguacaugggcaaccugagcacccagcagcuggagcagagaagagcccugcugaacaugaucggcauggugggcggcgcccagagcacccagcccggcagagacggcguggugagagugugggacgugaagaaccccgaccugcugaacaaccaguucggcaccaugcccagccugacccuggccugccugaccaagcagggccagguggaccugaacgacgccgugcuggcccugaccgaccugggccugaucuacaccgccaaguaccccaacagcagcgaccuggacagacugagccagagccaccccauccugaacaugguggacaccaagaagagcagccugaacaucagcggcuacaacuucagccugggcgccgccgugaaggccggcgccugcaugcuggacggcggcaacaugcuggagaccaucaagaucaccccccagaccauggacggcauccugaagagcauccugaaggugaagagaagccugggcauguucgugagcgacacccccggcgagagaaaccccuacgagaacauccuguacaaggugugccugagcggcgacggcuggcccuacaucgccagcagaaccagcaucgugggcagagccugggagaacaccaccguggaccuggagagcgacggcaagccccagaaggugggcaccgugggcagcaacaagagccugcagagcgccggcuuccccaccggccugaccuacagccagcugaugacccugaaggacagcaugaugcagcuggaccccagcgccaagaccuggaucgacaucgagggcagacccgaggaccccguggagaucgcccuguaccagcccaugagcggcugcuacauccacuucuucagagagcccaccgaccugaagcaguucaagcaggacgccaaguacagccacggcaucgacguggccgaccuguuccccgcccagcccggccugaccagcgccgugaucgaggcccugcccagaaacauggugcugaccugccagggcagcgacgacaucaagagacugcuggacagccagggcagaagagacaucaagcugaucgacaucgcccugagcaaggccgacagcagaagauucgagaacgccgugugggaccagugcaaggaccugugccacaugcacaccggcguggugguggagaagaagaagagaggcggcaaggaggagaucaccccccacugcgcccugauggacugcaucauguacgacgccgccgugagcggcggccugaacauccccgugcugagagccgugcugcccagagacaugguguucagaaccagcagccccaagguggugcuguga

SEQ ID NO: 8884 - RNA, 1710 nt, Artificial Sequence
  derived and/or modified CDS sequence (opt4) from LASV(Lassa virus/H.sapiens-wt/NGA/2016/ISTH_1207;Clade II)__AVO03600__NP
augagcgccagcaaggaggugaagagcuuccuguggacccagagccugagaagagagcugagcggcuacugcagcaacaucaagcugcagguggugaaggacgcccaggcccugcugcacggccuggacuucagcgaggugagcaacgugcagagacugaugagaaagcagaagagagacgacagcgaccugaagagacugagagaccugaaccaggccgugaacaaccugguggagcugaagagcacccagcagaagagcauccugagagugggcacccugaccagcgacgaccugcugauccuggccgccgaccuggagaagcugaagagcaaggugaucagaaccgagagaccccugagcagcggcguguacaugggcaaccugagcacccagcagcuggagcagagaagagcccugcugaacaugaucggcaugguggacggcgcccagggcacccagcccggcagagacggcguggugagagugugggacgugaagaaccccgaccugcugaacaaccaguucggcaccaugcccagccugacccuggccugccugaccaagcagggccagguggaccugaacgacgccgugcuggcccugaccgaccugggccugaucuacaccgccaaguaccccaacagcagcgaccuggacagacugagccagagccaccccauccugaacaugguggacaccaagaagagcagccugaacaucagcggcuacaacuucagccugggcgccgccgugaaggccggcgccugcaugcuggacggcggcaacaugcuggagaccaucaaggugaccccccagaccauggacggcauccugaagagcauccugaaggugaagaagagccugggcauguucgugagcgacacccccggcgagagaaaccccuacgagaacauccuguacaagaucugccugagcggcgacggcuggcccuacaucgccagcagaaccagcaucgugggcagagccugggagaacaccaccguggaccuggagagcgacggcaagagccagaaggugggcaccgccggcagcaacaagagccugcagagcgccggcuuccccaccggccugaccuacagccagcugaugacccugaaggacagcaugaugcagcuggaccccagcgccaagaccuggaucgacaucgagggcagacccgaggaccccguggagaucgcccuguaccagcccaugagcggcugcuacauccacuucuucagagagcccaccgaccugaagcaguucaagcaggacgccaaguacagccacggcaucgacguggccgaccuguuccccgcccagcccggccugaccagcgccgugaucgaggcccugcccagaaacauggugcugaccugccagggcagcgacgacaucaagagacugcuggacagccagggcagaagagacaucaagcugaucgacaucgcccugagcaaggccgacagcagaagauucgagaacgccgugugggaccagugcaaggaccugugccacaugcacaccggcguggugguggagaagaagaagagaggcggcaaggaggagaucaccccccacugcgcccugauggacugcaucauguacgacgccgccgugagcggcggccugaacauccccgugcugagagccgugcugcccagagacaugguguucagaaccagcagccccaagguggugcuguga

SEQ ID NO: 8885 - RNA, 1710 nt, Artificial Sequence
  derived and/or modified CDS sequence (opt4) from LASV(Lassa virus/H.sapiens-wt/NGA/2016/ISTH_1306;Clade II)__AVO03624__NP
augagcgccagcaaggaggugaagagcuuccuguggacccagagccugagaagagagcugagcggcuacugcagcaacaucaagcugcagguggugaaggacgcccaggcccugcugcacggccuggacuucagcgaggugagcaacgugcagagacugaugagaaagcagaagagagacgacggcgaccugaagagacugagagaccugaaccaggccgugaacaaccugguggagcugaagagcacccagcagaagagcauccugagagugggcacccugaccagcgacgaccugcugacccuggccgccgaccuggagaagcugaagagcaaggugaucagaaccgagagaccccugagcagcggcguguacaugggcaaccugagcacccagcagcuggagcagagaagagcccugcugaacaugaucggcauggugggcggcgcccagggcacccagcccggcagagacggcguggugagagugugggacgugaagaaccccgaccugcugaacaaccaguucggcaccaugcccagccugacccuggccugccugaccaagcagggccagguggaccugaacgacgccgugcuggcccugaccgaccugggccugaucuacaccgccaaguaccccaacagcagcgaccuggacagacugagccagagccaccccauccugaacaugguggacaccaagaagagcagccugaacaucagcggcuacaacuucagccugggcgccgccgugaaggccggcgccugcaugcuggacggcggcaacaugcuggagaccaucaaggugaccccccagaccauggacggcauccugaagagcauccugaaggugaagaagagccugggcauguucgugagcgacacccccggcgagagaaaccccuacgagaacauccuguacaagaucugccugagcggcgacggcuggcccuacaucgccagcagaaccagcaucgugggcagagccugggagaacaccaccguggaccuggagagcgacggcaagccccagaaggugggcaccgccggcagcaacaagagccugcagagcgccggcuuccccaccggccugaccuacagccagcugaugacccugaaggacagcaugaugcagcuggaccccagcgccaagaccuggaucgacaucgagggcagacccgaggaccccguggagaucgcccuguaccagcccaugagcggcugcuacauccacuucuucagagagcccaccgaccugaagcaguucaagcaggacgccaaguacagccacggcaucgacguggccgaccuguuccccgcccagcccggccugaccagcgccgugaucgaggcccugcccagaaacauggugcugaccugccagggcagcgacgacaucaagagacugcuggacagccagggcagaagagacaucaagcugaucgacaucgcccugagcaaggccgacagcagaagauucgagaacgccgugugggaccagugcaaggaccugugccacaugcacaccggcguggugguggagaagaagaagagaggcggcaaggaggagaucaccccccacugcgcccugauggacugcaucauguacgacgccgccgugagcggcggccugaacauccccgugcugagagccgugcugcccagagacaugguguucagaaccagcagccccaagguggugcuguga

SEQ ID NO: 8886 - RNA, 1710 nt, Artificial Sequence
  derived and/or modified CDS sequence (opt4) from LASV(Lassa virus/H.sapiens-wt/NGA/2016/ISTH_1311;Clade II)__AVO03576__NP
augagcgccagcaaggaggugaagagcuuccuguggacccagagccugagaagagagcugagcggcuacugcagcaacaucaagcugcagguggugaaggacgcccaggcccugcugcacggccuggacuucagcgaggugagcaacgugcagagacugaugagaaagcagaagagagacgacggcgaccugaagagacugagagaccugaaccaggccgugaacaaccugguggagcugaagagcacccagcagaagagcgugcugagagugggcacccugaccagcgacgaccugcugauccuggccgccgaccuggagaagcugaagagcaaggugaucagaaccgagagaccccugagcagcggcguguacaugggcaaccugagcacccagcagcuggagcagagaagagcccugcugagcaugaucggcauggugggcggcgcccagggcacccagcccggcagagacggcguggugagagugugggacgugaagaaccccgaccugcugaacaaccaguucggcaccaugcccagccugacccuggccugccugaccaagcagggccagguggaccugaacgacgccgugcuggcccugaccgaccugggccugaucuacaccgugaaguaccccaacagcagcgaccuggacagacugagccagagccaccccauccugaacaugguggacaccaagaagagcagccugaacaucagcggcuacaacuucagccugggcgccgccgugaaggccggcgccugcaugcuggacggcggcaacaugcuggagaccaucaaggugaccccccagaccaucgacggcauccugaagagcauccugaaggugaagagaagccugggcauguucgugagcgacacccccggcgagagaaaccccuacgagaacauccuguacaagaucugccugagcggcgacggcuggcccuacaucgccagcagaaccagcaucgugggcagagccugggagaacaccaccguggaccuggagagcgacggcaagccccagaaggugggcgccgccggcagcaacaagagccugcagagcgccggcuuccccaccggccugaccuacagccagcugaugacccugaaggacagcaugaugcagcuggaccccagcgccaagaccuggaucgacaucgagggcagacccgaggaccccguggagaucgcccuguaccagcccaugagcggcugcuacauccacuucuucagagagcccaccgaccugaagcaguucaagcaggacgccaaguacagccacggcaucgacgugaccgaccuguucagcgcccagcccggccugaccagcgccgugaucgaggcccugcccagaaacauggugcugaccugccagggcagcgacgacaucaagaagcugcuggacagccagggcagaagagacaucaagcugaucgacaucagccugaacaagaccgacagcagaagauucgagaacgccgugugggaccagugcaaggaccugugccacaugcacaccggcguggugguggagaagaagaagagaggcggcaaggaggagaucaccccccacugcgcccugauggacugcaucauguucgacgccgccgugagcggcggccugaacauccccauccugagagccgugcugcccagagacaugguguucagaaccagcagccccaagguggugcuguga

SEQ ID NO: 8887 - RNA, 1710 nt, Artificial Sequence
  derived and/or modified CDS sequence (opt4) from LASV(Lassa virus/H.sapiens-wt/NGA/2016/ISTH_1423;Clade II)__AVO03578__NP
augagcgccagcaaggaggugaagagcuuccuguggacccagagccugagaagagagcugagcggcuacugcagcaacaucaagcugcagguggugaaggacgcccaggcccugcugcacggccuggacuucagcgaggugagcaacgugcagagacugaugagaaagcagaagagagacgacagcgaccugaagagacugagagaccugaaccaggccgugaacaaccugguggagcugaagagcacccagcagaagagcauccugagagugggcacccugaccagcgacgaccugcugacccuggccgccgaccuggagaagcugaagagcaaggugaucagaaccgagagaccccugagcagcggcguguacaugggcaaccugagcacccagcagcuggagcagagaagagcccugcugaacaugaucggcauggugagcggcacccagggcacccagcccggcagagacggcguggugagagugugggacgugaagaaccccgaccugcugaacaaccaguucggcaccaugcccagccugacccuggccugccugaccaagcagggccagguggaccugaacgacgccgugcuggcccugaccgaccugggccugaucuacaccgccaaguaccccaacagcagcgaccuggacagacugagccagagccaccccauccugaacaugguggacaccaagaagagcagccugaacaucagcggcuacaacuucagccugggcgccgccgugaaggccggcgccugcaugcuggacggcggcaacaugcuggagaccaucaaggugaccccccagaccauggacggcauccugaagagcauccugaaggugaagaagagccugggcauguucgugagcgacacccccggcgagagaaaccccuacgagaacauccuguacaagaucugccugagcggcgacggcuggcccuacaucgccagcagaaccagcaucgugggcagagccugggagaacaccaccguggaccuggagagcgacggcaagccccagaagaugggcaccgccggcagcaacaagagccugcagagcgccggcuuccccaccggccugaccuacagccagcugaugacccugaaggacagcaugaugcagcuggaccccagcgccaagaccuggaucgacaucgagggcagacccgaggaccccguggagaucgcccuguaccagcccaugagcggcugcuacauccacuucuucagagagcccaccgaccugaagcaguucaagcaggacgccaaguacagccacggcaucgacguggccgaccuguuccccgcccagcccggccugaccagcgccgugaucgaggcccugcccagaaacauggugcugaccugccagggcagcgacgacaucaagaagcugcuggacagccagggcagaagagacaucaagcugaucgacaucgcccugagcaaggccgacagcagaagauucgagaacgccgugugggaccagugcaaggaccugugccacaugcacaccggcguggugguggagaagaagaagagaggcggcaaggaggagaucaccccccacugcgcccugauggacugcaucauguacgacgccgccgugagcggcggccugaacauccccgugcugagagccgugcugcccagagacaugguguucagaaccagcaaccccaagguggugcuguga

SEQ ID NO: 8888 - RNA, 1710 nt, Artificial Sequence
  derived and/or modified CDS sequence (opt4) from LASV(Lassa virus/H.sapiens-wt/NGA/2016/ISTH_1472;Clade II)__AVO03606__NP
augagcgccagcaaggaggugaagagcuuccuguggacccagagccugagaagagagcugagcggcuacugcagcaacaucaagcugcagguggugaaggacgcccaggcccugcugcacggccuggacuucagcgaggugagcaacgugcagagacugaugagaaagcagaagagagacgacagcgaccugaagagacugagagaccugaaccaggccgugaacaaccugguggagcugaagagcacccagcagaagagcauccugagagugggcacccugaccagcgacgaccugcugacccuggccgccgaccuggagaagcugaagagcaaggugaucagaaccgagagaccccugagcagcggcguguacaugggcaaccugagcacccagcagcuggagcagagaagagcccugcugaacaugaucggcauggugggcggcauccagggcacccagcccggcagagacggcguggugagagugugggacgugaagaaccccgaccugcugaacaaccaguucggcaccaugcccagccugacccuggccugccugaccaagcagggccagguggaccugaacgacaccgugcaggcccugaccgaccugggccugaucuacaccgccaaguaccccaacagcagcgaccuggacagacugagccagagccaccccauccugaacaugguggacaccaagaagagcagccugaacaucagcggcuacaacuucagccugggcgccgccgugaaggccggcgccugcaugcuggacggcggcaacaugcuggagaccaucaaggugaccccccagaccauggacggcauccugaagagcauccugaaggugaagaagagccugggcauguucgugagcgacacccccggcgagagaaaccccuacgagaacauccuguacaagaucugccugagcggcgacggcuggcccuacaucgccagcagaaccagcaucgugggcagagccugggagaacaccaccguggaccuggagagcgacggcaagccccagaaggugggcaccgccggcagcaacaagagccugcagagcgccggcuuccccaccggccugaccuacagccagcugaugacccugaaggacagcaugaugcagcuggaccccagcgccaagaccuggaucgacaucgagggcagacccgaggaccccguggagaucgcccuguaccagcccaugagcggcugcuacauccacuucuucagagagcccaccgaccugaagcaguucaagcaggacgccaaguacagccacggcaucgacguggccgaccuguuccccgcccagcccggccugaccagcgccgugaucgaggcccugcccagaaacauggugcugaccugccagggcagcgacgacaucaagagacugcuggacagccagggcagaagagacaucaagcugaucgacaucagccugagcaagaccgacagcagaagauucgagaacgccgugugggaccagugcaaggaccugugccacaugcacaccggcguggugguggagaagaagaagagaggcggcaaggaggagaucaccccccacugcgcccugauggacugcaucauguacgacgccgccgugagcggcggccugaacauccccgugcugagagccgugcugcccagagacaugguguucagaaccagcagccccaagguggugcuguga

SEQ ID NO: 8889 - RNA, 1710 nt, Artificial Sequence
  derived and/or modified CDS sequence (opt4) from LASV(Lassa virus/H.sapiens-wt/NGA/2016/ISTH_1474;Clade II)__AVO03614__NP
augagcgccagcaaggaggugaagagcuuccuguggacccagagccugagaagagagcugagcggcuacugcagcaacaucaagcugcagguggugaaggacgcccaggcccugcugcacggccuggacuucagcgaggugagcaacgugcagagacugaugagaaagcagaagagagacgacagcgaccugaagagacugagagaccugaaccaggccgugaacaaccugguggagcugaagagcacccagcagaagagcauccugagagugggcacccugaccagcgacgaccugcugacccuggccgccgaccuggagaagcugaagagcaaggugaucagaaccgagagaccccugagcagcggcguguacaugggcaaccugagcacccagcagcuggagcagagaagagcccugcugaacaugaucggcauggugggcggcauccagggcacccagcccggcagagacggcguggugagagugugggacgugaagaaccccgaccugcugaacaaccaguucggcaccaugcccagccugacccuggccugccugaccaagcagggccagguggaccugaacgacaccgugcaggcccugaccgaccugggccugaucuacaccgccaaguaccccaacagcagcgaccuggacagacugagccagagccaccccauccugaacaugguggacaccaagaagagcagccugaacaucagcggcuacaacuucagccugggcgccgccgugaaggccggcgccugcaugcuggacggcggcaacaugcuggagaccaucaaggugaccccccagaccauggacggcauccugaagagcauccugaaggugaagagaagccugggcauguucgugagcgacacccccggcgagagaaaccccuacgagaacauccuguacaagaucugccugagcggcgacggcuggcccuacaucgccagcagaaccagcaucgugggcagagccugggagaacaccaccguggaccuggagagcgacggcaagccccagaaggugggcaccgccggcagcaacaagagccugcagagcgccggcuuccccaccggccugaccuacagccagcugaugacccugaaggacagcaugaugcagcuggaccccagcgccaagaccuggaucgacaucgagggcagacccgaggaccccguggagaucgcccuguaccagcccaugagcggcugcuacauccacuucuucagagagcccaccgaccugaagcaguucaagcaggacgccaaguacagccacggcaucgacguggccgaccuguuccccgcccagcccggccugaccagcgccgugaucgaggcccugcccagaaacauggugcugaccugccagggcagcgacgacaucaagagacugcuggacagccagggcagaagagacaucaagcugaucgacaucgcccugagcaaggccgacagcagaagauucgagaacgccgugugggaccagugcaaggaccugugccacaugcacaccggcguggugguggagaagaagaagagaggcggcaaggaggagaucaccccccacugcgcccugauggacugcaucauguacgacgccgccgugagcggcggccugaacauccccgugcugagagccgugcugcccagagacaugguguucagaaccagcagccccaagguggugcuguga

SEQ ID NO: 8890 - RNA, 1710 nt, Artificial Sequence
  derived and/or modified CDS sequence (opt4) from LASV(Lassa virus/H.sapiens-wt/NGA/2016/ISTH_1496;Clade II)__AVO03580__NP
augagcgccagcaaggaggugaagagcuuccuguggacccagagccugagaagagagcugagcggcuacugcagcaacaucaagcugcagguggugaaggacgcccaggcccugcugcacggccuggacuucagcgaggugagcaacgugcagagacugaugagaaagcagaagagagacgacagcgaccugaagagacugagagaccugaaccaggccgugaacaaccugguggagcugaagagcacccagcagaagagcauccugaaggugggcacccugaccagcgacgaccugcugacccuggccgccgaccuggagaagcugaagagcaaggugaucagaaccgagagaccccugagcagcggcguguacaugggcaaccugagcacccagcagcuggagcagagaagagcccugcugaacaugaucggcauggugggcggcgcccagggcacccagcccggcagagacggcguggugagagugugggacgugaagaaccccgaccugcugaacaaccaguucggcaccaugcccagccugacccuggccugccugaccaagcagggccagguggaccugaacgacgccgugcuggcccugaccgaccugggccugaucuacaccgccaaguaccccaacagcagcgaccuggacagacugagccagagccaccccauccugaacaugguggacaccaagaagagcagccugaacaucagcggcuacaacuucagccugggcgccgccgugaaggccggcgccugcaugcuggacggcggcaacaugcuggagaccaucaaggugaccccccagaccauggacggcauccugaagagcauccugaaggugaagagaagccugggcauguucgugagcgacacccccggcgagagaaaccccuacgagaacauccuguacaagaucugccugagcggcgacggcuggcccuacaucgccagcagaaccagcaucgugggcagagccugggagaacaccaccguggaccuggagagcgacggcaagccccagaaggugggcaccaucggcagcaacaagagccugcagagcgccggcuuccccaccggccugaccuacagccagcugaugacccugaaggacagcaugaugcagcuggaccccagcgccaagaccuggaucgacaucgagggcagacccgaggaccccguggagaucgcccuguaccagcccaugagcggcugcuacauccacuucuucagagagcccaccgaccugaagcaguucaagcaggacgccaaguacagccacggcaucgacguggccgaccuguuccccgcccagcccggccugaccagcgccgugaucgaggcccugcccagaaacauggugcugaccugccagggcagcgacgacaucaagagacugcuggacagccagggcagaagagacaucaagcugaucgacaucgcccugagcaaggccgacagcagaagauucgagaacgccgugugggaccagugcaaggaccugugccacaugcacaccggcguggugguggagaagaagaagagaggcggcaaggaggagaucaccccccacugcgcccugauggacugcaucauguacgacgccgccgugagcggcggccugaacauccccgugcugagagccgugcugcccagagacaugguguucagaaccagcagccccaagguggugcuguga

SEQ ID NO: 8891 - RNA, 1710 nt, Artificial Sequence
  derived and/or modified CDS sequence (opt4) from LASV(Lassa virus/H.sapiens-wt/NGA/2016/ISTH_1541;Clade II)__AVO03554__NP
augagcgccagcaaggaggugaagagcuuccuguggacccagagccugagaagagagcugagcggcuacugcagcaacaucaagcugcagguggugaaggacgcccaggcccugcugcacggccuggacuucagcgaggugagcaacgugcagagacugaugagaaagcagaagagagacgacggcgaccugaagagacugagagaccugaaccaggccgugaacaaccugguggagcugaagagcacccagcagaagagcauccugagagugggcacccugagcagcgacgaccugcugauccuggccgccgaccuggagaagcugaagagcaaggugaucagaaccgagagaccccugagcagcggcguguacaugggcaaccugagcagccagcagcuggaccagagaagagcccugcugaacaugaucggcaugaccggcggcaaccagggcgccagcaccggcagagacggcaucgugagagugugggacgugaagaacgccgagcugcugaacaaccaguucggcaccaugcccagccugacccuggccugccugaccaagcagggccagguggaccugaacgacgccgugcaggcccugaccgaccugggccugaucuacaccgccaaguaccccaacagcagcgaccuggacagacugagccagagccaccccauccugaacaugaucgacaccaagaagagcagccugaacaucagcggcuacaacuucagccugggcgccgccgugaaggccggcgccugcaugcuggacggcggcaacaugcuggagaccaucaaggugagcccccagaccauggacggcauccugaagagcauccugaaggugaagaagagccugggcauguucgugagcgacacccccggcgagagaaaccccuacgagaacauccuguacaagaucugccugagcggcgacggcuggcccuacaucgccagcagaaccagcaucaucggcagagccugggagaacaccaucguggaccuggaggccgacaacaagccccagaagagcggcaacaacggcagcaacagaagccugcagagcgccggcuuccccagcggccugaccuacagccagcugaugacccugaaggacagcaugcugcagcuggaccccaacgccaagaccuggauggacaucgagggcagacccgacgaccccguggagaucgcccuguaccagcccagcagcggcugcuacauccacuucuucagagagcccaccgaccugaagcaguucaagcaggacgccaaguacagccacggcaucgacgugagcgaccuguucgccgcccagcccggccugaccagcgccgugaucgaggcccugcccagaaacauggugaucaccugccagggcagcgaggacaucaagaagcugcuggagagccagggcagaaaggacaucaagcugguggacaucagccugagcaagcuggacagcagaaaguucgagaacguggugugggaccaguacaaggaccugugccacaugcacaccggcaucgugguggagaagaagaagagaggcggcaaggaggagaucaccccccacugcgcccugauggacugcaucauguucgacgccgccgugaugggcggccuggacgccagagugcugagagccgugcugcccagagacaugguguucagaaccagcacccccaagguggugcuguga

SEQ ID NO: 8892 - RNA, 1710 nt, Artificial Sequence
  derived and/or modified CDS sequence (opt4) from LASV(Lassa virus/H.sapiens-wt/NGA/2016/ISTH_1546;Clade II)__AVO03538__NP
augagcgccagcaaggaggugaagagcuuccuguggacccagagccugagaagagagcugagcggcuacugcagcaacaucaagcugcagguggugaaggacgcccaggcccugcugcacggccuggacuucagcgaggugagcaacgugcagagacugaugagaaagcagaagagagacgacggcgaccugaagagacugagagaccugaaccaggccgugaacaaccugguggagcugaagagcacccagcagaagagcgugcugagagugggcacccugagcagcgacgaccugcugauccuggccgccgaccuggagaagcugaagagcaaggugaucagaaccgagagaccccugagcagcggcguguacaugggcaaccugagcagccagcagcuggaccagagaagagcccugcugaacaugaucggcaugaccggcggcaaccagggcaccaacgccggcagagacggcaucgugagaaucugggacgugaagaacgccgagcugcugaacaaccaguucggcaccaugcccagccugacccuggccugccugaccaagcagggccagguggaccugaacgacguggugcaggcccugaccgaccugggccugaucuacaccgccaaguaccccaacagcagcgaccuggacagacugagccagagccaccccauccugaacaugaucgacaccaagaagagcagccugaacaucagcggcuacaacuucagccugggcgccgccgugaaggccggcgccugcaugcuggacggcggcaacaugcuggagaccaucaaggugagcccccagaccauggacggcauccugaagagcauccugaaggugaagagaagccugggcauguucgugagcgacacccccggcgagagaaaccccuacgagaacauccuguacaagaucugccugagcggcgacggcuggcccuacaucgccagcagaaccagcaucaucggcagagccugggagaacaccaucguggaccuggagaccaacaacaagccccagaagcccggcaacaacggcagcaacagaagccugcagagcgccggcuuccccgccggccugaccuacagccagcugaugacccugaaggacagcaugcugcagcuggaccccaacgccaagaccuggauggacaucgagggcagacccgacgaccccguggagaucgcccuguaccagcccagcagcggcugcuacauccacuucuucagagagcccaccgaccugaagcaguucaagcaggacgccaaguacagccacggcaucgaccugagcgaccuguucgccgcccagcccggccugaccagcgccgugaucgaggcccugcccagaaacauggugaucaccugccagggcagcgaggacaucaugaagcugcuggagagccagggcagaaaggacaucaagcugguggacaucagccugagcaagagcgacagcagaaaguucgagaacgccgugugggaccaguacaaggaccugugccacaugcacaccggcaucgugguggagaagaagaagaagggcggcaaggaggagaucaccccccacugcgcccugauggacugcaucauguucgacgccgccgugaugggcggccuggacgccaaggugcugagagccgugcugcccaaggacaugguguucagaaccagcacccccaagguggugcuguga

SEQ ID NO: 8893 - RNA, 1710 nt, Artificial Sequence
  derived and/or modified CDS sequence (opt4) from LASV(Lassa virus/H.sapiens-wt/NGA/2016/ISTH_1568;Clade II)__AVO03562__NP
augagcgccagcaaggaggugaagagcuuccuguggacccagagccugagaagagagcugagcggcuacugcagcagcaucaagcugcagguggugaaggacgcccaggcccugcugcacggccuggacuucagcgaggugagcaacgugcagagacugaugagaaagcagaagagagacgacagcgaccugaagagacugagagaccugaaccaggccgugaacaaccugguggagcugaagagcacccagcagaagagcauccugagagugggcacccugaccagcgacgaccugcugacccuggccgccgaccuggagaagcugaagagcaaggugaucagaaccgagagaccccugagcagcggcguguacaugggcaaccugagcagccagcagcuggagcagagaagagcccugcugaacaugaucggcauggugggcggcgcccagggcacccagcccggcagagacggcguggugagagugugggacgugaagaaccccgaccugcugaacaaccaguucggcaccaugcccagccugacccuggccugccugaccaagcagggccagguggaccugaacgacgccgugcuggcccugaccgaccugggccugaucuacaccgccaaguaccccaacagcagcgaccuggacagacugagccagagccaccccauccugaacaugguggacaccaagaagagcagccugaacaucagcggcuacaacuucagccugggcgccgccgugaaggccggcgccugcaugcuggacggcggcaacaugcuggagaccaucaaggugaccccccagaccauggacggcauccugaagagcauccugaaggugaagagaagccugggcauguucgugagcgacacccccggcgagagaaaccccuacgagaacauccuguacaagaucugccugagcggcgacggcuggcccuacaucgccagcagaaccagcaucgugggcagagccugggagaacaccaccguggaccuggagagcgacggcaagccccagaaggugggccccgccggcagcaacaagagccugcagagcgccggcuuccccaccggccugaccuacagccagcugaugacccugaaggacagcaugaugcagcuggaccccagcgccaagaccuggaucgacaucgagggcagacccgaggaccccguggagaucgcccuguaccagcccaucagcggcugcuacauccacuucuucagagagcccaccgaccugaagcaguucaagcaggacgccaaguacagccacggcaucgacguggccgaccuguuccccgcccagcccggccugaccagcgccgugaucgaggcccugcccagaaacauggugcugaccugccagggcagcgacgacaucaagagacugcuggacagccagggcagaagagacaucaagcugaucgacaucgcccugagcaaggccgacagcagaagauucgagaacgccgugugggaccagugcaaggaccugugccacaugcacaccggcguggugguggagaagaagaagagaggcggcaaggaggagaucaccccccacugcgcccugauggacugcaucauguacgacgccgccgugagcggcggccugaacauccccgugcugagagccgugcugcccagagacaugguguucagaaccagcagccccaagguggugcuguga

SEQ ID NO: 8894 - RNA, 1710 nt, Artificial Sequence
  derived and/or modified CDS sequence (opt4) from LASV(Lassa virus/H.sapiens-wt/NGA/2016/ISTH_1591;Clade II)__AVO03648__NP
augagcgccagcaaggaggugaagagcuuccuguggacccagagccugagaagagagcugagcggcuacugcagcagcaucaagcugcagguggugaaggacgcccaggcccugcugcacggccuggacuucagcgaggugagcaacgugcagagacugaugagaaagcagaagagagacgacagcgaccugaagagacugagagaccugaaccaggccgugaacaaccugguggagcugaagagcacccagcagaagagcauccugagagugggcacccugaccagcgacgaccugcugacccuggccgccgaccuggagaagcugaagagcaaggugaucagaaccgagagaccccugagcagcggcguguacaugggcaaccugagcagccagcagcuggagcagagaagagcccugcugaacaugaucggcauggugggcggcgcccagggcacccagcccggcagagacggcguggugagagugugggacgugaagaaccccgaccugcugaacaaccaguucggcaccaugcccagccugacccuggccugccugaccaagcagggccagguggaccugaacgacgccgugcuggcccugaccgaccugggccugaucuacaccgccaaguaccccaacagcagcgaccuggacagacugagccagagccaccccauccugaacaugguggacaccaagaagagcagccugaacaucagcggcuacaacuucagccugggcgccgccgugaaggccggcgccugcaugcuggacggcggcaacaugcuggagaccaucaaggugaccccccagaccauggacggcauccugaagagcauccugaaggugaagagaagccugggcauguucgugagcgacacccccggcgagagaaaccccuacgagaacauccuguacaagaucugccugagcggcgacggcuggcccuacaucgccagcagaaccagcaucgugggcagagccugggagaacaccaccguggaccuggagagcgacggcaagccccagaaggugggcagcgccggcagcaacaagagccugcagagcgccggcuuccccaccggccugaccuacagccagcugaugacccugaaggacagcaugaugcagcuggaccccagcgccaagaccuggaucgacaucgagggcagacccgaggaccccguggagaucgcccuguaccagcccaugagcggcugcuacauccacuucuucagagagcccaccgaccugaagcaguucaagcaggacgccaaguacagccacggcaucgacguggccgaccuguuccccgcccagcccggccugaccagcgccgugaucgaggcccugcccagaaacauggugcugaccugccagggcagcgacgacgugaagagacugcuggacagccagggcagaagagacaucaagcugaucgacaucgcccugagcaaggccgacagcagaagauucgagaacgccgugugggaccagugcaaggaccugugccacaugcacaccggcguggugguggagaagaagaagagaggcggcaaggaggagaucaccccccacugcgcccugauggacugcaucauguacgacgccgccgugagcggcggccugaacauccccgugcugagagccgugcugcccagagacaugguguucagaaccagcagccccaagguggugcuguga

SEQ ID NO: 8895 - RNA, 1710 nt, Artificial Sequence
  derived and/or modified CDS sequence (opt4) from LASV(Lassa virus/H.sapiens-wt/NGA/2016/ISTH_1604;Clade II)__AVO03542__NP
augagcgccagcaaggaggugaagagcuuccuguggacccagagccugagaagagagcugagcggcuacugcagcaacaucaagcugcagguggugaaggacgcccaggcccugcugcacggccuggacuucagcgaggugagcaacgugcagagacugaugagaaagcagaagagagacgacggcgaccugaagagacugagagaccugaaccaggccgugaacaaccugguggagcugaagagcacccagcagaagagcauccugagagugggcacccugagcagcgacgaccugcugacccuggccgccgaccuggagaagcugaagagcaaggugaucagaaccgagagaccccugagcagcggcguguacaugggcaaccugagcacccagcagcuggaccagagaagagcccugcugaacaugaucggcauggugggcggcagccagggcaccagcgccggcagagacggcaucgugagagugugggacgugagaaaccccgagcugcugaacaaccaguucggcaccaugcccagccugacccuggccugccugaccaagcagggccagguggaccugaacgacgccgugcaggcccugaccgaccugggccugaucuacaccgccaaguaccccaacagcagcgaccuggacagacugagccagagccaccccauccugaacaugaucgacaccaagaagagcagcaucaacaucagcggcuacaacuucagccugggcgccgccgugaaggccggcgccugcaugcuggacggcggcaacaugcuggagaccaucaaggugagcccccagagcauggacggcauccugaagagcauccugaaggugaagagaagccugggcauguucgugagcgacacccccggcgagagaaaccccuacgagaacauccuguacaagaucugccugagcggcgacggcuggcccuacaucgccagcagaaccagcaucaccggcagagccugggagaacaccgugguggaccuggagagcgacaacaagcccaagaagcccggcaacaacgagagcaacagaagccugcagagcgccggcuuccccgccggccugaccuacagccagcugaugacccugaaggacagcaugcugcagcuggaccccaacgccaagaccuggauggacaucgagggcagacccgacgaccccguggagaucgcccuguaccagcccaacagcggcugcuacauccacuucuucagagagcccaccgaccugaagcaguucaagcaggacgccaaguacagccacggcaucgacaucagcgaccuguucgccgcccagcccggccugaccagcgccgugaucgaggcccugcccagaaacauggugaucaccugccagggcagcgaggacgugaagaagcugcuggagagccagggcagaaaggacaucagacugguggacaucagccugagcaaggccgacagcagaaaguucgagaacgccgugugggaccaguacaaggaccugugccacaugcacaccggcaucgugguggagaagaagaagaagggcggcaaggaggagaucaccccccacugcgcccugauggacugcaucauguucgacgccgccgugaugaacggccuggacgccagagugcugagagccgugcugcccagagacaugguguucagaaccagcacccccagaguggugcuguga

SEQ ID NO: 8896 - RNA, 1710 nt, Artificial Sequence
  derived and/or modified CDS sequence (opt4) from LASV(Lassa virus/H.sapiens-wt/NGA/2016/ISTH_1609;Clade II)__AVO03662__NP
augagcgccagcaaggaggugaagagcuuccuguggacccagagccugagaagagagcugagcggcuacugcagcaacaucaagcugcagguggugaaggacgcccaggcccugcugcacggccuggacuucagcgaggugagcaacgugcagagacugaugagaaagcagaagagagacgacggcgaccugaagagacugagagaccugaaccaggccgugaacaaccugguggagcugaagagcacccagcagaagagcauccugagagugggcacccugagcagcgacgaccugcugauccuggccgccgaccuggagaagcugaagagcaaggugaucagaaccgagagaccccugagcagcggcguguacaugggcaaccugagcagccagcagcuggaccagagaagagcccugcugaacaugaucggcaugaccggcggcaaccagggcaccaacaccggcagagacggcaucgugagagugugggacgugaagaacgccgagcugcugaacaaccaguucggcaccaugcccagccugacccuggccugccugaccaagcagggccagguggaccugaacgacgccgugcaggcccugaccgaccugggccugaucuacaccgccaaguaccccaacagcagcgaccuggacagacugagccagagccaccccauccugaacaugaucgacaccaagaagagcagccugaacaucagcggcuacaacuucagccugggcgccgccgugaaggccggcgccugcaugcuggacggcggcaacaugcuggagaccaucaaggugagcccccagaccauggacggcauccugaagagcauccugaaggugaagaagagccugggcauguucgugagcgacacccccggcgagagaaaccccuacgagaacauccuguacaagaucugccugagcggcgacggcuggcccuacaucgccagcagaaccagcaucaccggcagagccugggagaacaccaugguggaccuggagaccaacaacaagagccagaagcccggcaacaacggcagcaacagaagccugcagagcgccggcuuccccgccggccugaccuacagccagcugaugacccugaaggacagcaugcugcagcuggaccccaacgccaagaccuggauggacaucgagggcagacccgacgaccccguggagaucgcccuguaccagcccagcagcggcugcuacauccacuucuucagagagcccaccgaccugaagcaguucaagcaggacgccaaguacagccacggcaucgacaucagcgaccuguucgccgcccagcccggccugaccagcgccgugaucgaggugcugcccagaaacaugaccaucaccugccagggcagcgaggacaucaagaagcugcuggagagccagggcagaaaggacaucaagcugguggacaucagccugagcaagcuggacagcagaaaguucgagaacgccgugugggaccaguucaaggaccugugccacaugcacaccggcaucgugguggagaagaagaagaagggcggcaaggaggagaucaccccccacugcgcccugauggacugcaucauguucgacgccgccgugaugggcggccuggacgccaaggugcugagagccgugcugcccagagacaugguguucagaaccagcacccccaagguggugcuguga

SEQ ID NO: 8897 - RNA, 1710 nt, Artificial Sequence
  derived and/or modified CDS sequence (opt4) from LASV(Lassa virus/H.sapiens-wt/NGA/2016/ISTH_1610;Clade II)__AVO03604__NP
augagcgccagcaaggagaucaagagcuuccuguggacccagagccugagaagagagcugagcggcuacugcagcagcaucaagcugcagguggugaaggacgcccaggcccugcugcacggccuggacuucagcgaggugagcaacgugcagagacugaugagaaagcagaagagagacgacagcgaccugaagagacugagagaccugaaccaggccgugaacaaccugguggagcugaagagcacccagcagaagagcauccugagagugggcacccugaccagcgacgaccugcugacccuggccgccgaccuggagaagcugaagagcaaggugaucagaaccgagagaccccugagcagcggcguguacaugggcaaccugagcacccagcagcuggagcagagaagagcccugcugaacaugaucggcauggugggcggcgcccagggcacccagcccggcagagacggcguggugagagugugggacgugaagaaccccgaccugcugaacaaccaguucggcaccaugcccagccugacccuggccugccugaccaagcagggccagguggaccugaacgacgccgugcuggcccugaccgaccugggccugaucuacaccgccaaguaccccaacagcagcgaccuggacagacugagccagagccaccccauccugaacaugguggacaccaagaagagcagccugaacaucagcggcuacaacuucagccugggcgccgccgugaaggccggcgccugcaugcuggacggcggcaacaugcuggagaccaucaaggugaccccccagaccauggacggcauccugaagagcauccugaaggugaagagaagccugggcauguucgugagcgacacccccggcgagagaaaccccuacgagaacauccuguacaagaucugccugagcggcgacggcuggcccuacaucgccagcagaaccagcaucgugggcagagccugggagaacaccaccguggaccuggagagcgacggcaagccccagaaggugggcaccgccggcagcaacaagagccugcagagcgccggcuuccccaccggccugaccuacagccagcugaugacccugaaggacagcaugaugcagcuggaccccagcgccaagaccuggaucgacaucgagggcagacccgaggaccccguggagaucgcccuguaccagcccaugagcggcugcuacauccacuucuucagagagcccaccgaccugaagcaguucaagcaggacgccaaguacagccacggcaucgacguggccgaccuguuccccgcccagcccggccugaccagcgccgugaucgaggcccugcccagaaacauggugcugaccugccagggcagcgacgacaucaagaagcugcuggacagccagggcagaagagacaucaagcugaucgacaucgcccugagcaagaccgacagcagaagauucgagaacgccgugugggaccagugcaaggaccugugccacaugcacaccggcguggugguggagaagaagaagagaggcggcaaggaggagaucaccccccacugcgcccugauggacugcaucauguacgacgccgccgugagcggcggccugaacauccccgugcugagagccgugcugcccagagacaugguguucagaaccagcagccccaagguggugcuguga

SEQ ID NO: 8898 - RNA, 1710 nt, Artificial Sequence
  derived and/or modified CDS sequence (opt4) from LASV(Lassa virus/H.sapiens-wt/NGA/2018/ISTH_0541;Clade II)__AVV65114__NP
augagcgccagcaaggaggugaagagcuuccuguggacccagagccugagaagagagcugagcggcuacugcagcagcaucaagcugcagguggugaaggacgcccaggcccugcugcacggccuggacuucagcgaggugagcaacgugcagagacugaugagaaagcagaagagagacgacagcgaccugaagagacugagagaccugaaccaggccgugaacaaccugguggagcugaagagcacccagcagaagagcauccugagagugggcacccugaccagcgacgaccugcugacccuggccgccgaccuggagaagcugaagagcaaggugaucagaaccgagagaccccugagcagcggcguguacaugggcaaccugagcacccagcagcuggagcagagaagagcccugcugaacaugaucggcauggugggcggcgcccagggcacccagcccggcagagacggcguggugagagugugggacgugaagaaccccgaccugcugaacaaccaguucggcaccaugcccagccugacccuggccugccugaccaagcagggccagguggaccugaacgacgccgugcuggcccugaccgaccugggccugaucuacaccgccaaguaccccaacagcagcgaccuggacagacugagccagagccaccccauccugaacaugguggacaccaagaagagcagccugaacaucagcggcuacaacuucagccugggcgccgccgugaaggccggcgccugcaugcuggacggcggcaacaugcuggagaccaucaaggugaccccccagaccauggacggcauccugaagagcauccugaaggugaagagaagccugggcauguucgugagcgacacccccggcgagagaaaccccuacgagaacauccuguacaagaucugccugagcggcgacggcuggcccuacaucgccagcagaaccagcaucgugggcagagccugggagaacaccaccguggaccuggagagcgacggcaagccccagaaggugggcguggccggcagcaacaagagccugcagagcgccggcuuccccaccggccugaccuacagccagcugaugacccugaaggacagcaugaugcagcuggaccccagcgccaagaccuggaucgacaucgagggcagacccgaggaccccguggagaucgcccuguaccagcccaugagcggcugcuacauccacuucuucagagagcccaccgaccugaagcaguucaagcaggacgccaaguucagccacggcaucgacguggccgaccuguuccccgcccagcccggccugaccagcgccgugaucgaggcccugcccagaaacauggugcugaccugccagggcagcgacgacaucaagagacugcuggacagccagggcagaagagacaucaagcugaucgacaucgcccugagcaaggccgacagcagaagauucgagaacgccgugugggaccagugcaaggaccugugccacaugcacaccggcguggugguggagaagaagaagagaggcggcaaggaggagaucaccccccacugcgcccugauggacugcaucauguacgacgccgccgugagcggcggccugaacauccccgugcugagagccgugcugcccagagacaugguguucagaaccagcagccccaagguggugcuguga

SEQ ID NO: 8899 - RNA, 1710 nt, Artificial Sequence
  derived and/or modified CDS sequence (opt4) from LASV(Lassa virus/H.sapiens-wt/NGA/2018/ISTH_0664;Clade II)__AVV65096__NP
augagcgccagcaaggaggugaagagcuuccuguggacccagagccugagaagagagcugagcggcuacugcagcagcaucaagcugcagguggugaaggacgcccaggcccugcugcacggccuggacuucagcgaggugagcaacgugcagagacugaugagaaagcagaagagagacgacagcgaccugaagagacugagagaccugaaccaggccgugaacaaccugguggagcugaagagcacccagcagaagagcauccugagagugggcacccugaccagcgacgaccugcugacccuggccgccgaccuggagaagcugaagagcaaggugaucagaaccgagagaccccugagcagcggcguguacaugggcaaccugagcacccagcagcuggagcagagaagagcccugcugaacaugaucggcauggugggcggcacccagggcacccagcccggcagagacggcguggugagagugugggacgugaagaaccccgaccugcugaacaaccaguucggcaccaugcccagccugacccuggccugccugaccaagcagggccagguggaccugaacgacgccgugcuggcccugaccgaccugggccugaucuacaccgccaaguaccccaacagcagcgaccuggacagacugagccagagccaccccauccugaacaugguggacaccaagaagagcagccugaacaucagcggcuacaacuucagccugggcgccgccgugaaggccggcgccugcaugcuggacggcggcaacaugcuggagaccaucaaggugaccccccagaccauggacggcauccugaagagcauccugaaggugaagaagagccugggcauguucgugagcgacacccccggcgagagaaaccccuacgagaacauccuguacaagaucugccugagcggcgacggcuggcccuacaucgccagcagaaccagcaucgugggcagagccugggagaacaccaccguggaccuggagcccgacggcaagcugcagaaggugggcaccgugggcagcaacaagagccugcagagcgccggcuuccccaccggccugaccuacagccagcugaugacccugaaggacagcaugaugcagcuggaccccagcgccaagaccuggaucgacaucgagggcagacccgaggaccccguggagaucgcccuguaccagcccaugagcggcugcuacauccacuucuucagagagcccaccgaccugaagcaguucaagcaggacgccaaguacagccacggcaucgacguggccgaccuguuccccgcccagcccggccugaccagcgccgugaucgaggcccugcccagaaacauggugcugaccugccagggcagcgacgacaucaagagacugcuggacagccagggcagaagagacaucaagcugaucgacaucagccugagcaaggccgacagcagaagauucgagaacgccgugugggaccagugcaaggaccugugccacaugcacaccggcguggugguggagaagaagaagagaggcggcaaggaggagaucaccccccacugcgcccugauggacugcaucauguacgacgccgccgugagcggcggccugaacauccccgugcugagagccgugcugcccagagacaugguguucagaaccagcagccccaagguggugcuguga

SEQ ID NO: 8900 - RNA, 1710 nt, Artificial Sequence
  derived and/or modified CDS sequence (opt4) from LASV(Lassa virus/H.sapiens-wt/NGA/2018/ISTH_0959;Clade II)__AVV65100__NP
augagcgccagcaaggaggugaagagcuuccuguggacccagagccugagaagagagcugagcggcuacugcagcaacaucaagcugcagguggugaaggacgcccaggcccugcugcacggccuggacuucagcgaggugagcaacgugcagagacugaugagaaagcagaagagagacgacagcgaccugaagagacugagagaccugaaccaggccgugaacaaccugguggagcugaagagcacccagcagaagagcauccugagagugggcacccugaccagcgacgaccugcugacccuggccgccgaccuggagaagcugaagagcaaggugaucagaaccgagagaccccugagcagcggcguguacaugggcaaccugagcacccagcagcuggagcagagaagagcccugcugaaccugaucggcauggugggcggcgcccagggcacccagcccggcagagacggcguggugagagugugggacgugaagaaccccgaccugcugaacaaccaguucggcaccaugcccagccugacccuggccugccugaccaagcagggccagguggaccugaacgacguggugcuggcccugaccgaccugggccugaucuacaccgccaaguaccccaacagcagcgaccuggacagacugagccagagccaccccauccugaacaugguggacaccaagaagagcagccugaacaucagcggcuucaacuucagccugggcgccgccgugaaggccggcgccugcaugcuggacggcggcaacaugcuggagaccaucaaggugaccccccagaccauggacggcauccugaagagcauccugaaggugaagaagagccugggcauguucgugagcgacacccccggcgagagaaaccccuacgagaacauccuguacaagaucugccugagcggcgacggcuggcccuacaucgccagcagaaccagcaucgugggcagagccugggagaacaccaccguggaccuggagagcgacggcaagccccacaaggugggcaccgccggcagcaacaagagccugcagagcgccggcuuccccaccggccugaccuacagccagcugaugacccugaaggacagcaugaugcagcuggaccccagcgccaagaccuggaucgacaucgagggcagacccgaggaccccguggagaucgcccuguaccagcccaugagcggcugcuacauccacuucuucagagagcccaccgaccugaagcaguucaagcaggacgccaaguacagccacggcaucgacguggccgaccuguuccccgcccagcccggccugaccagcgccgugaucgaggcccugcccagaaacauggugcugaccugccagggcagcgacgacaucaagagacugcuggacagccagggcagaaaggacaucaagcugaucgacaucgcccugagcaagaccgacagcagaagauucgagaacgccgugugggaccagugcaaggaccugugccacaugcacaccggcguggugguggagaagaagaagagaggcggcaaggaggagaucaccccccacugcgcccugauggacugcaucauguacgacgccgccgugagcggcggccugaacauccccgugcugagagccgugcugcccagagacaugguguucagaaccagcagccccaagguggugcuguga

SEQ ID NO: 8901 - RNA, 1710 nt, Artificial Sequence
  derived and/or modified CDS sequence (opt4) from LASV(Lassa virus/H.sapiens-wt/NGA/2018/ISTH_1024;Clade II)__AVV65106__NP
augagcgccagcaaggaggugaagagcuuccuguggacccagagccugagaagagagcugagcggcuacugcagcagcaucaagcugcagguggugaaggacgcccaggcccugcugcacggccuggacuucagcgaggugagcaacgugcagagacugaugagaaagcagaagagagacgacagcgaccugaagagacugagagaccugaaccaggccgugaacaaccugguggagcugaagagcacccagcagaagagcgugcugagagugggcacccugagcagcgacgaccugcugacccuggccgccgaccuggagaagcugaagagcaaggugaucagaaccgagagaccccugagcagcggcguguacaugggcaaccugagcacccagcagcuggagcagagaagagcccugcugaacaugaucggcauggugggcggcgcccagggcacccagcccggcagagacggcguggugagagugugggacgugaagaaccccgaccugcugaacaaccaguucggcaccaugcccagccugacccuggccugccugaccaagcagggccagguggaccugaacgacgccgugcuggcccugaccgaccugggccugaucuacaccgccaaguaccccaacagcagcgaccuggacagacugagccagagccaccccauccugaacaugguggacaccaagaagagcagccugaacaucagcggcuacaacuucagccugggcgccgccgugaaggccggcgccugcaugcuggacggcggcaacaugcuggagaccaucaaggugaccccccagaccaucgacggcauccugaagagcauccugaaggugaagaagagccugggcauguucgugagcgacacccccggcgagagaaaccccuacgagaacauccuguacaagaucugccugagcggcgacggcuggcccuacaucgccagcagaaccagcaucgugggcagagccugggagaacaccaccguggaccuggagagcgacggcaagccccagaaggugggcaccgccggcagcaacaagagccugcagagcgccggcuuccccaccggccugaccuacagccagcugaugacccugaaggacagcaugaugcagcuggaccccagcgccaagaccuggaucgacaucgagggcagacccgaggaccccguggagaucgcccuguaccagcccaugagcggcugcuacauccacuucuucagagagcccaccgaccugaagcaguucaagcaggacgccaaguacagccacggcaucgacgugguggaccuguuccccgcccagcccggccugaccagcgccgugaucgaggcccugcccagaaacauggugcugaccugccagggcagcgacgacaucaagagacugcuggacagccagggcagaagagacaucaagcugaucgacaucgcccugagcaaggccgacagcagaagauucgagaacgccgugugggaccagugcaaggaccugugccacaugcacaccggcguggugguggagaagaagaagagaggcggcaaggaggagaucaccccccacugcgcccugauggacugcaucauguacgacgccgccgugagcggcggccugaacauccccgugcugagagccgugcugcccagagacaugguguucagaaccagcagccccaagguggugcuguga

SEQ ID NO: 8902 - RNA, 1710 nt, Artificial Sequence
  derived and/or modified CDS sequence (opt4) from LASV(Lassa virus/H.sapiens-wt/NGA/2018/ISTH_1079;Clade II)__AVV65108__NP
augagcgccagcaaggaggugaagagcuuccuguggacccagagccugagaagagagcugagcggcuacugcagcaacaucaagcugcagguggugaaggacgcccaggcccugcugcacggccuggacuucagcgaggugagcaacgugcagagacugaugagaaagcagaagagagacgacagcgaccugaagagacugagagaccugaaccaggccgugaacaaccugguggagcugaagagcacccagcagaagagcauccugagagugggcacccugaccagcgacgaccugcugacccuggccgccgaccuggagaagcugaagagcaaggugaucagaaccgagagaccccugagcagcggcguguacaugggcaaccugagcacccagcagcuggagcagagaagagcccugcugaacaugaucggcauggugggcggcacccagggcacccagcccggcagagacggcguggugagagugugggacgugaagaaccccgaccugcugaacaaccaguucggcaccaugcccagccugacccuggccugccugaccaagcagggccagguggaccugaacgacgccgugcuggcccugaccgaccugggccugaucuacaccgccaaguaccccaacagcagcgaccuggacagacugagccagagccaccccauccugaacaugguggacaccaagaagagcagccugaacaucagcggcuacaacuucagccugggcgccgccgugaaggccggcgccugcaugcuggacggcggcaacaugcuggagaccaucaaggugaccccccagaccauggacggcauccugaagagcauccugaaggugaagaagagccugggcauguucgugagcgacacccccggcgagagaaaccccuacgagaacauccuguacaagaucugccugagcggcgacggcuggcccuacaucgccagcagaaccagcaucgugggcagagccugggagaacaccaccguggaccuggagagcgacggcaagccccagaaggugggcaccgccggcagcaacaagagccugcagagcgccggcuuccccaccggccugaccuacagccagcugaugacccugaaggacagcaugaugcagcuggaccccagcgccaagaccuggaucgacaucgagggcagacccgaggaccccguggagaucgcccuguaccagcccaucagcggcugcuacauccacuucuucagagagcccaccgaccugaagcaguucaagcaggacgccaaguacagccacggcaucgacguggccgaccuguuccccgcccagcccggccugaccagcgccgugaucgaggcccugcccagaaacauggugcugaccugccagggcagcgacgacaucaagagacugcuggacagccagggcagaagagacaucaagcugaucgacaucagccugagcaaggccgacagcagaagauucgagaacgccgugugggaccagugcaaggaccugugccacaugcacaccggcguggugguggagaagaagaagagaggcggcaaggaggagaucaccccccacugcgcccugauggacugcaucauguacgacgccgccgugagcggcggccugaacauccccgugcugagagccgugcugcccagagacaugguguucagaaccagcagccccaagguggugcuguga

SEQ ID NO: 8903 - RNA, 1710 nt, Artificial Sequence
  derived and/or modified CDS sequence (opt4) from LASV(Lassa virus/H.sapiens-wt/NGA/2018/ISTH_1375;Clade II)__AVV65116__NP
augagcgccagcaaggaggugaagagcuuccuguggacccagagccugagaagagagcugagcggcuacugcagcaacaucaagcugcagguggugaaggacgcccaggcccugcugcacggccuggacuucagcgaggugagcaacgugcagagacugaugagaaagcagaagagagacgacagcgaccugaagagacugagagaccugaaccaggccgugaacaaccugguggagcugaagagcacccagcagaagagcauccugagagugggcacccugaccagcgacgaccugcugauccuggccgccgaccuggagaagcugaagagcaaggugaucagaaccgagagaccccugagcagcggcguguacaugggcaaccugagcacccagcagcuggagcagagaagagcccugcugaaccugaucggcauggugggcggcgcccagggcacccagcccggcagagacggcguggugagagugugggacgugaagaaccccgaccugcugaacaaccaguucggcaccaugcccagccugacccuggccugccugaccaagcagggccagguggaccugaacgacgccgugcuggcccugaccgaccugggccugaucuacaccgccaaguaccccaacagcagcgaccuggacagacugagccagagccaccccauccugaacaugguggacaccaagaagagcagccugaacaucagcggcuucaacuucagccugggcgccgccgugaaggccggcgccugcaugcuggacggcggcaacaugcuggagaccaucagaaucaccccccagaccauggacggcauccugaagagcauccugaaggugaagaagagccugggcauguucgugagcgacacccccggcgagagaaaccccuacgagaacauccuguacaagaucugccugagcggcgacggcuggcccuacaucgccagcagaaccagcaucgugggcagagccugggagaacaccaccguggaccuggagagcgacggcaagccccacaaggugggcaccgccggcagcaacaagagccugcagagcgccggcuuccccaccggccugaccuacagccagcugaugacccugaaggacagcaugaugcagcuggaccccagcgccaagaccuggaucgacaucgagggcagacccgaggaccccguggagaucgcccuguaccagcccaugagcggcugcuacauccacuucuucagagagcccaccgaccugaagcaguucaagcaggacgccaaguacagccacggcaucgacguggccgaccuguuccccgcccagcccggccugaccagcgccgugaucgaggcccugcccagaaacauggugcugaccugccagggcagcgacgacaucaagagacugcuggacagccagggcagaagagacaucaagcugaucgacaucgcccugagcaaggccgacagcagaagauucgagaacgccgugugggaccagugcaaggaccugugccacaugcacaccggcguggugguggagaagaagaagagaggcggcaaggaggagaucaccccccacugcgcccugauggacugcaucauguacgacgccgccgugagcggcggccugaacauccccgugcugagagccgugcugcccagagacaugguguucagaaccagcagccccaagguggugcuguga

SEQ ID NO: 8904 - RNA, 1710 nt, Artificial Sequence
  derived and/or modified CDS sequence (opt4) from LASV(Lassa virus/H.sapiens-wt/NGA/2018/ISTH_1381;Clade II)__AVV65112__NP
augagcgugagcaaggaggugaagagcuuccuguggacccagagccugagaagagagcugagcggcuacugcagcagcaucaagcugcagguggugaaggacgcccaggcccugcugcacggccuggacuucagcgaggugagcaacgugcagagacugaugagaaagcagaagagagacgacagcgaccugaagagacugagagaccugaaccaggccgugaacaaccugguggagcugaagagcacccagcagaagagcauccugagagugggcacccugaccagcgacgaccugcugacccuggccgccgaccuggagaagcugaagagcaaggugaucagaaccgagagaccccugagcagcggcguguacaugggcaaccugagcacccagcagcuggagcagagaagagcccugcugaacaugaucggcauggccggcggcgcccagggcacccagcccggcagagacggcguggugagagugugggacgugaagaaccccgaccugcugaacaaccaguucggcaccaugcccagccugacccuggccugccugaccaagcagggccagguggaccugaacgacgccgugcuggcccugaccgaccugggccugaucuacaccgccaaguaccccaacagcagcgaccuggacagacugagccagagccaccccauccugaacaugguggacaccaagaagagcagccugaacaucagcggcuacaacuucagccugggcgccgccgugaaggccggcgccugcaugcuggacggcggcaacaugcuggagaccaucaaggugaccccccagaccauggacggcauccugaagagcauccugaaggugaagagaagccugggcauguucgugagcgacacccccggcgagagaaaccccuacgagaacauccuguacaagaucugccugagcggcgacggcuggcccuacaucgccagcagaaccagcaucgugggcagagccugggagaacaccaccguggaccuggagagcgacggcaagccccagaagaucggcaacaccggcagcaacaagagccugcagagcgccggcuuccccaccggccugaccuacagccagcugaugacccugaaggacagcaugaugcagcuggaccccagcgccaagaccuggaucgacaucgagggcagacccgaggaccccguggagaucgcccuguaccagcccaugagcggcugcuacauccacuucuucagagagcccaccgaccugaagcaguucaagcaggacgccaaguacagccacggcaucgacguggccgaccuguuccccgcccagcccggccugaccagcgccgugaucgaggcccugcccagaaacauggugcugaccugccagggcagcgacgacaucaagagacugcuggagagccagggcagaagagacaucaagcugaucgacaucgcccugagcaaggccgacagcagaagauucgagaacgccgugugggaccagugcaaggaccugugccacaugcacaccggcguggugguggagaagaagaagagaggcggcaaggaggagaucaccccccacugcgcccugauggacugcaucauguacgacgccgccgugagcggcggccugaacauccccgugcugagagccgugcugcccagagacaugguguucagaaccagcagccccaagguggugcuguga

SEQ ID NO: 8905 - RNA, 1710 nt, Artificial Sequence
  derived and/or modified CDS sequence (opt4) from LASV(LASV003-NIG-2008;Clade II)__AIT17581__NP
augagcgccagcaaggaggugaagagcuuccuguggacccagagccugagaagagagcugagcggcuacugcagcagcaucaagcugcagguggugaaggacgcccaggcccugcugcacggccuggacuucagcgaggugagcaacgugcagagacugaugagaaagcagaagagagacgacagcgaccugaagagacugagagaccugaaccaggccgugaacaaccugguggagcugaagagcacccagcagaagagcgugcugagagugggcacccugaccagcgacgaccugcugacccuggccgccgaccuggagaagcugaagagcaaggugaucagaaccgagagaccccugagcagcggcguguacaugggcaaccugagcgcccagcagcuggagcagagaagaacccugcugaacaugaucggcauggugggcggcgcccagggcacccagcccggcagagacggcguggugagagugugggacgugaagaaccccgaccugcugaacaaccaguucggcaccaugcccagccugacccuggccugccugaccaagcagggccagguggaccugaacgacguggugcuggcccugaccgaccugggccugaucuacaccgccaaguaccccaacagcagcgaccuggacagacugagccagagccaccccauccugagcaugguggacaccaagaagagcagccugaacaucagcggcuacaacuucagccugggcgccgccgugaaggccggcgccugcaugcuggacggcggcaacaugcuggagaccaucaaggugaccccccagaccauggacggcauccugaagagcauccugaaggugaagaagagccugggcauguucgugagcgacacccccggcgagagaaaccccuacgagaacauccuguacaagaucugccugagcggcgacggcuggcccuacaucgccagcagaaccagcaucgugggcagagccugggagaacaccaccguggaccuggagagcgacggcaagccccagaaggugggcaccgccggcagcaacaagagccugcagagcgccggcuuccccaccggccugaccuacagccagcugaugacccugaaggacagcaugaugcagcuggaccccagcgccaagaccuggaucgacaucgagggcagacccgaggaccccguggagaucgcccuguaccagcccaugagcggcugcuacauccacuucuucagagagcccaccgaccugaagcaguucaagcaggacgccaaguacagccacggcaucgacgugaccgaccuguuccccgcccagcccggccugaccagcgccgugaucgaggcccugcccagaaacauggugcugaccugccagggcagcgacgacaucaagagacugcuggacagccagggcagaagagacaucaagcugaucgacaucgcccugagcaaggccgacagcagaagauucgagaacgccgugugggaccagugcaaggaccugugccacaugcacaccggcguggugguggagaagaagaagagaggcggcaaggaggagaucaccccccacugcgcccugauggacugcaucauguacgacgccgccgugagcggcggccugaacauccccgugcugagagccgugcugcccagagacaugguguucagaaccagcagccccaagguggugcuguga

SEQ ID NO: 8906 - RNA, 1710 nt, Artificial Sequence
  derived and/or modified CDS sequence (opt4) from LASV(LASV035-NIG-2009;Clade II)__AIT17589__NP
augagcgccagcaaggaggugaagagcuuccuguggacccagagccugagaagagagcugagcggcuacugcagcagcaucaagcugcagguggugaaggacgcccaggcccugcugcacggccuggacuucagcgaggugagcaacgugcagagacugaugagaaagcagaagagagacgacagcgaccugaagagacugagagaccugaaccaggccgugaacaaccugguggagcugaagagcacccagcagaagagcauccugagagugggcacccugaccagcgacgaccugcugacccuggccgccgaccuggagaagcugaagagcaaggugaucagaaccgagagaccccugagcagcggcguguacaugggcaaccugagcgcccagcagcuggagcagagaagagcccugcugaacaugaucggcauggugggcggcgcccagggcacccagcccggcagagacggcguggugagagugugggacgugaagaaccccgaccugcugaacaaccaguucggcaccaugcccagccugacccuggccugccugaccaagcagggccagguggaccugaacgacgccgugcuggcccugaccgaccugggccugaucuacaccgccaaguaccccaacagcagcgaccuggacagacugagccagagccaccccauccugaacaugguggacaccaagaagagcagccugaacaucagcggcuacaacuucagccugggcgccgccgugaaggccggcgccugcaugcuggacggcggcaacaugcuggagaccaucaaggugaccccccagaccauggacggcauccugaagagcauccugaaggugaagagaagccugggcauguucgugagcgacacccccggcgagagaaaccccuacgagaacauccuguacaagaucugccugagcggcgacggcuggcccuacaucgccagcagaaccagcaucgugggcagagccugggagaacaccaccguggaccuggagagcgacggcaagccccagaaggugggcaccaccggcagcaacaagagccugcagagcgccggcuuccccaccggccugaccuacagccagcugaugacccugaaggacagcaugaugcagcuggaccccagcgccaagaccuggaucgacaucgagggcagacccgaggaccccguggagaucgcccuguaccagcccaugagcggcugcuacauccacuucuucagagagcccaccgaccugaagcaguucaagcaggacgccaaguacagccacggcaucgacguggccgaccuguuccccgcccagcccggccugaccagcgccgugaucgaggcccugcccagaaacauggugcugaccugccagggcagcgacgacaucaagaagcugcuggacagccagggcagaagagacaucaagcugaucgacaucgcccugagcaaggccgacagcagaaaguucgagaacgccgugugggaccagugcaaggaccugugccacaugcacaccggcguggugguggagaagaagaagagaggcggcaaggaggagaucaccccccacugcgcccugauggacugcaucauguacgacgccgccgugagcggcggccugaacauccccgugcugagagccgugcugcccagagacaugguguucagaaccagcagccccaagguggugcuguga

SEQ ID NO: 8907 - RNA, 1710 nt, Artificial Sequence
  derived and/or modified CDS sequence (opt4) from LASV(LASV042-NIG-2009;Clade II)__AIT17593__NP
augagcgccagcaaggaggugaagagcuuccuguggacccagagccugagaagagagcugagcggcuacugcagcagcaucaagcugcagguggugaaggacgcccaggcccugcugcacggccuggacuucagcgaggugagcaacgugcagagacugaugagaaagcagaagagagacgacggcgaccugaagagacugagagaccugaaccaggccgugaacaaccugguggagcugaagagcacccagcagaagagcauccugagagugggcacccugaccagcgacgaccugcugacccuggccgccgaccuggagaagcugaagagcaaggugaucagaaccgagagaccccugagcagcggcguguacaugggcaaccugagcagccagcagcuggagcagagaagagcccugcugaacaugaucggcauggugggcggcgcccagggcacccagcccggcagagacggcguggugagagugugggacgugaagaaccccgaccugcugaacaaccaguucggcaccaugcccagccugacccuggccugccugaccaagcagggccagguggaccugaacgacgccgugcuggcccugaccgaccugggccugaucuacaccgccaaguaccccaacagcagcgaccuggacagacugagccagagccaccccauccugaacaugguggacaccaagaagagcagccugaacaucagcggcuacaacuucagccugggcgccgccgugaaggccggcgccugcaugcuggacggcggcaacaugcuggagaccaucaaggugaccccccagaccauggacggcauccugaagagcauccugaaggugaagagaagccugggcauguucgugagcgacacccccggcgagagaaaccccuacgagaacauccuguacaagaucugccugagcggcgacggcuggcccuacaucgccagcagaaccagcaucgugggcagagccugggagaacaccaccguggaccuggagagcgacggcaagccccagaaggugggcgccgccggcagcaccaagagccugcagagcgccggcuuccccaccggccugaccuacagccagcugaugacccugaaggacagcaugaugcagcuggaccccagcgccaagaccuggaucgacaucgagggcagacccgaggaccccguggagaucgcccuguaccagcccaugagcggcugcuacauccacuucuucagagagcccaccgaccugaagcaguucaagcaggacgccaaguacagccacggcaucgacguggccgaccuguuccccgcccagcccggccugaccagcgccgugaucgaggcccugcccagaaacauggugcugaccugccagggcagcgacgacaucaagagacugcuggacagccagggcagaagagacaucaagcugaucgacaucgcccugagcaagguggacagcagaagauucgagaacgccgugugggaccagugcaaggaccugugccacaugcacaccggcguggugguggagaagaagaagagaggcggcaaggaggagaucaccccccacugcgcccugauggacugcaucauguacgacgccgccgugagcggcggccugaacauccccgugcugagagccgugcugcccagagacaugguguucagaaccagcagccccaagguggugcuguga

SEQ ID NO: 8908 - RNA, 1710 nt, Artificial Sequence
  derived and/or modified CDS sequence (opt4) from LASV(LASV049-NIG-2009;Clade II)__AIT17605__NP
augagcgccagcaaggaggugaagagcuuccuguggacccagagccugagaagagagcugagcggcuacugcagcagcaucaagcugcagguggugaaggacgcccaggcccugcugcacggccuggacuucagcgaggugagcaacgugcagagacugaugagaaagcagaagagagacgacagcgaccugaagagacugagagaccugaaccaggccgugaacaaccugguggagcugaagagcacccagcagaagagcauccugagagugggcacccugaccagcgacgaccugcugacccuggccgccgaccuggagaagcugaagagcaaggugaucagaaccgagagaccccugagcagcggcguguacaugggcaaccugagcacccagcagcuggagcagagaagagcccugcugaacaugaucggcauggccggcggcgcccagggcacccagcccggcagagacggcguggugagagugugggacgugaagaaccccgaccugcugaacaaccaguucggcaccaugcccagccugacccuggccugccugaccaagcagggccagguggaccugaacgacgccgugcuggcccugaccgaccugggccugaucuacaccgccaaguaccccaacagcagcgaccuggacagacugagccagagccaccccauccugaacaugguggacaccaagaagagcagccugaacaucagcggcuacaacuucagccugggcgccgccgugaaggccggcgccugcaugcuggacggcggcaacaugcuggagaccaucaaggugaccccccagaccauggacggcauccugaagagcauccugaaggugaagaagagccugggcauguucgugagcgacacccccggcgagagaaaccccuacgagaacauccuguacaagaucugccugagcggcgacggcuggcccuacaucgccagcagaaccagcaucgugggcagagccugggagaacaccaccguggaccuggagagcgacggcaagccccagaaggugggcaccgccggcagcaacaagagccugcagagcgccggcuuccccaccggccugaccuacagccagcugaugacccugaaggacagcaugaugcagcuggaccccagcgccaagaccuggaucgacaucgagggcagacccgaggaccccguggagaucgcccuguaccagcccaugagcggcugcuacauccacuucuucagagagcccaccgaccugaagcaguucaagcaggacgccaaguacagccacggcaucgacguggccgaccuguucagcgcccagcccggccugaccagcgccgugaucgaggcccugcccagaaacauggugcugaccugccagggcagcgacgacaucaagagacugcuggacagccagggcagaagagacaucaagcugaucgacaucgcccugagcaaggccgacagcagaagauucgagaacgccgugugggaccagugcaaggaccugugccacaugcacaccggcguggugguggagaagaagaagagaggcggcaaggaggagaucaccccccacugcgcccugauggacugcaucauguacgacgccgccgugagcggcggccugaacauccccgugcugagagccgugcugcccagagacaugguguucagaaccagcagccccaagguggugcuguga

SEQ ID NO: 8909 - RNA, 1710 nt, Artificial Sequence
  derived and/or modified CDS sequence (opt4) from LASV(LASV052-NIG-2008;Clade II)__AIT17609__NP
augagcgccagcaaggaggugaagagcuuccuguggacccagagccugagaagagagcugagcggcuacugcagcagcaucaagcugcagguggugaaggacgcccaggcccugcugcacggccuggacuucagcgaggugagcaacgugcagagacugaugagaaagcagaagagagacgacagcgaccugaagagacugagagaccugaaccaggccgugaacaaccugguggagcugaagagcacccagcagaagagcauccugagagugggcacccugaccagcgacgaccugcugacccuggccgccgaccuggagaagcugaagagcaaggugaucagaaccgagagaccccugagcagcggcguguacaugggcaaccugagcacccagcagcuggagcagagaagagcccugcugaacaugaucggcauggccggcggcgcccagggcacccagcccggcagagacggcguggugagagugugggacgugaagaaccccgaccugcugaacaaccaguucggcaccaugcccagccugacccuggccugccugaccaagcagggccagguggaccugaacgacgccgugcuggcccugaccgaccugggccugaucuacaccgccaaguaccccaacagcagcgaccuggacagacugagccagagccaccccauccugaacaugguggacaccaagaagagcagccugaacaucagcggcuacaacuucagccugggcgccgccgugaaggccggcgccugcaugcuggacggcggcaacaugcuggagaccaucaaggugaccccccagaccauggacggcauccugaagagcauccugaaggugaagagaagccugggcauguucgugagcgacacccccggcgagagaaaccccuacgagaacauccuguacaagaucugccugagcggcgacggcuggcccuacaucgccagcagaaccagcaucgugggcagagccugggagaacaccaccguggaccuggagagcgacggcaagccccagaaggugggcgccgccggcagcaacaagagccugcagagcgccggcuuccccaccggccugaccuacagccagcugaugacccugaaggacagcaugaugcagcuggaccccagcgccaagaccuggaucgacaucgagggcagacccgaggaccccguggagaucgcccuguaccagcccaugagcggcugcuacauccacuucuucagagagcccaccgaccugaagcaguucaagcaggacgccaaguacagccacggcaucgacguggccgaccuguuccccgcccagcccggccugaccagcgccgugaucgaggcccugcccagaaacauggugcugaccugccagggcagcgacgacaucaagagacugcuggacagccagggcagaagagacaucaagcugaucgacaucgcccugagcaaggccgacagcagaagauucgagaacgccgugugggaccagugcaaggaccugugccacaugcacaccggcguggugguggagaagaagaagagaggcggcaaggaggagaucaccccccacugcgcccugauggacugcaucauguacgacgccgccgugagcggcggccugaacauccccgugcugagagccgugcugcccagagacaugguguucagaaccagcagccccaagguggugcuguga

SEQ ID NO: 8910 - RNA, 1710 nt, Artificial Sequence
  derived and/or modified CDS sequence (opt4) from LASV(LASV056-NIG-2008;Clade II)__AIT17613__NP
augagcgccagcaaggaggugaagagcuuccuguggacccagagccugagaagagagcugagcggcuacugcagcaacaucaagcugcagguggugaaggacgcccaggcccugcugcacggccuggacuucagcgaggugagcaacgugcagagacugaugagaaagcagaagagagacgacagcgaccugaagagacugagagaccugaaccaggccgugaacaaccugguggagcugaagagcacccagcagaagagcauccugagagugggcacccugaccagcgacgaccugcugacccuggccgccgaccuggagaagcugaagagcaaggugaucagaaccgagagaccccugagcagcggcguguacaugggcaaccugagcacccagcagcuggagcagagaagagcccugcugaacaugaucggcauggugggcggcgcccagggcacccagcccggcagagacggcguggugagagugugggacgugaagaaccccgaccugcugaacaaccaguucggcaccaugcccagccugacccuggccugccugaccaagcagggccagguggaccugaacgacgccgugcuggcccugaccgaccugggccugaucuacaccgccaaguaccccaacagcagcgaccuggacagacugagccagagccaccccauccugaacaugguggacaccaagaagagcagccugaacaucagcggcuacaacuucagccugggcgccgccgugaaggccggcgccugcaugcuggacggcggcaacaugcuggagaccaucaaggugaccccccagaccauggacggcauccugaagagcauccugaaggugaagagaagccugggcauguucgugagcgacacccccggcgagagaaaccccuacgagaacauccuguacaagaucugccugagcggcgacggcuggcccuacaucgccagcagaaccagcaucgugggcagagccugggagaacaccaccguggaccuggagagcgacggcaagccccagaaggugggcaccgccggcagcaacaagagccugcagagcgccggcuuccccaccggccugaccuacagccagcugaugacccugaaggacagcaugaugcagcuggaccccagcgccaagaccuggaucgacaucgagggcagacccgaggaccccguggagaucgcccuguaccagcccaugagcggcugcuacauccacuucuucagagagcccaccgaccugaagcaguucaagcaggacgccaaguacagccacggcaucgacguggccgaccuguuccccgcccagcccggccugaccagcgccgugaucgaggcccugcccagaaacauggugcugaccugccagggcagcgacgacaucaagagacugcuggacagccagggcagaagagacaucaagcugaucgacaucgcccugagcaagaccgacagcagaagauucgagaacgccgugugggaccagugcaaggaccugugccacaugcacaccggcguggugguggagaagaagaagagaggcggcaaggaggagaucaccccccacugcgcccugauggacugcaucauguacgacgccgccgugagcggcggccugaacauccccgugcugagagccgugcugcccagagacaugguguucagaaccagcagccccaagguggugcuguga

SEQ ID NO: 8911 - RNA, 1710 nt, Artificial Sequence
  derived and/or modified CDS sequence (opt4) from LASV(LASV058-NIG-2008;Clade II)__AIT17617__NP
augagcgccagcaaggaggugaagagcuuccuguggacccagagccugagaagagagcugagcggcuacugcagcagcaucaagcugcagguggugaaggacgcccaggcccugcugcacggccuggacuucagcgaggugagcaacgugcagagacugaugagaaagcagaagagagacgacagcgaccugaagagacugagagaccugaaccaggccgugaacaaccugguggagcugaagagcacccagcagaagagcauccugagagugggcacccugaccagcgacgaccugcugacccuggccgccgaccuggagaagcugaagagcaaggugaucagaaccgagagaccccugagcagcggcguguacaugggcaaccugagcgcccagcagcuggagcagagaagagcccugcugaacaugaucggcauggugggcggcgcccagggcacccagcccggcagagacggcguggugagagugugggacgugaagaaccccgaccugcugaacaaccaguucggcaccaugcccagccugacccuggccugccugaccaagcagggccagguggaccugaacgacgccgugcuggcccugaccgaccugggccugaucuacaccgccaaguaccccaacagcagcgaccuggacagacugagccagagccaccccauccugaacaugguggacaccaagaagagcagccugaacaucagcggcuucaacuucagccugggcgccgccgugaaggccggcgccugcaugcuggacggcggcaacaugcuggagaccaucaaggugaccccccagaccauggacggcauccugaagagcauccugaaggugaagagaagccugggcauguucgugagcgacacccccggcgagagaaaccccuacgagaacauccuguacaagaucugccugagcggcgacggcuggcccuacaucgccagcagaaccagcaucgugggcagagccugggagaacaccaccguggaccuggagagcgacggcaagccccagaaggugggcaccgccggcagcaacaagagccugcagagcgccggcuuccccaccggccugaccuacagccagcugaugacccugaaggacagcaugaugcagcuggaccccagcgccaagaccuggaucgacaucgagggcagacccgaggaccccguggagaucgcccuguaccagcccaugagcggcugcuacauccacuucuucagagagcccaccgaccugaagcaguucaagcaggacgccaaguacagccacggcaucgacguggccgaccuguuccccgcccagcccggccugaccagcgccgugaucgaggcccugcccagaaacauggugcugaccugccagggcagcgacgacaucaagagacugcuggacagccagggcagaagagacaucaagcugaucgacaucgcccugagcaaggccgacagcagaagauucgagaacgccgugugggaccagugcaaggaccugugccacaugcacaccggcguggugguggagaagaagaagagaggcggcaaggaggagaucaccccccacugcgcccugauggacugcaucauguacgacgccgccgugagcggcggccugaacauccccgugcugagagccgugcugcccagagacaugguguucagaaccagcagccccaagguggugcuguga

SEQ ID NO: 8912 - RNA, 1710 nt, Artificial Sequence
  derived and/or modified CDS sequence (opt4) from LASV(LASV063-NIG-2009;Clade II)__AIT17621__NP
augagcgccagcaaggaggugaagagcuuccuguggacccagagccugagaagagagcugagcggcuacugcagcagcaucaagcugcagguggugaaggacgcccaggcccugcugcacggccuggacuucagcgaggugaccaacgugcagagacugaugagaaagcagaagagagacgacagcgaccugaagagacugagagaccugaaccaggccgugaacaaccugguggagcugaagagcacccagcagaagagcauccugagagugggcacccugaccagcgacgaccugcugacccuggccgccgaccuggagaagcugaagagcaaggugaucagaaccgagagaccccugagcagcggcguguacaugggcaaccugagcacccagcagcuggagcagagaagagcccugcugaacaugaucggcauggugggcggcgcccagggcacccagcccggcagagacggcguggugagagugugggacgugaagaaccccgaccugcugaacaaccaguucggcaccaugcccagccugacccuggccugccugaccaagcagggccagguggaccugaacgacgccgugcuggcccugaccgaccugggccugaucuacaccgccaaguaccccaacagcagcgaccuggacagacugagccagagccaccccauccugaacaugguggacaccaagaagagcagccugaacaucagcggcuacaacuucagccugggcgccgccgugaaggccggcgccugcaugcuggacggcggcaacaugcuggagaccaucaaggugaccccccagaccauggacggcauccugaagagcauccugaaggugaagagaagccugggcauguucgugagcgacacccccggcgagagaaaccccuacgagaacauccuguacaagaucugccugagcggcgacggcuggcccuacaucgccagcagaaccagcaucgugggcagagccugggagaacaccaccguggaccuggagagcgacggcaagccccagaaggugggcaucgccggcagcaacaagagccugcagagcgccggcuuccccaccggccugaccuacagccagcugaugacccugaaggacagcaugaugcagcuggaccccagcgccaagaccuggaucgacaucgagggcagacccgaggaccccguggagaucgcccuguaccagcccaugagcggcugcuacauccacuucuucagagagcccaccgaccugaagcaguucaagcaggacgccaaguacagccacggcaucgacguggccgaccuguuccccgcccagcccggccugaccagcgccgugaucgaggcccugcccagaaacauggugcugaccugccagggcagcgacgacaucaagagacugcuggacagccagggcagaagagacaucaagcugaucgacaucgcccugagcaaggccgacagcagaaaguucgagaacgccgugugggaccagugcaaggaccugugccacaugcacaccggcguggugguggagaagaagaagagaggcggcaaggaggagaucaccccccacugcgcccugauggacugcaucauguacgacgccgccgugagcggcggccugaacauccccgugcugagagccgugcugcccagagacaugguguucagaaccagcagccccaagguggugcuguga

SEQ ID NO: 8913 - RNA, 1710 nt, Artificial Sequence
  derived and/or modified CDS sequence (opt4) from LASV(LASV1000-NIG-2009;Clade II)__AIT17783__NP
augagcgccagcaaggaggugaagagcuuccuguggacccagagccugagaagagagcugagcggcuacugcagcaacaucaagcugcagguggugaaggacgcccaggcccugcugcacggccuggacuucagcgaggugagcaacgugcagagacugaugagaaagcagaagagagacgacagcgaccugaagagacugagagaccugaaccaggccgugaacaaccugguggagcugaagagcacccagcagaagagcauccugagagugggcacccugaccagcgacgaccugcugacccuggccgccgaccuggagaagcugaagagcaaggugaucagaaccgagagaccccugagcagcggcguguacaugggcaaccugagcacccagcagcuggagcagagaagagcccugcugaacaugaucggcauggugggcggcgcccagggcacccagcccggcagagacggcguggugagagugugggacgugaagaaccccgaccugcugaacaaccaguucggcaccaugcccagccugacccuggccugccugaccaagcagggccagguggaccugaacgacguggugcuggcccugaccgaccugggccugaucuacaccgccaaguaccccaacagcagcgaccuggacagacugagccagagccaccccauccugaacaugguggacaccaagaagagcagccugaacaucagcggcuacaacuucagccugggcgccgccgugaaggccggcgccugcaugcuggacggcggcaacaugcuggagaccaucaaggugaccccccagaccauggacggcauccugaagagcauccugaaggugaagaagagccugggcauguucgugagcgacacccccggcgagagaaaccccuacgagaacauccuguacaagaucugccugagcggcgacggcuggcccuacaucgccagcagaaccagcaucgugggcagagccugggagaacaccaccguggaccuggagagcgacggcaagccccagaaggugggcaccgccggcagcaacaagagccugcagagcgccggcuuccccaccggccugaccuacagccagcugaugacccugaaggacagcaugaugcagcuggaccccagcgccaagaccuggaucgacaucgagggcagacccgaggaccccguggagaucgcccuguaccagcccgugagcggcugcuacauccacuucuucagagagcccaccgaccugaagcaguucaagcaggacgccaaguacagccacggcaucgacguggccgaccuguuccccgcccagcccggccugaccagcgccgugaucgaggcccugcccagaaacauggugcugaccugccagggcagcgacgacaucaagagacugcuggacagccagggcagaagagacaucaagcugaucgacaucgcccugagcaaggccgacagcagaagauucgagaacgccgugugggaccagugcaaggaccugugccacaugcacaccggcguggugguggagaagaagaagagaggcggcaaggaggagaucaccccccacugcgcccugauggacugcaucauguacgacgccgccgugagcggcggccugaacauccccgugcugagagccgugcugcccagagacaugguguucagaaccagcagccccaagguggugcuguga

SEQ ID NO: 8914 - RNA, 1710 nt, Artificial Sequence
  derived and/or modified CDS sequence (opt4) from LASV(LASV1008-NIG-2009;Clade II)__AIT17787__NP
augagcgccagcaaggaggugaagagcuuccuguggacccagagccugagaagagagcugagcggcuacugcagcaacaucaagcugcagguggugaaggacgcccaggcccugcugcacggccuggacuucagcgaggugagcaacgugcagagacugaugagaaagcagaagagagacgacggcgaccugaagagacugagagaccugaaccaggccgugaacaaccugguggagcugaagagcacccagcagaagagcauccugagagugggcacccugaccagcgacgaccugcugacccuggccgccgaccuggagaagcugaagagcaaggugaucagaaccgagagaccccugagcagcggcguguacaugggcaaccugagcacccagcagcuggagcagagaagagcccugcugaacaugaucggcauggugggcggcgcccagggcacccagcccggcagagacggcguggugagagugugggacgugaagaaccccgaccugcugaacaaccaguucggcaccaugcccagccugacccuggccugccugaccaagcagggccagguggaccugaacgacgccgugcuggcccugaccgaccugggccugaucuacaccgccaaguaccccaacagcagcgaccuggacagacugagccagagccaccccauccugaacaugguggacaccaagaagagcagccugaacaucagcggcuacaacuucagccugggcgccgccgugaaggccggcgccugcaugcuggacggcggcaacaugcuggagaccaucaaggugaccccccagaccauggacggcauccugaagagcauccugaaggugaagaagagccugggcauguucgugagcgacacccccggcgagagaaaccccuacgagaacauccuguacaagaucugccugagcggcgacggcuggcccuacaucgccagcagaaccagcaucgugggcagagccugggagaacaccaccguggaccuggagagcgacggcaagccccagaaggugggcaccgccggcagcaacaagagccugcagagcgccggcuuccccaccggccugaccuacagccagcugaugacccugaaggacagcaugaugcagcuggaccccagcgccaagaccuggaucgacaucgagggcagacccgaggaccccguggagaucgcccuguaccagcccaugagcggcugcuacauccacuucuucagagagcccaccgaccugaagcaguucaagcaggacgccaaguacagccacggcaucgacgugaccgaccuguucagcgcccagcccggccugaccagcgccgugaucgaggcccugcccagaaacauggugcugaccugccagggcagcgacgacaucaagagacugcuggacagccagggcagaagagacaucaagcugaucgacaucgcccugagcaagguggacagcagaagauucgagaacgccgugugggaccagugcaaggaccugugccacaugcacaccggcguggugguggagaagaagaagagaggcggcaaggaggagaucaccccccacugcgcccugauggacugcaucauguacgacgccgccgugagcggcggccugaacauccccgugcugagagccgugcugcccagagacaugguguucagaaccagcagccccaagguggugcuguga

SEQ ID NO: 8915 - RNA, 1710 nt, Artificial Sequence
  derived and/or modified CDS sequence (opt4) from LASV(LASV1015-NIG-2009;Clade II)__AIT17795__NP
augagcgccagcaaggaggugaagagcuuccuguggacccagagccugagaagagagcugagcggcuacugcagcagcaucaagcugcagguggugaaggacgcccaggcccugcugcacggccuggacuucagcgaggugagcaacgugcagagacugaugagaaagcagaagagagacgacagcgaccugaagagacugagagaccugaaccaggccgugaacaaccugguggagcugaagagcacccagcagaagagcauccugagagugggcacccugaccagcgacgaccugcugacccuggccgccgaccuggagaagcugaagagcaaggugaucagaaccgagagaccccugagcagcggcguguacaugggcaaccugagcacccagcagcuggagcagagaagagcccugcugaacaugaucggcauggugggcggcgcccagggcacccagcccggcagagacggcguggugagagugugggacgugaagaaccccgaccugcugaacaaccaguucggcaccaugcccagccugacccuggccugccugaccaagcagggccagguggaccugaacgacgccgugcuggcccugaccgaccugggccugaucuacaccgccaaguaccccaacagcagcgaccuggacagacugagccagagccaccccauccugaacaugguggacaccaagaagagcagccugaacaucagcggcuacaacuucagccugggcgccgccgugaaggccggcgccugcaugcuggacggcggcaacaugcuggagaccaucaaggugaccccccagaccauggacggcauccugaagagcauccugaaggugaagagaagccugggcauguucgugagcgacacccccggcgagagaaaccccuacgagaacauccuguacaagaucugccugagcggcgacggcuggcccuacaucgccagcagaaccagcaucgugggcagagccugggagaacaccaccguggaccuggagagcgacggcaagccccagaaggugggcaccgccggcagcaacaagagccugcagagcgccggcuuccccaccggccugaccuacagccagcugaugacccugaaggacagcaugaugcagcuggaccccagcgccaagaccuggaucgacaucgagggcagacccgaggaccccguggagaucgcccuguaccagcccaugagcggcugcuacauccacuucuucagagagcccaccgaccugaagcaguucaagcaggacgccaaguacagccacggcaucgacguggccgaccuguuccccgcccagcccggccugaccagcgccgugaucgaggcccugcccagaaacauggugcugaccugccagggcagcgacgacaucaagaagcugcuggacagccagggcagaagagacaucaagcugaucgacaucgcccugagcaaggccgacagcagaagauucgagaacgccgugugggaccagugcaaggaccugugccacaugcacaccggcguggugguggagaagaagaagagaggcggcaaggaggagaucaccccccacugcgcccugauggacugcaucauguacgacgccgccgugagcggcggccugaacauccccgugcugagagccgugcugcccagagacaugguguucagaaccagcagccccaagguggugcuguga

SEQ ID NO: 8916 - RNA, 1710 nt, Artificial Sequence
  derived and/or modified CDS sequence (opt4) from LASV(LASV1016-NIG-2009;Clade II)__AIT17799__NP
augagcgccagcaaggaggugaagagcuuccuguggacccagagccugagaagagagcugagcggcuacugcagcaacaucaagcugcagguggugaaggacgcccaggcccugcugcacggccuggacuucagcgaggugagcaacgugcagagacugaugagaaagcagaagagagacgacagcgaccugaagagacugagagaccugaaccaggccgugaacaaccugguggagcugaagagcacccagcagaagagcauccugagagugggcacccugaccagcgacgaccugcugacccuggccgccgaccuggagaagcugaagagcaaggugaucagaaccgagagaccccugagcagcggcguguacaugggcaaccugagcgcccagcagcuggagcagagaagagcccugcugaacaugaucggcauggugggcggcgcccagggcacccagcccggcagagacggcguggugagagugugggacgugaagaaccccgaccugcugaacaaccaguucggcaccaugcccagccugacccuggccugccugaccaagcagggccagguggaccugaacgacgccgugcuggcccugaccgaccugggccugaucuacaccgccaaguaccccaacagcagcgaccuggacagacugagccagagccaccccauccugaacaugguggacaccaagaagagcagccugaacaucagcggcuacaacuucagccugggcgccgccgugaaggccggcgccugcaugcuggacggcggcaacaugcuggagaccaucaaggugaccccccagaccauggacggcauccugaagagcauccugaaggugaagaagagccugggcauguucgugagcgacacccccggcgagagaaaccccuacgagaacauccuguacaagaucugccugagcggcgacggcuggcccuacaucgccagcagaaccagcaucgugggcagagccugggagaacaccaccguggaccuggagagcgacggcaagccccagaaggugggcaccgccggcagcaacaagagccugcagagcgccggcuuccccaccggccugaccuacagccagcugaugacccugaaggacagcaugaugcagcuggaccccagcgccaagaccuggaucgacaucgagggcagacccgaggaccccguggagaucgcccuguaccagcccaugagcggcugcuacauccacuucuucagagagcccaccgaccugaagcaguucaagcaggacgccaaguacagccacggcaucgacguggccgaccuguuccccgcccagcccggccugaccagcgccgugaucgaggcccugcccagaaacauggugcugaccugccagggcagcgacgacaucaagagacugcuggacagccagggcagaagagacaucaagcugaucgacaucgcccugagcaaggccgacagcagaagauucgagaacgccgugugggaccagugcaaggaccugugccacaugcacaccggcguggugguggagaagaagaagagaggcggcaaggaggagaucaccccccacugcgcccugauggacugcaucauguacgacgccgccgugagcggcggccugaacauccccgugcugagagccgugcugcccagagacaugguguucagaaccagcagccccaagguggugcuguga

SEQ ID NO: 8917 - RNA, 1710 nt, Artificial Sequence
  derived and/or modified CDS sequence (opt4) from LASV(LASV221-NIG-2010;Clade II)__AIT17625__NP
augagcgccagcaaggaggugaagagcuuccuguggacccagagccugagaagagagcugagcggcuacugcagcagcaucaagcugcagguggugaaggacgcccaggcccugcugcacggccuggacuucagcgaggugagcaacgugcagagacugaugagaaagcagagaagagacgacagcgaccugaagagacugagagaccugaaccaggccgugaacaaccugguggagcugaagagcacccagcagaagagcauccugagagugggcacccugaccagcgacgaccugcugacccuggccgccgaccuggagaagcugaagagcaaggugaucagaaccgagagaccccugagcagcggcguguacaugggcaaccugagcacccagcagcuggagcagagaagagcccugcugaacaugaucggcauggugggcggcgcccagggcacccagcccggcagagacggcguggugagagugugggacgugaagaaccccgaccugcugaacaaccaguucggcaccaugcccagccugacccuggccugccugaccaagcagggccagguggaccugaacgacgccgugcuggcccugaccgaccugggccugaucuacaccgccaaguaccccaacagcagcgaccuggacagacugagccagagccaccccauccugaacaugguggacaccaagaagagcagccugaacaucagcggcuacaacuucagccugggcgccgccgugaaggccggcgccugcaugcuggacggcggcaacaugcuggagaccaucaaggugaccccccagaccguggacggcauccugaagagcauccugaaggugaagagaagccugggcauguucgugagcgacacccccggcgagagaaaccccuacgagaacauccuguacaagaucugccugagcggcgacggcuggcccuacaucgccagcagaaccagcaucgugggcagagccugggagaacaccaccguggaccuggagagcgacggcaagccccagaaggugggcaccgccggcagcaacaagagccugcagagcgccggcuuccccaccggccugaccuacagccagcugaugacccugaaggacagcaugaugcagcuggaccccagcgccaagaccuggaucgacaucgagggcagacccgaggaccccguggagaucgcccuguaccagcccaugagcggcugcuacauccacuucuucagagagcccaccgaccugaagcaguucaagcaggacgccaaguacagccacggcaucgacguggccgaccuguuccccgcccagcccggccugaccagcgccgugaucgaggcccugcccagaaacauggugcugaccugccagggcagcgacgacaucaagagacugcuggacagccagggcagaagagacaucaagcugaucgacaucgcccugagcaaggccgacagcagaaaguucgagaacgccgugugggaccagugcaaggaccugugccacaugcacaccggcguggugguggagaagaagaagagaggcggcaaggaggagaucaccccccacugcgcccugauggacugcaucauguacgacgccgccgugagcggcggccugaacauccccgugcugagagccgugcugcccagagacaugguguucagaaccagcagccccaagguggugcuguga

SEQ ID NO: 8918 - RNA, 1710 nt, Artificial Sequence
  derived and/or modified CDS sequence (opt4) from LASV(LASV224-NIG-2010;Clade II)__AIT17627__NP
augagcgccagcaaggaggugaagagcuuccuguggacccagagccugagaagagagcugagcggcuacugcagcagcaucaagcugcagguggugaaggacgcccaggcccugcugcacggccuggacuucagcgaggugagcaacgugcagagacugaugagaaagcagaagagagacgacagcgaccugaagagacugagagaccugaaccaggccgugaacaaccugguggagcugaagagcacccagcagaagagcauccugagagugggcacccugaccagcgacgaccugcugacccuggccgccgaccuggagaagcugaagagcaaggugaucagaaccgagagaccccugagcagcggcguguacaugggcaaccugagcagccagcagcuggagcagagaagagcccugcugaacaugaucggcauggugggcggcgcccagggcacccagcccggcagagacggcguggugagagugugggacgugaagaaccccgaccugcugaacaaccaguucggcaccaugcccagccugacccuggccugccugaccaagcagggccagguggaccugaacgacgccgugcuggcccugaccgaccugggccugaucuacaccgccaaguaccccaacagcagcgaccuggacagacugagccagagccaccccauccugaacaugguggacaccaagaagagcagccugaacaucagcggcuacaacuucagccugggcgccgccgugaaggccggcgccugcaugcuggacggcggcaacaugcuggagaccaucaaggugaccccccagaccauggacggcauccugaagagcauccugaaggugaagagaagccugggcauguucgugagcgacacccccggcgagagaaaccccuacgagaacauccuguacaagaucugccugagcggcgacggcuggcccuacaucgccagcagaaccagcaucgugggcagagccugggagaacaccaccguggaccuggagagcgacggcaagccccagaaggugggcagcgccggcagcaacaagagccugcagagcgccggcuuccccaccggccugaccuacagccagcugaugacccugaaggacagcaugaugcagcuggaccccagcgccaagaccuggaucgacaucgagggcagacccgaggaccccguggagaucgcccuguaccagcccaugagcggcugcuacauccacuucuucagagagcccaccgaccugaagcaguucaagcaggacgccaaguacagccacggcaucgacguggccgaccuguuccccgcccagcccggccugaccagcgccgugaucgaggcccugcccagaaacauggugcugaccugccagggcagcgacgacaucaagagacugcuggacagccagggcagaagagacaucaagcugaucgacaucgcccugagcaaggccgacagcagaagauucgagaacgccgugugggaccagugcaaggaccugugccacaugcacaccggcguggugguggagaagaagaagagaggcggcaaggaggagaucaccccccacugcgcccugauggacugcaucauguacgacgccgccgugagcggcggccugaacauccccgugcugagagccgugcugcccagagacaugguguucagaaccagcagccccaagguggugcuguga

SEQ ID NO: 8919 - RNA, 1710 nt, Artificial Sequence
  derived and/or modified CDS sequence (opt4) from LASV(LASV225-NIG-2010;Clade II)__AIT17631__NP
augagcgccagcaaggagaucaagagcuuccuguggacccagagccugagaagagagcugagcggcuacugcagcagcaucaagcugcagguggugaaggacgcccaggcccugcugcacggccuggacuucagcgaggugagcaacgugcagagacugaugagaaagcagaagagagacgacagcgaccugaagagacugagagaccugaaccaggccgugaacaaccugguggagcugaagagcacccagcagaagagcauccugagagugggcacccugaccagcgacgaccugcugacccuggccgccgaccuggagaagcugaagagcaaggugaucagaaccgagagaccccugagcagcggcguguacaugggcaaccugagcacccagcagcuggagcagagaagagcccugcugaacaugaucggcauggugggcggcgcccagggcacccagcccggcagagacggcguggugagagugugggacgugaagaaccccgaccugcugaacaaccaguucggcaccaugcccagccugacccuggccugccugaccaagcagggccagguggaccugaacgacgccgugcuggcccugaccgaccugggccugaucuacaccgccaaguaccccaacagcagcgaccuggacagacugagccagagccaccccauccugaacaugguggacaccaagaagagcagccugaacaucagcggcuacaacuucagccugggcgccgccgugaaggccggcgccugcaugcuggacggcggcaacaugcuggagaccaucaaggugaccccccagaccauggacggcauccugaagagcauccugaaggugaagagaagccugggcauguucgugagcgacgcccccggcgagagaaaccccuacgagaacauccuguacaagaucugccugagcggcgacggcuggcccuacaucgccagcagaaccagcaucgugggcagagccugggagaacaccaccguggaccuggagagcgacggcaagccccagaaggugggcaccgccggcagcaacaagagccugcagagcgccggcuuccccaccggccugaccuacagccagcugaugacccugaaggacagcaugaugcagcuggaccccagcgccaagaccuggaucgacaucgagggcagacccgaggaccccguggagaucgcccuguaccagcccaugagcggcugcuacauccacuucuucagagagcccaccgaccugaagcaguucaagcaggacgccaaguacagccacggcaucgacguggccgaccuguuccccgcccagcccggccugaccagcgccgugaucgaggcccugcccagaaacauggugcugaccugccagggcagcgacgacaucaagagacugcuggacagccagggcagaagagacaucaagcugaucgacaucgcccugagcaaggccgacagcagaagauucgagaacgccgugugggaccagugcaaggaccugugccacaugcacaccggcguggugguggagaagaagaagagaggcggcaaggaggagaucaccccccacugcgcccugauggacugcaucauguacgacgccgccgugagcggcggccugaacauccccgugcugagagccgugcugcccagagacaugguguucagaaccagcagccccaagguggugcuguga

SEQ ID NO: 8920 - RNA, 1710 nt, Artificial Sequence
  derived and/or modified CDS sequence (opt4) from LASV(LASV229-NIG-2010;Clade II)__AIT17635__NP
augagcgccagcaaggaggugaagagcuuccuguggacccagagccugagaagagagcugagcggcuacugcagcaacaucaagcugcagguggugaaggacgcccaggcccugcugcacggccuggacuucagcgaggugagcaacgugcagagacugaugagaaagcagaagagagacgacaacgaccugaagagacugagagaccugaaccaggccgugaacaaccugguggagcugaagagcacccagcagaagagcauccugagagugggcacccugaccagcgacgaccugcugacccuggccgccgaccuggagaagcugaagagcaaggugaucagaaccgagagaccccugagcagcggcguguacaugggcaaccugaacacccagcagcuggagcagagaagagcccugcugaacaugaucggcauggugggcggcgcccagggcacccagcccggcagagacggcguggugagagugugggacgugaagaaccccgaccugcugaacaaccaguucggcaccaugcccagccugacccuggccugccugaccaagcagggccagguggaccugaacgacgccgugcuggcccugaccgaccugggccugaucuacaccgccaaguaccccaacagcagcgaccuggacagacugagccagagccaccccauccugaacaugguggacaccaagaagagcagccugaacaucagcggcuacaacuucagccugggcgccgccgugaaggccggcgccugcaugcuggacggcggcaacaugcuggagaccaucaaggugaccccccagaccauggacggcauccugaagagcauccugaaggugaagaagagccugggcauguucgugagcgacacccccggcgagagaaaccccuacgagaacauccuguacaagaucugccugagcggcgacggcuggcccuacaucgccagcagaaccagcaucgugggcagagccugggagaacaccaccguggaccuggagagcgacggcaagccccagaaggugggcaccgccggcagcaacaagagccugcagagcgccggcuuccccaccggccugaccuacagccagcugaugacccugaaggacagcaugaugcagcuggaccccagcgccaagaccuggaucgacaucgagggcagacccgaggaccccguggagaucgcccuguaccagcccaugagcggcugcuacauccacuucuucagagagcccaccgaccugaagcaguucaagcaggacgccaaguacagccacggcaucgacguggccgaccuguuccccgcccagcccggccugaccagcgccgugaucgaggcccugcccagaaacauggugcugaccugccagggcagcgacgacaucaagagacugcuggacagccagggcagaagagacaucaagcugaucgacaucgcccugagcaaggccgacagcagaagauucgagaacgccgugugggaccagugcaaggaccugugccacaugcacaccggcguggugguggagaagaagaagagaggcggcaaggaggagaucaccccccacugcgcccugauggacugcaucauguacgacgccgccgugagcggcggccugaacauccccgugcugagagccgugcugcccagagacaugguguucagaaccagcagccccaagguggugcuguga

SEQ ID NO: 8921 - RNA, 1710 nt, Artificial Sequence
  derived and/or modified CDS sequence (opt4) from LASV(LASV237-NIG-2010;Clade II)__AIT17639__NP
augagcgccagcaaggaggugaagagcuuccuguggacccagagccugagaagagagcugagcggcuacugcagcaacaucaagcugcagguggugaaggacgcccaggcccugcugcacggccuggacuucagcgaggugagcaacgugcagagacugaugagaaagcagaagagagacgacagcgaccugaagagacugagagaccugaaccaggccgugaacaaccugguggagcugaagagcacccagcagaagagcauccugagagugggcacccugaccagcgacgaccugcugacccuggccgccgaccuggagaagcugaagagcaaggugaucagaaccgagagaccccugagcagcggcguguacaugggcaaccugagcacccagcagcuggagcagagaagagcccugcugaacaugaucggcauggugggcggcgcccagggcacccagcccggcagagacggcguggugagagugugggacgugaagaaccccgaccugcugaacaaccaguucggcaccaugcccagccugacccuggccugccugaccaagcagggccagguggaccugaacgacgccgugcuggcccugaccgaccugggccugaucuacaccgccaaguaccccaacagcagcgaccuggacagacugagccagagccaccccauccugaacaugguggacaucaagaagagcagccugaacaucagcggcuacaacuucagccugggcgccgccgugaaggccggcgccugcaugcuggacggcggcaacaugcuggagaccaucaaggugaccccccagaccauggacggcauccugaagagcauccugaaggugaagagaagccugggcauguucgugagcgacacccccggcgagagaaaccccuacgagaacauccuguacaagaucugccugagcggcgacggcuggcccuacaucgccagcagaaccagcaucgugggcagagccugggagaacaccaccguggaccuggagagcgacggcaagccccagaaggugggcagcgccggcagcaacaagagccugcagagcgccggcuuccccaccggccugaccuacagccagcugaugacccugaaggacagcaugaugcagcuggaccccagcgccaagaccuggaucgacaucgagggcagacccgaggaccccguggagaucgcccuguaccagcccaugagcggcugcuacauccacuucuucagagagcccaccgaccugaagcaguucaagcaggacgccaaguacagccacggcaucgacguggccgaccuguuccccgcccagcccggccugaccagcgccgugaucgaggcccugcccagaaacauggugcugaccugccagggcagcgacgacaucaagagacugcuggacagccagggcagaagagacaucaagcugaucgacaucgcccugagcaaggccgacagcagaagauucgagaacgccgugugggaccagugcaaggaccugugccacaugcacaccggcguggugguggagaagaagaagagaggcggcaaggaggagaucaccccccacugcgcccugauggacugcaucauguacgacgccgccgugagcggcggccugaacauccccgugcugagagccgugcugcccagagacaugguguucagaaccagcagccccaagguggugcuguga

SEQ ID NO: 8922 - RNA, 1710 nt, Artificial Sequence
  derived and/or modified CDS sequence (opt4) from LASV(LASV242-NIG-2010;Clade II)__AIT17651__NP
augagcgccagcaaggaggugaagagcuuccuguggacccagagccugagaagagagcugagcggcuacugcagcagcaucaagcugcagguggugaaggacgcccaggcccugcugcacggccuggacuucagcgaggugagcaacgugcagagacugaugagaaagcagaagagagacgacagcgaccugaagagacugagagaccugaaccaggccgugaacaaccugguggagcugaagagcacccagcagaagagcgugcugagagugggcacccugaccagcgacgaccugcugacccuggccgccgaccuggagaagcugaagagcaaggugaucagaaccgagagaccccugagcagcggcguguacaugggcaaccugagcgcccagcagcuggagcagagaagagcccugcugaacaugaucggcauggugggcggcgcccagggcacccagcccggcagagacggcguggugagagugugggacgugaagaaccccgaccugcugaacaaccaguucggcaccaugcccagccugacccuggccugccugaccaagcagggccagguggaccugaacgacguggugcuggcccugaccgaccugggccugaucuacaccgccaaguaccccaacagcagcgaccuggacagacugagccagagccaccccauccugaacaugguggacaccaagaagagcagccugaacaucagcggcuacaacuucagccugggcgccgccgugaaggccggcgccugcaugcuggacggcggcaacaugcuggagaccaucaaggugaccccccagaccauggacggcauccugaagagcauccugaaggugaagaagagccugggcauguucgugagcgacacccccggcgagagaaaccccuacgagaacauccuguacaagaucugccugagcggcgacggcuggcccuacaucgccagcagaaccagcaucgugggcagagccugggagaacaccaccguggaccuggagagcgacggcaagccccagaaggugggcaccgccggcagcaacaagagccugcagagcgccggcuuccccaccggccugaccuacagccagcugaugacccugaaggacagcaugaugcagcuggaccccagcgccaagaccuggaucgacaucgagggcagacccgaggaccccguggagaucgcccuguaccagcccaugagcggcugcuacauccacuucuucagagagcccaccgaccugaagcaguucaagcaggacgccaaguacagccacggcaucgacgugaccgaccuguucagcgcccagcccggccugaccagcgccgugaucgaggcccugcccagaaacauggugcugaccugccagggcagcgacgacaucaagagacugcuggacagccagggcagaagagacaucaagcugaucgacaucgcccugagcaaggccgacagcagaagauucgagaacgccgugugggaccagugcaaggaccugugccacaugcacaccggcguggugguggagaagaagaagagaggcggcaaggaggagaucaccccccacugcgcccugauggacugcaucauguacgacgccgccgugagcggcggccugaacauccccgugcugagagccgugcugcccagagacaugguguucagaaccagcagccccaagguggugcuguga

SEQ ID NO: 8923 - RNA, 1710 nt, Artificial Sequence
  derived and/or modified CDS sequence (opt4) from LASV(LASV245-NIG-2011;Clade II)__AIT17655__NP
augagcgccagcaaggaggugaagagcuuccuguggacccagagccugagaagagagcugagcggcuacugcagcaacaucaagcugcagguggugaaggacgcccaggcccugcugcacggccuggacuucagcgaggugagcaacgugcagagacugaugagaaagcagaagagagacgacagcgaccugaagagacugagagaccugaaccaggccgugaacaaccugguggagcugaagagcacccagcagaagagcauccugagagugggcacccugaccagcgacgaccugcugacccuggccgccgaccuggagaagcugaagagcaaggugaucagaaccgagaagccccugagcagcggcguguacaugggcaaccugagcacccagcagcuggagcagagaagagcccugcugaacaugaucggcauggugggcggcgcccagggcacccagcccggcagagacggcguggugagagugugggacgugaagaaccccgaccugcugaacaaccaguucggcaccaugcccagccugacccuggccugccugaccaagcagggccagguggaccugaacgacgccgugcuggcccugaccgaccugggccugaucuacaccgccaaguuccccaacagcagcgaccuggacagacugagccagagccaccccauccugaacaugguggacaccaagaagagcagccugaacaucagcggcuacaacuucagccugggcgccgccgugaaggccggcgccugcaugcuggacggcggcaacaugcuggagaccaucaaggugaccccccagaccauggacggcauccugaagagcauccugaaggugaagaagagccugggcauguucgugagcgacacccccggcgagagaaaccccuacgagaacauccuguacaagaucugccugagcggcgacggcuggcccuacaucgccagcagaaccagcaucgugggcagagccugggagaacaccaccguggaccuggagagcgacggcaagccccagaaggugggcaccaccggcagcaacaagagccugcagagcgccggcuuccccaccggccugaccuacagccagcugaugacccugaaggacagcaugaugcagcuggaccccagcgccaagaccuggaucgacaucgagggcagacccgaggaccccguggagaucgcccuguaccagcccaugagcggcugcuacauccacuucuucagagagcccaccgaccugaagcaguucaagcaggacgccaaguacagccacggcaucgacguggccgaccuguuccccgcccagcccggccugaccagcgccgugaucgaggcccugcccagaaacauggugcugaccugccagggcagcgacgacaucaagagacugcuggacagccagggcagaagagacaucaagcugaucgacaucgcccugagcaaggccgacagcagaagauucgagaacgccgugugggaccagugcaaggaccugugccacaugcacaccggcguggugguggagaagaagaagagaggcggcaaggaggagaucaccccccacugcgcccugauggacugcaucauguacgacgccgccgugagcggcggccugaacauccccgugcugagagccgugcugcccagagacaugguguucagaaccagcagccccaagguggugcuguga

SEQ ID NO: 8924 - RNA, 1710 nt, Artificial Sequence
  derived and/or modified CDS sequence (opt4) from LASV(LASV246-NIG-2010;Clade II)__AIT17659__NP
augagcgccagcaaggaggugaagagcuuccuguggacccagagccugagaagagagcugagcggcuacugcagcagcaucaagcugcagguggugaaggacgcccaggcccugcugcacggccuggacuucagcgaggugagcaacgugcagagacugaugagaaagcagaagagagacgacagcgaccugaagagacugagagaccugaaccaggccgugaacaaccugguggagcugaagagcacccagcagaagagcgugcugagagugggcacccugaccagcgacgaccugcugacccuggccgccgaccuggagaagcugaagagcaaggugaucagaaccgagagaccccugagcagcggcguguacaugggcaaccugagcacccagcagcuggagcagagaagagcccugcugagcaugaucggcauggugggcggcgcccagggcacccagcccggcagagacggcguggugagagugugggacgugaagaaccccgaccugcugaacaaccaguucggcaccaugcccagccugacccuggccugccugaccaagcagggccagguggaccugaacgacgccgugcuggcccugaccgaccugggccugaucuacaccgccaaguaccccaacagcagcgaccuggacagacugagccagagccaccccauccugaacaugguggacaccaagaagagcagccugaacaucagcggcuacaacuucagccugggcgccgccgugaaggccggcgccugcaugcuggacggcggcaacaugcuggagaccaucaaggugaccccccagaccauggacggcauccugaagagcauccugaaggugaagagaagccugggcauguucgugagcgacacccccggcgagagaaaccccuacgagaacauccuguacaagaucugccugagcggcgacggcuggcccuacaucgccagcagaaccagcaucgugggcagagccugggagaacaccaccguggaccuggagagcgacggcaagccccagaaggugggcaccgccggcagcaacaagagccugcagagcgccggcuuccccaccggccugaccuacagccagcugaugacccugaaggacagcaugaugcagcuggaccccagcgccaagaccuggaucgacaucgagggcagacccgaggaccccguggagaucgcccuguaccagcccaugagcggcugcuacauccacuucuucagagagcccaccgaccugaagcaguucaagcaggacgccaaguacagccacggcaucgacguggccgaccuguuccccgcccagcccggccugaccagcgccgugaucgaggcccugcccagaaacauggugcugaccugccagggcagcgacgacaucaagagacugcuggacagccagggcagaagagacaucaagcugaucgacaucgcccugaacaaggccgacagcagaagauucgagaacgccgugugggaccagugcaaggaccugugccacaugcacaccggcguggugguggagaagaagaagagaggcggcaaggaggagaucaccccccacugcgcccugauggacugcaucauguacgacgccgccgugagcggcggccugaacauccccgugcugagagccgugcugcccagagacaugguguucagaaccagcagccccaagguggugcuguga

SEQ ID NO: 8925 - RNA, 1710 nt, Artificial Sequence
  derived and/or modified CDS sequence (opt4) from LASV(LASV251-NIG-2010;Clade II)__AIT17667__NP
augagcgccagcaaggaggugaagagcuuccuguggacccagagccugagaagagagcugagcggcuacugcagcagcaucaagcugcagguggugaaggacgcccaggcccugcugcacggccuggacuucagcgaggugagcaacgugcagagacugaugagaaagcagaagagagacgacagcgaccugaagagacugagagaccugaaccaggccgugaacaaccugguggagcugaagagcacccagcagaagagcauccugagagugggcacccugaccagcgacgaccugcugacccuggccgccgaccuggagaagcugaagagcaaggugaucagaaccgagagaccccugagcagcggcguguacaugggcaaccugagcacccagcagcuggagcagagaagagcccugcugaacaugaucggcauggugggcggcgcccagggcacccagcccggcagagacggcguggugagagugugggacgugaagaaccccgaccugcugaacaaccaguucggcaccaugcccagccugacccuggccugccugaccaagcagggccagguggaccugaacgacgccgugcuggcccugaccgaccugggccugaucuacaccgccaaguaccccaacagcagcgaccuggacagacugagccagagccaccccauccugaacaugguggacaccaagaagagcagccugaacaucagcggcuacaacuucagccugggcgccgccgugaaggccggcgccugcaugcuggacggcggcaacaugcuggagaccaucaaggugaccccccagaccaucgacggcauccugaagagcauccugaaggugaagaagagccugggcauguucgugagcgacacccccggcgagagaaaccccuacgagaacauccuguacaagaucugccugagcggcgacggcuggcccuacaucgccagcagaaccagcaucgugggcagagccugggagaacaccaccguggaccuggagagcgacggcaagccccagaaggugggcaccaccggcagcaacaagagccugcagagcgccggcuuccccaccggccugaccuacagccagcugaugacccugaaggacagcaugaugcagcuggaccccagcgccaagaccuggaucgacaucgagggcagacccgaggaccccguggagaucgcccuguaccagcccaugagcggcugcuacauccacuucuucagagagcccaccgaccugaagcaguucaagcaggacgccaaguacagccacggcaucgacgugaccgaccuguuccccgcccagcccggccugaccagcgccgugaucgaggcccugcccagaaacauggugcugaccugccagggcagcgaggacaucaagagacugcuggacagccagggcagaagagacaucaagcugaucgacaucgcccugagcaaggccgacagcagaagauucgagaacgccgugugggaccagugcaaggaccugugccacaugcacaccggcguggugguggagaagaagaagagaggcggcaaggaggagaucaccccccacugcgcccugauggacugcaucauguacgacgccgccgugagcggcggccugaacauccccgugcugagagccgugcugcccagagacaugguguucagaaccagcagccccaagguggugcuguga

SEQ ID NO: 8926 - RNA, 1710 nt, Artificial Sequence
  derived and/or modified CDS sequence (opt4) from LASV(LASV253-NIG-2011;Clade II)__AIT17671__NP
augagcgccagcaaggaggugaagagcuuccuguggacccagagccugagaagagagcugagcggcuacugcagcagcaucaagcugcagguggugaaggacgcccaggcccugcugcacggccuggacuucagcgaggugagcaacgugcagagacugaugagaaagcagaagagagacgacagcgaccugaagagacugagagaccugaaccaggccgugaacaaccugguggagcugaagagcacccagcagaagagcgugcugagagugggcacccugaccagcgacgaccugcugacccuggccgccgaccuggagaagcugaagagcaaggugaucagaaccgagagaccccugagcagcggcguguacaugggcaaccugagcacccagcagcuggagcagagaagagcccugcugaacaugaucggcauggugggcggcgcccagggcacccagcccggcagagacggcguggugagagugugggacgugaagaaccccgaccugcugaacaaccaguucggcaccaugcccagccugacccuggccugccugaccaagcagggccagguggaccugaacgacguggugcuggcccugaccgaccugggccugaucuacaccgccaaguaccccaacagcagcgaccuggacagacugagccagagccaccccauccugaacaugguggacaccaagaagagcagccugaacaucagcggcuacaacuucagccugggcgccgccgugaaggccggcgccugcaugcuggacggcggcaacaugcuggagaccaucaaggugaccccccagaccauggacggcauccugaagagcauccugaaggugaagaagagccugggcauguucgugagcgacacccccggcgagagaaaccccuacgagaacauccuguacaagaucugccugagcggcgacggcuggcccuacaucgccagcagaaccagcaucgugggcagagccugggagaacaccaccguggaccuggagagcgacggcaagccccagaaggugggcaccgccggcagcaacaagagccugcagagcgccggcuuccccaccggccugaccuacagccagcugaugacccugaaggacagcaugaugcagcuggaccccagcgccaagaccuggaucgacaucgagggcagacccgaggaccccguggagaucgcccuguaccagcccaugagcggcugcuacauccacuucuucagagagcccaccgaccugaagcaguucaagcaggacgccaaguacagccacggcaucgacgugaccgaccuguuccccgcccagcccggccugaccagcgccgugaucgaggcccugcccagaaacauggugcugaccugccagggcagcgacgacaucaagagacugcuggacagccagggcagaagagacaucaagcugaucgacaucgcccugagcaaggccgacagcagaagauucgagaacgccgugugggaccagugcaaggaccugugccacaugcacaccggcguggugguggagaagaagaagagaggcggcaaggaggagaucaccccccacugcgcccugauggacugcaucauguacgacgccgccgugagcggcggccugaacauccccgugcugagagccgugcugcccagagacaugguguucagaaccagcagccccaagguggugcuguga

SEQ ID NO: 8927 - RNA, 1710 nt, Artificial Sequence
  derived and/or modified CDS sequence (opt4) from LASV(LASV254-NIG-2011;Clade II)__AIT17675__NP
augagcgccagcaaggaggugaagagcuuccuguggacccagagccugagaagagagcugagcggcuacugcagcagcaucaagcugcagguggugaaggacgcccaggcccugcugcacggccuggacuucagcgaggugagcaacgugcagagacugaugagaaagcagaagagagacgacagcgaccugaagagacugagagaccugaaccaggccgugaacaaccugguggagcugaagagcacccagcagaagagcgugcugagagugggcacccugaccagcgacgaccugcugacccuggccgccgaccuggagaagcugaagagcaaggugaucagaaccgagagaccccugagcagcggcguguacaugggcaaccugagcacccagcagcuggagcagagaagagcccugcugaacaugaucggcauggugggcggcgcccagggcacccagcccggcagagacggcguggugagagugugggacgugaagaaccccgaccugcugaacaaccaguucggcaccaugcccagccugacccuggccugccugaccaagcagggccagguggaccugaacgacgccgugcuggcccugaccgaccugggccugaucuacaccgccaaguaccccaacagcagcgaccuggacagacugagccagagccaccccauccugaacaugguggacaccaagaagagcagccugaacaucagcggcuacaacuucagccugggcgccgccgugaaggccggcgccugcaugcuggacggcggcaacaugcuggagaccaucaaggugaccccccagaccauggacggcauccugaagagcauccugaaggugaagaagagccugggcauguucgugagcgacacccccggcgagagaaaccccuacgagaacauccuguacaagaucugccugagcggcgacggcuggcccuacaucgccagcagaaccagcaucgugggcagagccugggagaacaccaucguggaccuggagagcgacggcaagccccagaaggugggcaccgccggcagcaacaagagccugcagagcgccggcuuccccaccggccugaccuacagccagcugaugacccugaaggacagcaugaugcagcuggaccccagcgccaagaccuggaucgacaucgagggcagacccgaggaccccguggagaucgcccuguaccagcccaugagcggcugcuacauccacuucuucagagagcccaccgaccugaagcaguucaagcaggacgccaaguacagccacggcaucgacguggccgaccuguuccccgcccagcccggccugaccagcgccgugaucgaggcccugcccagaaacauggugcugaccugccagggcagcgacgacaucaagagacugcuggacagccagggcagaagagacaucaagcugaucgacaucgcccugagcaaggccgacagcagaagauucgagaacgccgugugggaccagugcaaggaccugugccacaugcacaccggcguggugguggagaagaagaagagaggcggcaaggaggagaucaccccccacugcgcccugauggacugcaucauguacgacgccgccgugagcggcggccugaacauccccgugcugagagccgugcugcccagagacaugguguucagaaccagcagccccaagguggugcuguga

SEQ ID NO: 8928 - RNA, 1710 nt, Artificial Sequence
  derived and/or modified CDS sequence (opt4) from LASV(LASV256-NIG-2010;Clade II)__AIT17679__NP
augagcgccagcaaggaggugaagagcuuccuguggacccagagccugagaagagagcugagcggcuacugcagcagcaucaagcugcagguggugaaggacgcccaggcccugcugcacggccuggacuucagcgaggugagcaacgugcagagacugaugagaaagcagaagagagacgacagcgaccugaagagacugagagaccugaaccaggccgugaacaaccugguggagcugaagagcacccagcagaagagcauccugagagugggcacccugaccagcgacgaccugcugacccuggccgccgaccuggagaagcugaagagcaaggugaucagaaccgagagaccccugagcagcggcguguacaugggcaaccugagcacccagcagcuggagcagagaagagcccugcugaacaugaucggcauggugggcggcgcccagagcacccagcccggcagagacggcguggugagagugugggacgugaagaaccccgaccugcugaacaaccaguucggcaccaugcccagccugacccuggccugccugaccaagcagggccagguggaccugaacgacgccgugcuggcccugaccgaccugggccugaucuacaccgccaaguaccccaacagcagcgaccuggacagacugagccagagccaccccauccugaacaugguggacaccaagaagagcagccugaacaucagcggcuacaacuucagccugggcgccgccgugaaggccggcgccugcaugcuggacggcggcaacaugcuggagaccaucaaggugaccccccagaccauggacggcauccugaagagcauccugaaggugaagagaagccugggcauguucgugagcgacacccccggcgagagaaaccccuacgagaacauccuguacaagaucugccugagcggcgacggcuggcccuacaucgccagcagaaccagcaucgugggcagagccugggagaacaccaccguggaccuggagagcgacggcaagccccagaaggugggcaccgccggcagcaacaagagccugcagagcgccggcuuccccaccggccugaccuacagccagcugaugacccugaaggacagcaugaugcagcuggaccccagcgccaagaccuggaucgacaucgagggcagacccgaggaccccguggagaucgcccuguaccagcccaugagcggcugcuacauccacuucuucagagagcccaccgaccugaagcaguucaagcaggacgccaaguacagccacggcaucgacguggccgaccuguuccccgcccagcccggccugaccagcgccgugaucgaggcccugcccagaaacauggugcugaccugccagggcagcgacgacaucaagagacugcuggacagccagggcagaagagacaucaagcugaucgacaucgcccugagcaaggccgacagcagaagauucgagaacgccgugugggaccagugcaaggaccugugccacaugcacaccggcguggugguggagaagaagaagagaggcggcaaggaggagaucaccccccacugcgcccugauggacugcaucauguacgacgccgccgugagcggcggccugaacauccccgugcugagagccgugcugcccagagacaugguguucagaaccagcagccccaagguggugcuguga

SEQ ID NO: 8929 - RNA, 1710 nt, Artificial Sequence
  derived and/or modified CDS sequence (opt4) from LASV(LASV263-NIG-2011;Clade II)__AIT17683__NP
augagcgccagcaaggaggugaagagcuuccuguggacccagagccugagaagagagcugagcggcuacugcagcaacaucaagcugcagguggugaaggacgcccaggcccugcugcacggccuggacuucagcgaggugagcaacgugcagagacugaugagaaagcagaagagagacgacagcgaccugaagagacugagagaccugaaccaggccgugaacaaccugguggagcugaagagcacccagcagaagagcauccugagagugggcacccugaccagcgacgaccugcugacccuggccgccgaccuggagaagcugaagagcaaggugaucagaaccgagagaccccugagcagcggcguguacaugggcaaccugagcacccagcagcuggagcagagaagagcccugcugaacaugaucggcauggugggcggcgcccagggcacccagcccggcagagacggcguggugagagugugggacgugaagaaccccgaccugcugaacaaccaguucggcaccaugcccagccugacccuggccugccugaccaagcagggccagguggaccugaacgacgccgugcuggcccugaccgaccugggccugaucuacaccgccaaguaccccaacagcagcgaccuggacagacugagccagagccaccccauccugaacaugguggacaccaagaagagcagccugaacaucagcggcuucaacuucagccugggcgccgccgugaaggccggcgccugcaugcuggacggcggcaacaugcuggagaccaucaaggugaccccccagaccauggacggcauccugaagagcauccugaaggugaagaagagccugggcauguucgugagcgacacccccggcgagagaaaccccuacgagaacauccuguacaagaucugccugagcggcgacggcuggcccuacaucgccagcagaaccagcaucgugggcagagccugggagaacaccaccguggaccuggagagcgacggcaagccccagaaggugggcaccgccggcagcaacaagagccugcagagcgccggcuuccccaccggccugaccuacagccagcugaugacccugaaggacagcaugaugcagcuggaccccagcgccaagaccuggaucgacaucgagggcagacccgaggaccccguggagaucgcccuguaccagcccaugagcggcugcuacauccacuucuucagagagcccaccgaccugaagcaguucaagcaggacgccaaguacagccacggcaucgacguggccgaccuguuccccgcccagcccggccugaccagcgccgugaucgaggcccugcccagaaacauggugcugaccugccagggcagcgacgacaucaagagacugcuggacagccagggcagaagagacaucaagcugaucgacaucgcccugagcaaggccgacagcagaagauucgagaacgccgugugggaccagugcaaggaccugugccacaugcacaccggcguggugguggagaagaagaagagaggcggcaaggaggagaucaccccccacugcgcccugauggacugcaucauguacgacgccgccgugagcggcggccugaacauccccgugcugagagccgugcugcccagagacaugguguucagaaccagcagccccaagguggugcuguga

SEQ ID NO: 8930 - RNA, 1710 nt, Artificial Sequence
  derived and/or modified CDS sequence (opt4) from LASV(LASV267-NIG-2010;Clade II)__AIT17687__NP
augagcgccagcaaggaggugaagagcuuccuguggacccagagccugagaagagagcugagcggcuacugcagcagcaucaagcugcagguggugaaggacgcccaggcccugcugcacggccuggacuucagcgaggugagcaacgugcagagacugaugagaaagcagaagagagacgacagcgaccugaagagacugagagaccugaaccaggccgugaacaaccugguggagcugaagagcacccagcagaagagcauccugagagugggcacccugaccagcgacgaccugcugacccuggccgccgaccuggagaagcugaagagcaaggugaucagaaccgagagaccccugagcagcggcguguacaugggcaaccugagcgcccagcagcuggagcagagaagagcccugcugaacaugaucggcauggugggcggcgcccagggcacccagcccggcagagacggcguggugagagugugggacgugaagaaccccgaccugcugaacaaccaguucggcaccaugcccagccugacccuggccugccugaccaagcagggccagguggaccugaacgacgccgugcuggcccugaccgaccugggccugaucuacaccgccaaguaccccaacagcagcgaccuggacagacugagccagagccaccccauccugaacaugguggacaccaagaagagcagccugaacaucagcggcuacaacuucagccugggcgccgccgugaaggccggcgccugcaugcuggacggcggcaacaugcuggagaccaucaaggugaccccccagaccauggacggcauccugaagagcauccugaaggugaagagaagccugggcauguucgugagcgacacccccggcgagagaaaccccuacgagaacauccuguacaagaucugccugagcggcgacggcuggcccuacaucgccagcagaaccagcaucgugggcagagccugggagaacaccaccguggaccuggagagcgacggcaagccccagaaggugggcaccgccggcagcaacaagagccugcagagcgccggcuuccccaccggccugaccuacagccagcugaugacccugaaggacagcaugaugcagcuggaccccagcgccaagaccuggaucgacaucgagggcagacccgaggaccccguggagaucgcccuguaccagcccaugagcggcugcuacauccacuucuucagagagcccaccgaccugaagcaguucaagcaggacgccaaguacagccacggcaucgacguggccgaccuguuccccgcccagcccggccugaccagcgccgugaucgaggcccugcccagaaacauggugcugaccugccagggcagcgacgacaucaagagacugcuggacagccagggcagaagagacaucaagcugaucgacaucgcccugagcaaggccgacagcagaagauucgagaacgccgugugggaccagugcaaggaccugugccacaugcacaccggcguggugguggagaagaagaagagaggcggcaaggaggagaucaccccccacugcgcccugauggacugcaucauguacgacgccgccgugagcggcggccugaacauccccgugcugagagccgugcugcccagagacaugguguucagaaccagcagccccaagguggugcuguga

SEQ ID NO: 8931 - RNA, 1710 nt, Artificial Sequence
  derived and/or modified CDS sequence (opt4) from LASV(LASV274-NIG-2010;Clade II)__AIT17695__NP
augagcgccagcaaggaggugaagagcuuccuguggacccagagccugagaagagagcugagcggcuacugcagcaacaucaagcugcagguggugaaggacgcccaggcccugcugcacggccuggacuucagcgaggugagcaacgugcagagacugaugagaaagcagaagagagacgacagcgaccugaagagacugagagaccugaaccaggccgugaacaaccugguggagcugaagagcacccagcagaagagcauccugagagugggcacccugaccagcgacgaccugcugacccuggccgccgaccuggagaagcugaagagcaaggugaucagaaccgagagaccccugagcagcggcguguacaugggcaaccugagcacccagcagcuggagcagagaagagcccugcugaaccugaucggcauggugggcggcgcccagggcacccagcccggcagagacggcguggugagagugugggacgugaagaaccccgaccugcugaacaaccaguucggcaccaugcccagccugacccuggccugccugaccaagcagggccagguggaccugaacgacguggugcuggcccugaccgaccugggccugaucuacaccgccaaguaccccaacagcagcgaccuggacagacugagccagagccaccccauccugaacaugguggacaccaagaagagcagccugaacaucagcggcuucaacuucagccugggcgccgccgugaaggccggcgccugcaugcuggacggcggcaacaugcuggagaccaucaaggugaccccccacaccauggacggcauccugaagagcauccugaaggugaagaagagccugggcauguucgugagcgacacccccggcgagagaaaccccuacgagaacauccuguacaagaucugccugagcggcgacggcuggcccuacaucgccagcagaaccagcaucgugggcagagccugggagaacaccaccguggaccuggagagcgacggcaagccccacaaggugggcaccgccggcagcaacaagagccugcagagcgccggcuuccccaccggccugaccuacagccagcugaugacccugaaggacagcaugaugcagcuggaccccagcgccaagaccuggaucgacaucgagggcagacccgaggaccccguggagaucgcccuguaccagcccaugagcggcugcuacauccacuucuucagagagcccaccgaccugaagcaguucaagcaggacgccaaguacagccacggcaucgacguggccgaccuguuccccgcccagcccggccugaccagcgccgugaucgaggcccugcccagaaacauggugcugaccugccagggcagcgacgacaucaagagacugcuggacagccagggcagaagagacaucaagcugaucgacaucgcccugagcaaggccgacagcagaagauucgagaacgccgugugggaccagugcaaggaccugugccacaugcacaccggcguggugguggagaagaagaagagaggcggcaaggaggagaucaccccccacugcgcccugauggacugcaucauguacgacgccgccgugagcggcggccugaacauccccgugcugagagccgugcugcccagagacaugguguucagaaccagcagccccaagguggugcuguga

SEQ ID NO: 8932 - RNA, 1710 nt, Artificial Sequence
  derived and/or modified CDS sequence (opt4) from LASV(LASV719-NIG-2009;Clade II)__AIT17705__NP
augagcgccagcaaggaggugaagagcuuccuguggacccagagccugagaagagagcugagcggcuacugcagcaacaucaagcugcagguggugaaggacgcccaggcccugcugcacggccuggacuucagcgaggugagcaacgugcagagacugaugagaaagcagaagagagacgacagcgaccugaagagacugagagaccugaaccaggccgugaacaaccugguggagcugaagagcacccagcagaagagcauccugagagugggcacccugaccagcgacgaccugcugacccuggccgccgaccuggagaagcugaagagcaaggugaucagaaccgagagaccccugagcagcggcguguacaugggcaaccugagcacccagcagcuggagcagagaagagcccugcugaaccugaucggcauggugggcggcgcccagggcacccagcccggcagagacggcguggugagagugugggacgugaagaaccccgaccugcugaacaaccaguucggcaccaugcccagccugacccuggccugccugaccaagcagggccagguggaccugaacgacgccgugcuggcccugaccgaccugggccugaucuacaccgccaaguaccccaacagcagcgaccuggacagacugagccagagccaccccauccugaacaugguggacaccaagaagagcagccugaacaucagcggcuucaacuucagccugggcgccgccgugaaggccggcgccugcaugcuggacggcggcaacaugcuggagaccaucaaggugaccccccagaccauggacggcauccugaagagcauccugaaggugaagaagagccugggcauguucgugagcgacacccccggcgagagaaaccccuacgagaacauccuguacaagaucugccugagcggcgacggcuggcccuacaucgccagcagaaccagcaucgugggcagagccugggagaacaccaccguggaccuggagagcgacggcaagccccacaaggugggcaccgccggcagcaacagaagccugcagagcgccggcuuccccaccggccugaccuacagccagcugaugacccugaaggacagcaugaugcagcuggaccccagcgccaagaccuggaucgacaucgagggcagacccgaggaccccguggagaucgcccuguaccagcccaugagcggcugcuacauccacuucuucagagagcccaccgaccugaagcaguucaagcaggacgccaaguacagccacggcaucgacguggccgaccuguuccccgcccagcccggccugaccagcgccgugaucgaggcccugcccagaaacauggugcugaccugccagggcagcgacgacaucaagagacugcuggacagccagggcagaagagacaucaagcugaucgacaucgcccugagcaaggccgacagcagaagauucgagaacgccgugugggaccagugcaaggaccugugccacaugcacaccggcguggugguggagaagaagaagagaggcggcaaggaggagaucaccccccacugcgcccugauggacugcaucauguacgacgccgccgugagcggcggccugaacauccccgugcugagagccgugcugcccagagacaugguguucagaaccagcagccccaagguggugcuguga

SEQ ID NO: 8933 - RNA, 1710 nt, Artificial Sequence
  derived and/or modified CDS sequence (opt4) from LASV(LASV737-NIG-2009;Clade II)__AIT17711__NP
augagcgccagcaaggaggugaagagcuuccuguggacccagagccugagaagagagcugagcggcuacugcagcaacaucaagcugcagguggugaaggacgcccaggcccugcugcacggccuggacuucagcgaggugagcaacgugcagagacugaugagaaagcagaagagagacgacagcgaccugaagagacugagagaccugaaccaggccgugaacaaccugguggagcugaagagcacccagcagaagagcauccugagagugggcacccugaccagcgacgaccugcugacccuggccgccgaccuggagaagcugaagagcaaggugaucagaaccgagagaccccugagcagcggcguguacaugggcaaccugagcacccagcagcuggagcagagaagagcccugcugaaccugaucggcauggugggcggcgcccagggcacccagcccggcagagacggcguggugagagugugggacgugaagaaccccgaccugcugaacaaccaguucggcaccaugcccagccugacccuggccugccugaccaagcagggccagguggaccugaacgacgccgugcuggcccugaccgaccugggccugaucuacaccgccaaguaccccaacagcagcgaccuggacagacugagccagagccaccccauccugaacaugguggacaccaagaagagcagccugaacaucagcggcuucaacuucagccugggcgccgccgugaaggccggcgccugcaugcuggacggcggcaacaugcuggagaccaucaaggugaccccccagaccauggacggcauccugaagagcauccugaaggugaagaagagccugggcauguucgugagcgacacccccggcgagagaaaccccuacgagaacauccuguacaagaucugccugagcggcgacggcuggcccuacaucgccagcagaaccagcaucgugggcagagccugggagaacaccaccguggaccuggagagcgacggcaagccccacaaggugggcaccgccggcagcagcaagagccugcagagcgccggcuuccccaccggccugaccuacagccagcugaugacccugaaggacagcaugaugcagcuggaccccagcgccaagaccuggaucgacaucgagggcagacccgaggaccccguggagaucgcccuguaccagcccaugagcggcugcuacauccacuucuucagagagcccaccgaccugaagcaguucaagcaggacgccaaguacagccacggcaucgacguggccgaccuguuccccgcccagcccggccugaccagcgccgugaucgaggcccugcccagaaacauggugcugaccugccagggcagcgacgacaucaagagacugcuggacagccagggcagaagagacaucaagcugaucgacaucgcccugagcaaggccgacagcagaagauucgagaacgccgugugggaccagugcaaggaccugugccacaugcacaccggcguggugguggagaagaagaagagaggcggcaaggaggagaucaccccccacugcgcccugauggacugcaucauguacgacgccgccgugagcggcggccugaacauccccgugcugagagccgugcugcccagagacaugguguucagaaccagcagccccaagguggugcuguga

SEQ ID NO: 8934 - RNA, 1710 nt, Artificial Sequence
  derived and/or modified CDS sequence (opt4) from LASV(LASV738-NIG-2009;Clade II)__AIT17713__NP
augagcgccagcaaggaggugaagagcuuccuguggacccagagccugagaagagagcugagcggcuacugcagcaacaucaagcugcagguggugaaggacgcccaggcccugcugcacggccuggacuucagcgaggugagcaacgugcagagacugaugagaaagcagaagagagacgacagcgaccugaagagacugagagaccugaaccaggccgugaacaaccugguggagcugaagagcacccagcagaagagcauccugagagugggcacccugaccagcgacgaccugcugacccuggccgccgaccuggagaagcugaagagcaaggugaucagaaccgagagaccccugagcagcggcguguacaugggcaaccugagcacccagcagcuggagcagagaagagcccugcugaacaugaucggcauggugggcggcgcccagggcacccagcccggcagagacggcguggugagagugugggacgugaagaaccccgaccugcugaacaaccaguucggcaccaugcccagccugacccuggccugccugaccaagcagggccagguggaccugaacgacgccgugcuggcccugaccgaccugggccugaucuacaccgccaaguaccccaacagcagcgaccuggacagacugagccagagccaccccauccugaacaugguggacaucaagaagagcagccugaacaucagcggcuacaacuucagccugggcgccgccgugaaggccggcgccugcaugcuggacggcggcaacaugcuggagaccaucaaggugaccccccagaccauggacggcauccugaagagcauccugaaggugaagaagagccugggcauguucgugagcgacacccccggcgagagaaaccccuacgagaacauccuguacaagaucugccugagcggcgacggcuggcccuacaucgccagcagaaccagcaucgugggcagagccugggagaacaccaccguggaccuggagagcgacggcaagccccagaaggugggcaccgccggcagcaacaagagccugcagagcgccggcuuccccaccggccugaccuacagccagcugaugacccugaaggacagcaugaugcagcuggaccccagcgccaagaccuggaucgacaucgagggcagacccgaggaccccguggagaucgcccuguaccagcccaugagcggcugcuacauccacuucuucagagagcccaccgaccugaagcaguucaagcaggacgccaaguacagccacggcaucgacguggccgaccuguuccccgcccagcccggccugaccagcgccgugaucgaggcccugcccagaaacauggugcugaccugccagggcagcgacgacaucaagagacugcuggacagccagggcagaagagacaucaagcugaucgacaucgcccugaacaaggccgacagcagaagauucgagaacgccgugugggaccagugcaaggaccugugccacaugcacaccggcguggugguggagaagaagaagagaggcggcaaggaggagaucaccccccacugcgcccugauggacugcaucauguacgacgccgccgugagcggcggccugaacauccccgugcugagagccgugcugcccagagacaugguguucagaaccagcagccccaagguggugcuguga

SEQ ID NO: 8935 - RNA, 1710 nt, Artificial Sequence
  derived and/or modified CDS sequence (opt4) from LASV(LASV966-NIG-2009;Clade II)__AIT17719__NP
augagcgccagcaaggaggugaagagcuuccuguggacccagagccugagaagagagcugagcggcuacugcagcagcaucaagcugcagguggugaaggacgcccaggcccugcugcacggccuggacuucagcgaggugagcaacgugcagagacugaugagaaagcagaagagagacgacagcgaccugaagagacugagagaccugaaccaggccgugaacaaccugguggagcugaagagcacccagcagaagagcauccugagagugggcacccugaccagcgacgaccugcugacccuggccgccgaccuggagaagcugaagagcaaggugaucagaaccgagagaccccugagcagcggcguguacaugggcaaccugagcacccagcagcuggagcagagaagagcccugcugaacaugaucggcauggugagcggcgcccagggcacccagcccggcagagacggcguggugagagugugggacgugaagaaccccgagcugcugaacaaccaguucggcaccaugcccagccugacccuggccugccugaccaagcagggccagguggaccugaacgacgccgugcuggcccugaccgaccugggccugaucuacaccgccaaguaccccaacagcagcgaccuggacagacugagccagagccaccccauccugaacaugguggacaccaagaagagcagccugaacaucagcggcuacaacuucagccugggcgccgccgugaaggccggcgccugcaugcuggacggcggcaacaugcuggagaccaucaaggugaccccccagaccauggacggcauccugaagagcauccugaaggugaagaagagccugggcauguucgugagcgacacccccggcgagagaaaccccuacgagaacauccuguacaagaucugccugagcggcgacggcuggcccuacaucgccagcagaaccagcaucgugggcagagccugggagaacaccaccguggaccuggagagcgacggcaagccccagaaggugggcaccgccggcagcaacaagagccugcagagcgccggcuuccccaccggccugaccuacagccagcugaugacccugaaggacagcaugaugcagcuggaccccagcgccaagaccuggaucgacaucgagggcagacccgaggaccccguggagaucgcccuguaccagcccaugagcggcugcuacauccacuucuucagagagcccaccgaccugaagcaguucaagcaggacgccaaguacagccacggcaucgacguggccgaccuguuccccgcccagcccggccugaccagcgccgugaucgaggcccugcccagaaacauggugcugaccugccagggcagcgacgacaucaagagacugcuggacagccagggcagaagagacaucaagcugaucgacaucagccugagcaaggccgacagcagaagauucgagaacgccgugugggaccagugcaaggaccugugccacaugcacaccggcguggugguggagaagaagaagagaggcggcaaggaggagaucaccccccacugcgcccugauggacugcaucauguacgacgccgccgugagcggcggccugaacauccccgugcugagagccgugcugcccagagacaugguguucagaaccagcagccccaagguggugcuguga

SEQ ID NO: 8936 - RNA, 1710 nt, Artificial Sequence
  derived and/or modified CDS sequence (opt4) from LASV(LASV969-NIG-2009;Clade II)__AIT17725__NP
augagcgccagcaaggaggugaagagcuuccuguggacccagagccugagaagagagcugagcggcuacugcagcaacaucaagcugcagguggugaaggacgcccaggcccugcugcacggccuggacuucagcgaggugagcaacgugcagagacugaugagaaagcagaagagagacgacagcgaccugaagagacugagagaccugaaccaggccgugaacaaccugguggagcugaagagcacccagcagaagagcauccugagagugggcacccugaccagcgacgaccugcugacccuggccgccgaccuggagaagcugaagagcaaggugaucagaaccgagagaccccugagcagcggcguguacaugggcaaccugagcgcccagcagcuggagcagagaagagcccugcugaacaugaucggcauggugggcggcgcccagggcacccagcugggcagagacggcguggugagagugugggacgugaagaaccccgaccugcugaacaaccaguucggcaccaugcccagccugacccuggccugccugaccaagcagggccagguggaccugaacgacgccgugcuggcccugaccgaccugggccugaucuacaccgccaaguaccccaacagcagcgaccuggacagacugagccagagccaccccauccugaacaugguggacaccaagaagagcagccugaacaucagcggcuacaacuucagccugggcgccgccgugaaggccggcgccugcaugcuggacggcggcaacaugcuggagaccaucaaggugaccccccagaccauggacggcauccugaagagcauccugaaggugaagaagagccugggcauguucgugagcgacacccccggcgagagaaaccccuacgagaacauccuguacaagaucugccugagcggcgacggcuggcccuacaucgccagcagaaccagcaucgugggcagagccugggagaacaccaccguggaccuggagagcgacggcaagccccagaaggugggcaccgccggcagcaacaagagccugcagagcgccggcuuccccaccggccugaccuacagccagcugaugacccugaaggacagcaugaugcagcuggaccccagcgccaagaccuggaucgacaucgagggcagacccgaggaccccguggagaucgcccuguaccagcccaugagcggcugcuacauccacuucuucagagagcccaccgaccugaagcaguucaagcaggacgccaaguacagccacggcaucgacguggccgaccuguuccccgcccagcccggccugaccagcgccgugaucgaggcccugcccagaaacauggugcugaccugccagggcagcgaggacaucaagagacugcuggacagccagggcagaagagacaucaagcugaucgacaucgcccugagcaaggccgacagcagaagauucgagaacgccgugugggaccagugcaaggaccugugccacaugcacaccggcguggugguggagaagaagaagagaggcggcaaggaggagaucaccccccacugcgcccugauggacugcaucauguacgacgccgccgugagcggcggccugaacauccccgugcugagagccgugcugcccagagacaugguguucagaaccagcagccccaagguggugcuguga

SEQ ID NO: 8937 - RNA, 1710 nt, Artificial Sequence
  derived and/or modified CDS sequence (opt4) from LASV(LASV971-NIG-2009;Clade II)__AIT17729__NP
augagcgccagcaaggaggugaagagcuuccuguggacccagagccugagaagagagcugagcggcuacugcagcagcaucaagcugcagguggugaaggacgcccaggcccugcugcacggccuggacuucagcgaggugagcaacgugcagagacugaugagaaagcagagaagagacgacagcgaccugaagagacugagagaccugaaccaggccgugaacaaccugguggagcugaagagcacccagcagaagagcauccugagagugggcacccugaccagcgacgaccugcugacccuggccgccgaccuggagaagcugaagagcaaggugaucagaaccgagagaccccugagcagcggcguguacaugggcaaccugagcacccagcagcuggagcagagaagagcccugcugaacaugaucggcauggugggcggcacccagggcacccagcccggcagagacggcguggugagagugugggacgugaagaaccccgaccugcugaacaaccaguucggcaccaugcccagccugacccuggccugccugaccaagcagggccagguggaccugaacgacgccgugcuggcccugaccgaccugggccugaucuacaccgccaaguaccccaacagcagcgaccuggacagacugagccagagccaccccauccugaacaugguggacaccaagaagagcagccugaacaucagcggcuacaacuucagccugggcgccgccgugaaggccggcgccugcaugcuggacggcggcaacaugcuggagaccaucaaggugaccccccagaccauggacggcauccugaagagcauccugaaggugaagagaagccugggcauguucgugagcgacacccccggcgagagaaaccccuacgagaacauccuguacaagaucugccugagcggcgacggcuggcccuacaucgccagcagaaccagcaucgugggcagagccugggagaacaccaccguggaccuggagagcgacggcaagccccagaaggugggcaccgccggcagcaacaagagccugcagagcgccggcuuccccaccggccugaccuacagccagcugaugacccugaaggacagcaugaugcagcuggaccccagcgccaagaccuggaucgacaucgagggcagacccgaggaccccguggagaucgcccuguaccagcccaugagcggcugcuacauccacuucuucagagagcccaccgaccugaagcaguucaagcaggacgccaaguacagccacggcaucgacguggccgaccuguuccccgcccagcccggccugaccagcgccgugaucgaggcccugcccagaaacauggugcugaccugccagggcagcgacgacaucaagagacugcuggacagccagggcagaagagacaucaagcugaucgacaucgcccugagcaaggccgacagcagaaaguucgagaacgccgugugggaccagugcaaggaccugugccacaugcacaccggcguggugguggagaagaagaagagaggcggcaaggaggagaucaccccccacugcgcccugauggacugcaucauguacgacgccgccgugagcggcggccugaacauccccgugcugagagccgugcugcccagagacaugguguucagaaccagcagccccaagguggugcuguga

SEQ ID NO: 8938 - RNA, 1710 nt, Artificial Sequence
  derived and/or modified CDS sequence (opt4) from LASV(LASV975-NIG-2009;Clade II)__AIT17733__NP
augagcgccagcaaggaggugaagagcuuccuguggacccagagccugagaagagagcugagcggcuacugcagcaacaucaagcugcagguggugaaggacgcccaggcccugcugcacggccuggacuucagcgaggugagcaacgugcagagacugaugagaaagcagaagagagacgacagcgaccugaagagacugagagaccugaaccaggccgugaacaaccugguggagcugaagagcacccagcagaagagcauccugagagugggcacccugaccagcgacgaccugcugauccuggccgccgaccuggagaagcugaagagcaaggugaucagaaccgagagaccccugagcagcggcguguacaugggcaaccugagcacccagcagcuggagcagagaagagcccugcugaacaugaucggcauggugggcggcgcccagggcacccagcccggcagagacggcguggugagagugugggacgugaagaaccccgaccugcugaacaaccaguucggcaccaugcccagccugacccuggccugccugaccaagcagggccagguggaccugaacgacgccgugcuggcccugaccgaccugggccugaucuacaccgccaaguaccccaacagcagcgaccuggacagacugagccagagccaccccauccugaacaugguggacaccaagaagagcagccugaacaucagcggcuacaacuucagccugggcgccgccgugaaggccggcgccugcaugcuggacggcggcaacaugcuggagaccaucaaggugaccccccagaccauggacggcauccugaagagcauccugaaggugaagaagagccugggcauguucgugagcgacacccccggcgagagaaaccccuacgagaacauccuguacaagaucugccugagcggcgacggcuggcccuacaucgccagcagaaccagcaucgugggcagagccugggagaacaccaccguggaccuggagagcgacggcaagccccagaaggugggcaccgccggcagcaacaagagccugcagagcgccggcuuccccaccggccugaccuacagccagcugaugacccugaaggacagcaugaugcagcuggaccccagcgccaagaccuggaucgacaucgagggcagacccgaggaccccguggagaucgcccuguaccagcccaugagcggcugcuacauccacuucuucagagagcccaccgaccugaagcaguucaagcaggacgccaaguacagccacggcaucgacguggccgaccuguuccccgcccagcccggccugaccagcgccgugaucgaggcccugcccagaaacauggugcugaccugccagggcagcgacgacaucaagagacugcuggacagccagggcagaagagacaucaagcugaucgacaucgcccugagcaaggccgacagcagaagauucgagaacgccgugugggaccagugcaaggaccugugccacaugcacaccggcguggugguggagaagaagaagagaggcggcaaggaggagaucaccccccacugcgcccugauggacugcaucauguacgacgccgccgugagcggcggccugaacauccccgugcugagagccgugcugcccagagacaugguguucagaaccagcagccccaagguggugcuguga

SEQ ID NO: 8939 - RNA, 1710 nt, Artificial Sequence
  derived and/or modified CDS sequence (opt4) from LASV(LASV978-NIG-2009;Clade II)__AIT17745__NP
augagcgccagcaaggagaucaagagcuuccuguggacccagagccugagaagagagcugagcggcuacugcagcagcaucaagcugcagguggugaaggacgcccaggcccugcugcacggccuggacuucagcgaggugagcaacgugcagagacugaugagaaagcagaagagagacgacagcgaccugaagagacugagagaccugaaccaggccgugaacaaccugguggagcugaagagcacccagcagaagagcauccugagagugggcacccugaccagcgacgaccugcugacccuggccgccgaccuggagaagcugaagagcaaggugaucagaaccgagagaccccugagcagcggcguguacaugggcaaccugagcacccagcagcuggagcagagaagagcccugcugaacaugaucggcauggugggcggcgcccagggcacccagcccggcagagacggcguggugagagugugggacgugaagaaccccgaccugcugaacaaccaguucggcaccaugcccagccugacccuggccugccugaccaagcagggccagguggaccugaacgacgccgugcuggcccugaccgaccugggccugaucuacaccgccaaguaccccaacagcagcgaccuggacagacugagccagagccaccccauccugaacaugguggacaccaagaagagcagccugaacaucagcggcuacaacuucagccugggcgccgccgugaaggccggcgccugcaugcuggacggcggcaacaugcuggagaccaucaaggugaccccccagaccauggacggcauccugaagagcauccugaaggugaagagaagccugggcauguucgugagcgacgcccccggcgagagaaaccccuacgagaacauccuguacaagaucugccugagcggcgacggcuggcccuacaucgccagcagaaccagcaucgugggcagagccugggagaacaccaccguggaccuggagagcgacggcaagccccagaaggugggcaccgccggcagcaacaagagccugcagagcgccggcuuccccaccggccugaccuacagccagcugaugacccugaaggacagcaugaugcagcuggaccccagcgccaagaccuggaucgacaucgagggcagacccgaggaccccguggagaucgcccuguaccagcccaugagcggcugcuacauccacuucuucagagagcccaccgaccugaagcaguucaagcaggacgccaaguacagccacggcaucgacguggccgaccuguuccccgcccagcccggccugaccagcgccgugaucgaggcccugcccagaaacauggugcugaccugccagggcagcgacgacaucaagagacugcuggacagccagggcagaagagacaucaagcugaucgacaucgcccugagcaagguggacagcagaagauucgagaacgccgugugggaccagugcaaggaccugugccacaugcacaccggcguggugguggagaagaagaagagaggcggcaaggaggagaucaccccccacugcgcccugauggacugcaucauguacgacgccgccgugagcggcggccugaacauccccgugcugagagccgugcugcccagagacaugguguucagaaccagcagccccaagguggugcuguga

SEQ ID NO: 8940 - RNA, 1710 nt, Artificial Sequence
  derived and/or modified CDS sequence (opt4) from LASV(LASV981-NIG-2009;Clade II)__AIT17753__NP
augagcgccagcaaggaggugaagagcuuccuguggacccagagccugagaagagagcugagcggcuacugcagcagcaucaagcugcagguggugaaggacgcccaggcccugcugcacggccuggacuucagcgaggugagcaacgugcagagacugaugagaaagcagaagagagacgacagcgaccugaagagacugagagaccugaaccaggccgugaacaaccugguggagcugaagagcacccagcagaagagcauccugagagugggcacccugaccagcgacgaccugcugacccuggccgccgaccuggagaagcugaagagcaaggugaucagaaccgagagaccccugagcagcggcguguacaugggcaaccugagcacccagcagcuggagcagagaagagcccugcugaacaugaucggcauggugggcggcgcccagggcacccagcccggcagagacggcguggugagagugugggacgugaagaaccccgaccugcugaacaaccaguucggcaccaugcccagccugacccuggccugccugaccaagcagggccagguggaccugaacgacgccgugcuggcccugaccgaccugggccugaucuacaccgccaaguaccccaacagcagcgaccuggacagacugagccagagccaccccauccugaacaugguggacaccaagaagagcagccugaacaucagcggcuacaacuucagccugggcgccgccgugaaggccggcgccugcaugcuggacggcggcaacaugcuggagaccaucaaggugaccccccagaccauggacggcauccugaagagcauccugaaggugaagagaagccugggcauguucgugagcgacacccccggcgagagaaaccccuacgagaacauccuguacaagaucugccugagcggcgacggcuggcccuacaucgccagcagaaccagcaucgugggcagagccugggagaacaccaccguggaccuggagagcgacggcaagccccagaaggugggcaccaccggcagcaacaagagccugcagagcgccggcuuccccaccggccugaccuacagccagcugaugacccugaaggacagcaugaugcagcuggaccccagcgccaagaccuggaucgacaucgagggcagacccgaggaccccguggagaucgcccuguaccagcccaugagcggcugcuacauccacuucuucagagagcccaccgaccugaagcaguucaagcaggacgccaaguacagccacggcaucgacguggccgaccuguuccccgcccagcccggccugaccagcgccgugaucgaggcccugcccagaaacauggugcugaccugccagggcagcgacgacaucaagagacugcuggacagccagggcagaagagacaucaagcugaucgacaucgcccugagcaaggccgacagcagaagauucgagaacgccgugugggaccagugcaaggaccugugccacaugcacaccggcguggugguggagaagaagaagagaggcggcaaggaggagaucaccccccacugcgcccugauggacugcaucauguacgacgccgccgugagcggcggccugaacauccccgugcugagagccgugcugcccagagacaugguguucagaaccagcagccccaagguggugcuguga

SEQ ID NO: 8941 - RNA, 1710 nt, Artificial Sequence
  derived and/or modified CDS sequence (opt4) from LASV(LASV988-NIG-2009;Clade II)__AIT17759__NP
augagcgccagcaaggaggugaagagcuuccuguggacccagagccugagaagagagcugagcggcuacugcagcaacaucaagcugcagguggugaaggacgcccaggcccugcugcacggccuggacuucagcgaggugagcaacgugcagagacugaugagaaagcagaagagagacgacagcgaccugaagagacugagagaccugaaccaggccgugaacaaccugguggagcugaagagcacccagcagaagagcauccugagagugggcacccugaccagcgacgaccugcugacccuggccgccgaccuggagaagcugaagagcaaggugaucagaaccgagagaccccugagcagcggcguguacaugggcaaccugaacacccagcagcuggagcagagaagagcccugcugaacaugaucggcauggccggcggcgcccagggcacccagcccggcagagacggcguggugagagugugggacgugaagaaccccgaccugcugaacaaccaguucggcaccaugcccagccugacccuggccugccugaccaagcagggccagguggaccugaacgacgccgugcuggcccugaccgaccugggccugaucuacaccgccaaguaccccaacagcagcgaccuggacagacugagccagagccaccccauccugaacaugguggacaccaagaagagcagccugaacaucagcggcuacaacuucagccugggcgccgccgugaaggccggcgccugcaugcuggacggcggcaacaugcuggagaccaucaaggugaccccccagaccauggacggcauccugaagagcauccugaaggugaagaagagccugggcauguucgugagcgacacccccggcgagagaaaccccuacgagaacauccuguacaagaucugccugagcggcgacggcuggcccuacaucgccagcagaaccagcaucgugggcagagccugggagaacaccaccguggaccuggagagcgacggcaagccccagaaggugggcaccgccggcagcaacaagagccugcagagcgccggcuuccccaccggccugaccuacagccagcugaugacccugaaggacagcaugaugcagcuggaccccagcgccaagaccuggaucgacaucgagggcagacccgaggaccccguggagaucgcccuguaccagcccaugagcggcugcuacauccacuucuucagagagcccaccgaccugaagcaguucaagcaggacgccaaguacagccacggcaucgacguggccgaccuguuccccgcccagcccggccugaccagcgccgugaucgaggcccugcccagaaacauggugcugaccugccagggcagcgacgacaucaagagacugcuggacagccagggcagaagagacaucaagcugaucgacaucgcccugagcaaggccgacagcagaagauucgagaacgccgugugggaccagugcaaggaccugugccacaugcacaccggcguggugguggagaagaagaagagaggcggcaaggaggagaucaccccccacugcgcccugauggacugcaucauguacgacgccgccgugagcggcggccugaacauccccgugcugagagccgugcugcccagagacaugguguucagaaccagcagccccaagguggugcuguga

SEQ ID NO: 8942 - RNA, 1710 nt, Artificial Sequence
  derived and/or modified CDS sequence (opt4) from LASV(LASV989-NIG-2009;Clade II)__AIT17763__NP
augagcgccagcaaggaggugaagagcuuccuguggacccagagccugagaagagagcugagcggcuacugcagcagcaucaagcugcagguggugaaggacgcccaggcccugcugcacggccuggacuucagcgaggugagcaacgugcagagacugaugagaaagcagaagagagacgacagcgaccugaagagacugagagaccugaaccaggccgugaacaaccugguggagcugaagagcacccagcagaagagcauccugagagugggcacccugaccagcgacgaccugcugacccuggccgccgaccuggagaagcugaagagcaaggugaucagaaccgagagaccccugagcagcggcguguacaugggcaaccugagcacccagcagcuggagcagagaagagcccugcugaacaugaucggcauggugggcggcgcccagggcacccagcccggcagagacggcguggugagagugugggacgugaagaaccccgaccugcugaacaaccaguucggcaccaugcccagccugacccuggccugccugaccaagcagggccagguggaccugaacgacgccgugcuggcccugaccgaccugggccugaucuacaccgccaaguaccccaacagcagcgaccuggacagacugagccagagccaccccauccugaacaugguggacaccaagaagagcagccugaacaucagcggcuacaacuucagccugggcgccgccgugaaggccggcgccugcaugcuggacggcggcaacaugcuggagaccaucaaggugaccccccagaccguggacggcauccugaagagcauccugaaggugaagagaagccugggcauguucgugagcgacacccccggcgagagaaaccccuacgagaacauccuguacaagaucugccugagcggcgacggcuggcccuacaucgccagcagaaccagcaucgugggcagagccugggagaacaccaccguggaccuggagagcgacgagaagccccagaaggugggcgccgccggcagcaacaagagccugcagagcgccggcuuccccaccggccugaccuacagccagcugaugacccugaaggacagcaugaugcagcuggaccccagcgccaagaccuggaucgacaucgagggcagacccgaggaccccguggagaucgcccuguaccagcccaugagcggcugcuacauccacuucuucagagagcccaccgaccugaagcaguucaagcaggacgccaaguacagccacggcaucgacgugaccgaccuguuccccgcccagcccggccugaccagcgccgugaucgaggcccugcccagaaacauggugcugaccugccagggcagcgacgacaucaagagacugcuggacagccagggcagaagagacaucaagcugaucgacaucgcccugagcaaggccgacagcagaagauucgagaacgccgugugggaccagugcaaggaccugugccacaugcacaccggcguggugguggagaagaagaagagaggcggcaaggaggagaucaccccccacugcgcccugauggacugcaucauguacgacgccgccgugagcggcggccugaacauccccgugcugagagccgugcugcccagagacaugguguucagaaccagcagccccaagguggugcuguga

SEQ ID NO: 8943 - RNA, 1710 nt, Artificial Sequence
  derived and/or modified CDS sequence (opt4) from LASV(LASV991-NIG-2009;Clade II)__AIT17771__NP
augagcgccagcaaggaggugaagagcuuccuguggacccagagccugagaagagagcugagcggcuacugcagcagcaucaagcugcagguggugaaggacgcccaggcccugcugcacggccuggacuucagcgaggugagcaacgugcagagacugaugagaaagcagaagagagacgacagcgaccugaagagacugagagaccugaaccaggccgugaacaaccugguggagcugaagagcacccagcagaagagcauccugagagugggcacccugaccagcgacgaccugcugacccuggccgccgaccuggagaagcugaagagcaaggugaucagaaccgagagaccccugagcagcggcguguacaugggcaaccugagcacccagcagcuggagcagagaagagcccugcugaacaugaucggcauggugggcggcgcccagggcacccagcccggcagagacggcguggugagagugugggacgugaagaaccccgaccugcugaacaaccaguucggcaccaugcccagccugacccuggccugccugaccaagcagggccagguggaccugaacgacgccgugcuggcccugaccgaccugggccugaucuacaccgccaaguaccccaacagcagcgaccuggacagacugagccagagccaccccauccugaacaugguggacaccaagaagagcagccugaacaucagcggcuacaacuucagccugggcgccgccgugaaggccggcgccugcaugcuggacggcggcaacaugcuggagaccaucaaggugaccccccagaccauggacggcauccugaagagcauccugaaggugaagagaagccugggcauguucgugagcgacacccccggcgagagaaaccccuacgagaacauccuguacaagaucugccugagcggcgacggcuggcccuacaucgccagcagaaccagcaucgugggcagagccugggagaacaccaccguggaccuggagagcgacggcaagacccagaaggugagcaccgccggcagcaacaagagccugcagagcgccggcuuccccaccggccugaccuacagccagcugaugacccugaaggacagcaugaugcagcuggaccccagcgccaagaccuggaucgacaucgagggcagacccgaggaccccguggagaucgcccuguaccagcccaugagcggcugcuacauccacuucuucagagagcccaccgaccugaagcaguucaagcaggacgccaaguacagccacggcaucgacgugaccgaccuguuccccgcccagcccggccugaccagcgccgugaucgaggcccugcccagaaacauggugcugaccugccagggcagcgacgacaucaagagacugcuggacagccagggcagaagagacaucaagcugaucgacaucgcccugagcaaggccgacagcagaagauucgagaacgccgugugggaccagugcaaggaccugugccacaugcacaccggcguggugguggagaagaagaagagaggcggcaaggaggagaucaccccccacugcgcccugauggacugcaucauguacgacgccgccgugagcggcggccugaacauccccgugcugagagccgugcugcccagagacaugguguucagaaccagcagccccaagguggugcuguga

SEQ ID NO: 8944 - RNA, 1710 nt, Artificial Sequence
  derived and/or modified CDS sequence (opt4) from LASV(LASV993-NIG-2009;Clade II)__AIT17779__NP
augagcgccagcaaggaggugaagagcuuccuguggacccagagccugagaagagagcugagcggcuacugcagcaacaucaagcugcagguggugaaggacgcccaggcccugcugcacggccuggacuucagcgaggugagcaacgugcagagacugaugagaaagcagaagagagacgacggcgaccugaagagacugagagaccugaaccaggccgugaacaaccugguggagcugaagagcacccagcagaagagcauccugagagugggcacccugaccagcgacgaccugcugacccuggccgccgaccuggagaagcugaagagcaaggugaucagaaccgagagaccccugagcagcggcguguacaugggcaaccugagcacccagcagcuggagcagagaagagcccugcugaacaugaucggcauggugggcggcgcccagggcacccagcccggcagagacggcguggugagagugugggacgugaagaaccccgaccugcugaacaaccaguucggcaccaugcccagccugacccuggccugccugaccaagcagggccagguggaccugaacgacgccgugcuggcccugaccgaccugggccugaucuacaccgccaaguaccccaacagcagcgaccuggacagacugagccagagccaccccauccugaacaugguggacaccaagaagagcagccugaacaucagcggcuacaacuucagccugggcgccgccgugaaggccggcgccugcaugcuggacggcggcaacaugcuggagaccaucaaggugaccccccagaccauggacggcauccugaagagcauccugaaggugaagaagagccugggcauguucgugagcgacacccccggcgagagaaaccccuacgagaacauccuguacaagaucugccugagcggcgacggcuggcccuacaucgccagcagaaccagcaucgugggcagagccugggagaacaccaccguggaccuggagagcgacggcaagccccagaaggugggcaccgccggcagcaacaagagccugcagagcgccggcuuccccaccggccugaccuacagccagcugaugacccugaaggacagcaugaugcagcuggaccccagcgccaagaccuggaucgacaucgagggcagacccgaggaccccguggagaucgcccuguaccagcccaugagcggcugcuacauccacuucuucagagagcccaccgaccugaagcaguucaagcaggacgccaaguacagccacggcaucgacgugaccgaccuguucagcgcccagcccggccugaccagcgccgugaucgaggcccugcccagaaacauggugcugaccugccagggcagcgacgacaucaagagacugcuggacagccagggcagaagagacaucaagcugaucgacaucgcccugagcaagaccgacagcagaagauucgagaacgccgugugggaccagugcaaggaccugugccacaugcacaccggcguggugguggagaagaagaagagaggcggcaaggaggagaucaccccccacugcgcccugauggacugcaucauguacgacgccgccgugagcggcggccugaacauccccgugcugagagccgugcugcccagagacaugguguucagaaccagcagccccaagguggugcuguga

SEQ ID NO: 8945 - RNA, 1710 nt, Artificial Sequence
  derived and/or modified CDS sequence (opt4) from LASV(Nig08-04;Clade II)__ADU56611__NP
augagcgccagcaaggaggugaagagcuuccuguggacccagagccugagaagagagcugagcggcuacugcagcaacaucaagcugcagguggugaaggacgcccaggcccugcugcacggccuggacuucagcgaggugagcaacgugcagagacugaugagaaagcagaagagagacgacggcgaccugaagagacugagagaccugaaccaggccgugaacaaccugguggagcugaagagcacccagcagaagagcgugcugagagugggcacccugaccagcgacgaccugcugacccuggccgccgaccuggagaagcugaagagcaaggugaucagaaccgagagaccccugagcagcggcguguacaugggcaaccugagcacccagcagcuggagcagagaaaggcccugcugagcaugaucggcauggugggcggcgcccagggcacccagcccggcagagacggcguggugagagugugggacgugaagaaccccgaccugcugaacaaccaguucggcaccaugcccagccugacccuggccugccugaccaagcagggccagguggaccugaacgacgccgugcuggcccugaccgaccugggccugaucuacaccgccaaguaccccaacagcagcgaccuggacagacugagccagagccaccccauccugaacaugguggacaccaagaagagcagccugaacaucagcggcuacaacuucagccugggcgccgccgugaaggccggcgccugcaugcuggacggcggcaacaugcuggagaccaucaaggugaccccccagaccauggacggcauccugaagagcauccugaaggugaagagaagccugggcauguucgugagcgacacccccggcgagagaaaccccuacgagaacauccuguacaagaucugccugagcggcgacggcuggcccuacaucgccagcagaaccagcaucgugggcagagccugggagaacaccaccguggaccuggagagcgacggcaagccccagaaggugggcaccgccggcagcaacaagagccugcagagcgccggcuuccccaccggccugaccuacagccagcugaugacccugaaggacagcaugaugcagcuggaccccagcgccaagaccuggaucgacaucgagggcagacccgaggaccccguggagaucgcccuguaccagcccaugagcggcugcuacauccacuucuucagagagcccaccgaccugaagcaguucaagcaggacgccaaguacagccacggcaucgacgugaccgaccuguucagcgcccagcccggccugaccagcgccgugaucgaggcccugcccagaaacauggugcugaccugccagggcagcgacgacaucaagaagcugcuggacagccagggcagaagagacaucaagcugaucgacaucagccugaacaaggccgacagcagaagauucgagaacgccgugugggaccagugcaaggaccugugccacaugcacaccggcguggugguggagaagaagaagagaggcggcaaggaggagaucaccccccacugcgcccugauggacugcaucauguucgacgccgccgugagcggcggccugaacauccccauccugagagccgugcugcccagagacaugguguucagaaccagcagccccaagguggugcuguga

SEQ ID NO: 8946 - RNA, 1710 nt, Artificial Sequence
  derived and/or modified CDS sequence (opt4) from LASV(Nig08-A47;Clade II)__ADU56631__NP
augagcgccagcaaggaggugaagagcuuccuguggacccagagccugagaagagagcugagcggcuacugcagcaacaucaagcugcagguggugaaggacgcccaggcccugcugcacggccuggacuucagcgaggugagcaacgugcagagacugaugagaaagcagaagagagacgacagcgaccugaagagacugagagaccugaaccaggccgugaacaaccugguggagcugaagagcacccagcagaagagcauccugagagugggcacccugaccagcgacgaccugcugacccuggccgccgaccuggagaagcugaagagcaaggugaucagaaccgagagaccccugagcagcggcguguacaugggcaaccugagcacccagcagcuggagcagagaagagcccugcugaacaugaucggcauggugggcggcgcccagggcacccagcccggcagagacggcguggugagagugugggacgugaagaaccccgaccugcugaacaaccaguucggcaccaugcccagccugacccuggccugccugaccaagcagggccagguggaccugaacgacgccgugcuggcccugaccgaccugggccugaucuacaccgccaaguaccccaacagcagcgaccuggacagacugagccagagccaccccauccugaacaugguggacaccaagaagagcagccugaacaucagcggcuacaacuucagccugggcgccgccgugaaggccggcgccugcaugcuggacggcggcaacaugcuggagaccaucaaggugaccccccagaccauggacggcauccugaagagcauccugaaggugaagaagagccugggcauguucgugagcgacacccccggcgagagaaaccccuacgagaacauccuguacaagaucugccugagcggcgacggcuggcccuacaucgccagcagaaccagcaucgugggcagagccugggagaacaccaccguggaccuggagagcgacggcaagccccagaaggugggcaccgccggcagcaacaagagccugcagagcgccggcuuccccaccggccugaccuacagccagcugaugacccugaaggacagcaugaugcagcuggaccccagcgccaagaccuggaucgacaucgagggcagacccgaggaccccguggagaucgcccuguaccagcccaugagcggcugcuacauccacuucuucagagagcccaccgaccugaagcaguucaagcaggacgccaaguacagccacggcaucgacgugaccgaccuguuccccgcccagcccggccugaccagcgccgugaucgaggcccugcccagaaacauggugcugaccugccagggcagcgacgacaucaagagacugcuggacagccagggcagaagagacaucaagcugaucgacaucgcccugagcaaggccgacagcagaagauucgagaacgccgugugggaccagugcaaggaccugugccacaugcacaccggcguggugguggagaagaagaagagaggcggcaaggaggagaucaccccccacugcgcccugauggacugcaucauguacgacgccgccgugagcggcggccugaacauccccgugcugagagccgugcugcccagagacaugguguucagaaccagcagccccaagguggugcuguga

SEQ ID NO: 8947 - RNA, 1713 nt, Artificial Sequence
  derived and/or modified CDS sequence (opt4) from LASV(GA391;Clade III)__AAA46284__NP
augagcgccagcaaggaggugagaagcugccuguggacccagagccugagaagagagcugagcggcuacugcagcaacaucaagcugcagguggugaaggacgcccaggcccugcugcacggccuggacuucagcgaggugagcaacgugcagagacugaugagaaagcagaagagagacgacggcgaccugaagagacugagagaccugaaccaggccgugaacaaccugguggagcugaagagcacccagcagaagagcgugcugagagugggcacccugagcagcgacgaccugcugauccuggccgccgaccuggagaagcugaagagcaaggugaccagaaccgagagaccccugagcagcggcguguacaugggcaaccugagcagccagcagcuggaccagagaagagcccugcugaacaugaucggcaugaccggcgugagcggcggcggcaagggcgccagcaacggcaucgugagagugugggacgugaagaacgccgagcugcugaacaaccaguucggcaccaugcccagccugacccuggccugccugaccaagcagggccagguggaccugaacgacgccgugcaggcccugaccgaccugggccugaucuacaccgccaaguaccccaacagcagcgaccuggacagacugagccagagccaccccauccugaacaugaucgacaccaagaagagcagccugaacaucagcggcuacaacuucagccugggcgccgccgugaaggccggcgccugcaugcuggacggcggcaacaugcuggagaccaucaaggugagcccccagaccauggacggcauccugaagagcauccugaaggugaagaagagccugggcauguucgugagcgacacccccggcgagagaaaccccuacgagaacauccuguacaagaucugccugagcggcgacggcuggagcuacaucgccagcagaaccagcaucgugggcagagccugggagaacaccgugguggaccuggagcaggacaacaagccccagaagaucggcaacggcggcagcaacaagagccugcagagcgccggcuucgccgccggccugaucuacagccagcugaugacccugaaggacuucaagugcuucaaccugauccccaacgccaagaccuggauggacaucgagggcagacccgaggaccccguggagaucgcccuguaccagcccagcagcggcugcuacgugcacuucuucagagagcccaccgaccugaagcaguucaagcaggacgccaaguacagccacggcagagacgugaccgaccuguucgccgcccagcccggccugaccagcgccgugaucgaggcccugcccagaaacauggugaucaccugccagggcagcgaggacaucagaaagcugcuggagagccagggcagaagagacaucaagcugaucgacaucacccugagcaaggccgacagcagaaaguucgagaacgccgugugggaccaguucaaggaccugugccacaugcacaccggcguggugguggagaagaagaagagaggcggcaaggaggagaucaccccccacugcgcccugauggacugcaucauguucgacgccgccgugagcggcggccuggacgccaaggugcugagaguggugcugcccagagacaugguguucagaaccagcacccccaagguggugcuguga

SEQ ID NO: 8948 - RNA, 1710 nt, Artificial Sequence
  derived and/or modified CDS sequence (opt4) from LASV(ISTH2121-NIG-2012;Clade III)__AIT17541__NP
augagcgccagcaaggaggugaagagcuuccuguggacccagagccugagaagagagcugagcggcuacugcagcaacaucaagcugcagguggugaaggacgcccaggcccugcugcacggccuggacuucagcgaggugagcaacgugcagagacugaugagaaagcagaagagagacgacggcgaccugaagagacugagagaccugaaccaggccgugaacaaccugguggagcugaagagcacccagcagaagagcgugcugagagugggcacccugagcagcgacgaccugcugacccuggccgccgaccuggagaagcugaagagcaaggugaucagaaccgagagaccccugagcagcggcguguacaugggcaaccugagcagccagcagcuggaccagagaagagcccugcugaacaugaucggcaugaccagcgacagacagggcgccagcaccggcagagacggcaucgugagagugugggacgugaagaacgccgagcugcugaacaaccaguucggcaccgugcccagccugacccuggccugccugaccaagcagggccagguggaccugaacgacgccgugcaggcccugaccgaccugggccugaucuacaccgccaaguaccccaacagcagcgaccuggacagacugagccagagccaccccauccugaacaugaucgacaccaagaagagcagccugaacaucagcggcuacaacuucagccugggcgccgccgugaaggccggcgccugcaugcuggacggcggcaacaugcuggagaccaucaaggugagcccccagaccauggacggcauccugaagagcauccugaaggugaagagaagccugggcauguucgugagcgacauccccggcgagagaaaccccuacgagaacauccuguacaagaucugccugagcggcgacggcuggcccuacaucgccagcagaaccagcaucaccggcagagccugggagaacaccaucguggaccuggagagcgacagcaagccccagaagcccggcaacagcggcagcaacagaagccugcagagcgccggcuuccccgccggccugaccuacagccagcugaugacccugaaggacagcaugcugcagcuggaccccaacgccaagaccuggauggacaucgagggcagacccgacgaccccguggagaucgcccuguaccagcccagcagcggcugcuacauccacuucuucagagagcccaccgaccugaagcaguucaagcaggacgccaaguacagccacggcaucgacgugggcgaccuguucgccgcccagcccggccugaccagcgccgugaucgaggcccugcccagaaacauggugaucaccugccagggcagcgaggacaucaagaagcugcuggagagccagggcagaaaggacaucaagcugguggacaucagcaugagcaagcccgacagcagaaaguucgagaacgccgugugggaccaguacaaggaccugugccacaugcacaccggcaucgugguggagaagaagaagagaggcggcaaggaggagaucaccccccacugcgcccugauggacugcaucauguucgacgccgccguggugggcggccuggacgccagaauccugagagccgugcugcccagagacaugguguucagaaccagcacccccaagguggugcuguga

SEQ ID NO: 8949 - RNA, 1710 nt, Artificial Sequence
  derived and/or modified CDS sequence (opt4) from LASV(Nig08-A18;Clade III)__ADU56615__NP
augagcgccagcaaggaggugaagagcuuccuguggacccagagccugagaagagagcugagcggcuacugcagcaacaucaagcugcagguggugaaggacgcccaggcccugcugcacggccuggacuucagcgaggugagcaacgugcagagacugaugagaaagcagaagagagacgacagcgaccugaagagacugagagaccugaaccaggccgugaacaaccugguggagcugaagagcacccagcagaagagcgugcugagaaucggcacccugagcagcgacgaccugcugauccuggccgccgaccuggagaagcugaagagcaagguggugagaaccgagagaccccugagcagcggcaucuacaugggcaaccugagcagccagcagcuggaccagagaaaggcccugcugaacaugaucggcaugaccggcggcaacggcggcagaaacgccaccagcgacggcaucgugagagugugggacgugaagaacgccgagcugcugaacaaccaguucggcaccaugcccagccugacccuggccugccugaccaagcagggccagguggaccugaacgacgccgugcaggcccugaccgaccugggccugaucuacaccgccaaguaccccaacagcagcgaccuggacagacuggcccagagccaccccauccugaacaugaucgacaccaagaagagcagccugaacaucagcggcuacaacuucagccugggcgccgccgugaaggccggcgccugcaugcuggacggcggcaacaugcuggagaccaucaaggugagcccccagaccauggacggcauccugaagagcauccugaaggugaagagaagccugggcauguucaucagcgacacccccggcgagagaaaccccuacgagaacauccuguacaagaucugccugagcggcgacggcuggcccuacaucgccagcagaaccagcaucgugggcagagccugggagaacaccgugguggaccuggagaccgacaacaagccccagaagaccggcaacggcggcagcaacaagagccugcagagcgccggcuucgccgccggccugaccuacagccagcugaugacccugaaggacagcaugcugcagcuggaccccaacgccaagaccuggauggacaucgagggcagacccgaggaccccguggagaucgcccuguaccagcccgugagcggcugcuacauccacuucuucagagagcccaccgaccugaagcaguucaagcaggacgccaaguacagccacggcaucgacgugaccgaccuguucgccgcccagcccggccugaccagcgccgugaucgaggcccugcccagaaacauggugaucaccugccagggcagcgaggacaucagaaagcugcuggagagccagggcagaagagacaucaagcugaucgacaucagccugagcaagguggacagcagaaaguucgagaacgccgugugggaccaguucaaggaccugugccacaugcacaccggcaucgugguggagaagaagaagagaggcggcaaggaggagaucaccccccacugcgcccugauggacugcaucauguucgacgccgccgugagcggcggcguggacgccaaggugcugagagccgugcugcccagagacaugguguucagaaccagcacccccaagguggugcuguga

SEQ ID NO: 8950 - RNA, 1710 nt, Artificial Sequence
  derived and/or modified CDS sequence (opt4) from LASV(Nig08-A19;Clade III)__ADU56619__NP
augagcgccagcaaggaggugaagagcuuccuguggacccagagccugagaagagagcugagcggcuacugcagcaacaucaagcugcagguggugaaggacgcccaggcccugcugcacggccuggacuucagcgaggugagcaacgugcagagacugaugagaaagcagaagagagacgacggcgaccugaagagacugagagaccugaaccaggccgugaacaaccugguggagcugaagagcacccagcagaagagcgugcugagagugggcacccugagcagcgacgaccugcuggugcuggccgccgaccuggagaagcugaagagcaagguggugagaaccgagagaccccugagcagcggcaucuacaugggcaaccugagcagccagcagcuggaccagagaaaggcccugcugaacaugaucggcaugaccggcggcaacggcggcagaaacaccaccagcgacggcaucgugagagugugggacgugaagaacgccgagcugcugaacaaccaguucggcaccaugcccagccugacccuggccugccugaccaagcagggccagguggaccugaacgacgccgugcaggcccugaccgaccugggccugaucuacaccgccaaguaccccaacagcagcgaccuggacagacuggcccagagccaccccauccugaacaugaucgacaccaagaagagcagccugaacaucagcggcuacaacuucagccugggcgccgccgugaaggccggcgccugcaugcuggacggcggcaacaugcuggagaccaucaaggugagcccccagaccauggacggcauccugaagagcauccugaaggugaagagaagccugggcauguucaucagcgacacccccggcgagagaaaccccuacgagaacauccuguacaagaucugccugagcggcgacggcuggcccuacaucgccagcagaaccagcaucgugggcagagccugggagaacaccgugguggaccuggagagcgacaacaagccccagaagaccggcaacggcggcagcaacaagagccugcagagcgccggcuucgccgccggccugaccuacagccagcugaugacccugaaggacagcaugcugcagcuggaccccaacgccaagaccuggauggacaucgagggcagacccgaggaccccguggagaucgcccuguaccagcccagcagcggcugcuacauccacuucuucagagagcccaccgaccugaagcaguucaagcaggacgccaaguacagccacggcaucgacgugaccgaccuguucgccgcccagcccggccugaccagcgccgugaucgaggcccugcccagaaacauggugaucaccugccagggcagcgaggacaucagaaagcugcuggagagccagggcagaagagacaucaagcugaucgacaucagccugagcaagguggacagcagaaaguucgagaacgccgugugggaccaguucaaggaccugugccacaugcacaccggcaucgugguggagaagaagaagagaggcggcaaggaggagaucaccccccacugcgcccugauggacugcaucauguucgacgccgccgugagcggcggcguggacgccaaggugcugagagccgugcugcccagagacaugguguucagaaccagcacccccaagguggugcuguga

SEQ ID NO: 8951 - RNA, 1710 nt, Artificial Sequence
  derived and/or modified CDS sequence (opt4) from LASV(ONM-299;Clade III)__ANH09735__NP
augagcgccagcaaggaggugaagagcuuccuguggacccagagccugagaagagagcugagcggcuacugcagcaacaucaagcugcagguggugaaggacgcccaggcccugcugcacggccuggacuucagcgaggugagcaacauccagagacugaugagaaaggagagaagagacgacagcgaccugaagagacugagagaccugaaccaggccgugaacaaccugguggagcugaagagcacccagcagaagagcgugcugagagugggcacccugagcagcgacgaccugcugacccuggccgccgaccuggagaagcugaagagcaaggugaucagaaccgagagaccccugagcagcggcguguacaugggcaaccugagcacccagcagcuggaccagagaagagcccugcugaacaugaucggcaugaccaacggcggccagggcgccaacgccggcagagacggcaucgugagagugugggacgugaagaacgccgagcugcugaacaaccaguucggcaccaugcccagccugacccuggccugccugaccaagcagggccagguggaccugaacgacgccgugcaggcccugaccgaccugggccugaucuacaccgccaaguaccccaacagcagcgaccuggacagacugagccagaaccaccccauccugaacaugaucgacaccaagaagagcagccugaacaucagcggcuacaacuucagccugggcgccgccgugaaggccggcgccugcaugcuggacggcggcaacaugcuggagaccaucaaggugagcccccagaccauggacggcauccugaagagcauccugaaggugaagagaagccugggcauguucgugagcgacacccccggcgagagaaaccccuacgagaacauccuguacaagaucugccugagcggcgacggcuggcccuacguggccagcagaaccagcaucaucggcagagccugggagaacaccgugguggaccuggagagcgacagcaagccccagagacccggcagcaaggagagcaacagaagccugcagaccgccggcuuccccgccggccugaccuacagccagcugaugacccugaaggacagcaugcugcagcuggaccccaacgccaagaccuggauggacaucgagggcagacccgacgaccccguggagaucgcccuguaccagcccagcagcggcugcuacauccacuucuucagagagcccaccgaccugaagcaguucaagcaggacgccaaguacagccacggcaucgacaucggcgaccuguucgccgcccagcccggccugaccagcgccgugaucgaggcccugcccagaaacauggugaucaccugccagggcagcgaggacaucaagagacugcuggagagccagggcagaaaggacaucagacugguggacaucagccugagcaaggccgacagcagaaaguucgagaacgccgugugggaccaguucaaggaccugugcaacaugcacaccggcguggugguggagaagaagaagaagggcggcaaggaggagaucaccccccacugcgcccugauggacugcaucauguucgacgccgccgugaugggcggccuggacgccaaggugcugagagccgugcugcccaaggacaugguguucagaaccagcacccccagaguggugcuguga

SEQ ID NO: 8952 - RNA, 1710 nt, Artificial Sequence
  derived and/or modified CDS sequence (opt4) from LASV(ONM-314;Clade III)__ANH09737__NP
augagcgccagcaaggaggugaagagcuuccuguggacccagagccugagaagagagcugagcggcuacugcagcaacaucaagcugcagguggugaaggacgcccaggcccugcugcacggccuggacuucagcgaggugagcaacauccagagacugaugagaaaggagagaagagacgacagcgaccugaagagacugagagaccugaaccaggccgugaacaaccugguggagcugaagagcacccagcagaagagcgugcugagagugggcacccugagcagcgacgaccugcugacccuggccgccgaccuggagaagcugaagagcaaggugaucagaaccgagagaccccugagcagcggcguguacaugggcaaccugagcacccagcagcuggaccagagaagagcccugcugaacaugaucggcaugaccaacggcggccagggcgccaacgccggcagagacggcaucgugagagugugggacgugaagaacgccgagcugcugaacaaccaguucggcaccaugcccagccugacccuggccugccugaccaagcagggccagguggaccugaacgacgccgugcaggcccugaccgaccugggccugaucuacaccgccaaguaccccaacagcagcgaccuggacagacugagccagaaccaccccauccugaacaugaucgacaccaagaagagcagccugaacaucagcggcuacaacuucagccugggcgccgccgugaaggccggcgccugcaugcuggacggcggcaacaugcuggagaccaucaaggugagcccccagaccauggacggcauccugaagagcauccugaaggugaagagaagccugggcauguucgugagcgacacccccggcgagagaaaccccuacgagaacauccuguacaagaucugccugagcggcgacggcuggcccuacguggccagcagaaccagcaucaucggcagagccugggagaacaccgugguggaccuggagagcgacagcaagccccagagacccggcagcaaggagagcaacagaagccugcagaccgccggcuuccccgccggccugaccuacagccagcugaugacccugaaggacagcaugcugcagcuggaccccaacgccaagaccuggauggacaucgagggcagacccgacgaccccguggagaucgcccuguaccagcccagcagcggcugcuacauccacuucuucagagagcccaccgaccugaagcaguucaagcaggacgccaaguacagccacggcaucgacaugggcgaccuguucgccgcccagcccggccugaccagcgccgugaucgaggcccugcccagaaacauggugaucaccugccagggcagcgaggacaucaagagacugcuggagagccagggcagaagagacaucagacugguggacaucagccugagcaaggccgacagcagaaaguucgagaacgccgugugggaccaguucaaggaccugugcaacaugcacaccggcguggugguggagaagaagaagaagggcggcaaggaggagaucaccccccacugcgcccugauggacugcaucauguucgacgccgccgugaugggcggccuggacgccaaggugcugagagccgugcugcccaaggacaugguguucagaaccagcacccccagaguggugcuguga

SEQ ID NO: 8953 - RNA, 1710 nt, Artificial Sequence
  derived and/or modified CDS sequence (opt4) from LASV(ONM-700;Clade III)__ANH09739__NP
augagcgccagcaaggaggugaagagcuuccuguggacccagagccugagaagagagcugagcggcuacugcagcaacaucaagcugcagguggugaaggacgcccaggcccugcugcacggccuggacuucagcgaggugagcaacauccagagacugaugagaaaggagagaagagacgacagcgaccugaagagacugagagaccugaaccaggccgugaacaaccugguggagcugaagagcacccagcagaagagcgugcugagagugggcacccugagcagcgacgaccugcugacccuggccgccgaccuggagaagcugaagagcaaggugaucagaaccgagagaccccugagcagcggcguguacaugggcaaccugagcacccagcagcuggaccagagaagagcccugcugaacaugaucggcaugaccagcggcggccagggcgccaacgccggcagagacggcaucgugagagugugggacgugaagaacgccgagcugcugaacaaccaguucggcaccaugcccagccugacccuggccugccugaccaagcagggccagguggaccugaacgacgccgugcaggcccugaccgaccugggccugaucuacaccgccaaguaccccaacagcagcgaccuggacagacugagccagaaccaccccauccugaacaugaucgacaccaagaagagcagccugaacaucagcggcuacaacuucagccugggcgccgccgugaaggccggcgccugcaugcuggacggcggcaacaugcuggagaccaucaaggugagcccccagaccauggacggcauccugaagagcauccugaaggugaagagaagccugggcauguucgugagcgacacccccggcgagagaaaccccuacgagaacauccuguacaagaucugccugagcggcgacggcuggcccuacguggccagcagaaccagcaucaucggcagagccugggagaacaccgugguggaccuggagagcgacagcaagccccagagacccggcagcaaggagagcaacagaagccugcagaccgccggcuuccccgccggccugaccuacagccagcugaugacccugaaggacagcaugcugcagcuggaccccaacgccaagaccuggauggacaucgagggcagacccgacgaccccguggagaucgcccuguaccagcccagcagcggcugcuacauccacuucuucagagagcccaccgaccugaagcaguucaagcaggacgccaaguacagccacggcaucgacaucggcgaccuguucgccgcccagcccggccugaccagcgccgugaucgaggcccugcccagaaacauggugaucaccugccagggcagcgaggacaucaagagacugcuggagagccagggcagaagagacaucagacugguggacaucagccugagcaaggccgacagcagaaaguucgagaacgccgugugggaccaguucaaggaccugugcaacaugcacaccggcguggugguggagaagaagaagaagggcggcaaggaggagaucaccccccacugcgcccugauggacugcaucauguucgacgccgccgugaugggcggccuggacgccaaggugcugagagccgugcugcccaaggacaugguguucagaaccagcacccccagaguggugcuguga

SEQ ID NO: 8954 - RNA, 1710 nt, Artificial Sequence
  derived and/or modified CDS sequence (opt4) from LASV(Weller;Clade III)__AAT49009__NP
augagcgccagcaaggaggugaagagcuuccuguggacccagagccugagaagagagcugagcggcuacugcagcaacaucaagcugcagguggugaaggacgcccaggcccugcugcacggccuggacuucagcgaggugagcaacgugcagagacugaugagaaagcagagaagagacgacggcgaccugaagagacugagagaccugaaccaggccgugaacaaccugguggagcugaagagcacccagcagaagagcgugcugagagugggcacccugaacagcgacgaccugcuggugcuggccgccgaccuggagaagcugaagagcaaggugaucagaaccgagagaccccugagcagcggcaucuacaugggcaaccugagcagccagcagcuggaccagagaagagcccugcugaacaugaucggcaugaccggcggcaacagaggcggcggcaccagcagcgacggcaucgugagagugugggacgugaagaacgccgagcugcugaacaaccaguucggcaccaugcccagccugacccuggccugccugaccaagcagggccagguggaccugaacgacgccgugcaggcccugaccgaccugggccugaucuacaccgccaaguaccccaacagcagcgaccuggacagacuggcccagagccaccccauccugaacaugaucgacaccaagaagagcagccugaacaucagcggcuacaacuucagccugggcgccgccgugaaggccggcgccugcaugcuggacggcggcaacaugcuggagaccaucaaggugagcccccagaccaucgacggcauccugaagaccauccugaaggugaagaagagccugggcauguucaucagcgacgugcccggcgagagaaaccccuacgagaacauccuguacaagaucugccugagcggcgacggcuggcccuacaucgccagcagaaccagcaucgugggcagagccugggagaacaccgugguggaccuggagagcgacaacaagccccagaagaccggcaacggcggcagcaacaagagccugcagagcgccggcuucgccgccggccugaccuacagccagcugaugacccugaaggacagcaugcugcagcuggaccccaacagcaagaccuggauggacaucgagggcagacccgaggaccccguggagaucgcccuguaccagcccaacagcggcugcuacauccacuucuucagagagcccaccgaccugaagcaguucaagcaggacgccaaguacagccacggcaucgacgugaccgaccuguucgccgcccagcccggccugaccagcgccgugaucgaggcccugcccagaaacauggugaucaccugccagggcagcgaggacaucagaaagcugcuggagagccagggcagaagagacaucaagcugaucgacaucagccugaacaaggccgacagcagaaaguucgagaacgccgugugggaccaguucaaggaccugugccacaugcacaccggcguggugguggagaagaagaagagaggcggcaaggaggagaucaccccccacugcgcccugauggacugcaucauguucgacgccgccgugagcggcggccuggacgccaaggugcugagagccgugcugcccagagacaugguguucagaaccagcacccccaagguggugcuguga

SEQ ID NO: 8955 - RNA, 1710 nt, Artificial Sequence
  derived and/or modified CDS sequence (opt4) from LASV(BA366;Clade IV)__ADI39452__NP
augagcgugagcaaggaggugaagagcuuccuguggacccagagccugagaagagagcugagcggcuacugcagcaacaucaagcugcagguggugaaggacgcccaggcccugcugcacggccuggacuucagcgaggugagcaacgugcagagacugaugagaaagcagagaagagacgacaacgaccugaagagacugagagaccugaaccaggccgugaacaaccugguggagcugaagagcacccagcagaagagcgugcugagagugggcacccugaccagcgacgaccugcugauccuggccgccgaccuggagaagcugaagaccaaggugaccagaaccgagagaccccugagcgccggcguguacaugggcaaccugagcagccagcagcuggagcagagaagagcccugcugaacaugaucggcaugaacggcggcaaccagggcgugcaggccggcagagacggcguggugagagugugggacgugaagaacgccgagcugcugaacaaccaguucggcaccaugcccagccugacccuggccugccugaccaagcagggccagguggaccugaacgacgccgugcaggcccugaccgaccugggccugaucuacaccgccaaguaccccaacaccagcgaccuggacagacuggcccagagccaccccauccugaacaugaucgacaccaagaagagcagccugaacaucagcggcuacaacuucagccugggcgccgccgugaaggccggcgccugcaugcuggacggcggcaacaugcuggagaccaucaaggugagcccccagaccauggacggcauccugaagagcauccugaaggugaagagaacccugggcauguucgugagcgacacccccggcgagagaaaccccuacgagaacauccuguacaagaucugccugagcggcgacggcuggcccuacaucgccagcagaaccagcaucaccggcagagccugggagaacaccaucguggaccuggagagcgacggcaagccccagaaggugggcaacaacggcagcaacaagagccugcagagcgccggcuucaccgccggccugaccuacagccagcugaugacccugaaggacgccaugcugcagcuggaccccaacgccaagaccuggauggacaucgagggcagacccgaggaccccguggagguggcccuguaccagcccagcagcggcugcuacauccacuucuucagagagcccaccgaccugaagcaguucaagcaggacgccaaguacagccacggcaucgacgugaccgaccuguucgccgcccagcccggccugaccagcgccgugaucgaggcccugcccagaaacauggugaucaccugccagggcagcgaggacgugagaaagcugcuggagagccagggcagaaaggacaucaagcugaucgacaucgcccugagcaaggccgacagcagaaaguacgagaacgccgugugggaccaguacaaggaccugugccacaugcacaccggcguggugguggagaagaagaagagaggcggcaaggaggagaugaccccccacugcgcccugauggacugcaucauguucgacgccgccgugagcggcggccugagcacccaggugcugagagccgugcugcccagagacaugguguucagaaccagcacccccaagguggugcuguga

SEQ ID NO: 8956 - RNA, 1710 nt, Artificial Sequence
  derived and/or modified CDS sequence (opt4) from LASV(G1180-SLE-2010;Clade IV)__AIT17169__NP
augagcgccagcaaggagaucaagagcuuccuguggacccagagccugagaagagagcugagcggcuacugcagcaacaucaagcugcagguggugaaggacgcccaggcccugcugcacggccuggacuucagcgaggugagcaacgugcagagacugaugagaaaggagagaagagacgacaacgaccugaagagacugagagaccugaaccaggccgugaacaaccugguggagcugaagagcacccagcagaagagcauccugagagugggcacccugaccagcgacgaccugcugauccuggccgccgaccuggagaagcugaagagcaaggugaucagaaccgagagaccccugagcgccggcguguacaugggcaaccugagcagccagcagcuggaccagagaagagcccugcugagcaugaucggcaugagcagcggcaaccagagagcccaggccggcagagacggcguggugagagugugggacgugaagaacguggagcugcugaacaaccaguucggcaccaugcccagccugacccuggccugccugaccaagcagggccagguggaccugaacgacgccgugcaggcccugaccgaccugggccugaucuacaccgccaaguaccccaacaccagcgaccuggacagacugacccagagccaccccauccugaacaugaucgacaccaagaagagcagccugaacaucagcggcuacaacuucagccugggcgccgccgugaaggccggcgccugcaugcuggacggcggcaacaugcuggagaccaucaaggugagcccccagaccauggacggcauccugaagagcauccugaaggugaagaaggcccugggcauguucaucagcgacacccccggcgagagaaaccccuacgagaacauccuguacaagaucugccugagcggcgacggcuggcccuacaucgccagcagaaccagcaucaccggcagagccugggagaacaccgugguggaccuggagagcgacggcaagccccagaaggccggcagcaacaacagcaacaagagccugcagagcgugggcuucaccgccggccugaccuacagccagcugaugacccugaaggacgccaugcugcagcuggaccccaacgccaagaccuggauggacaucgagggcagacccgaggaccccguggagaucgcccuguaccagcccagcagcggcugcuacauccacuucuucagagagcccaccgaccugaagcaguucaagcaggacgccaaguacagccacggcaucgacgugaccgaccuguucgccgcccagcccggccugaccagcgccgugaucgacgcccugcccagaaacauggugaucaccugccagggcagcgacgacaucagaaagcugcuggagagccagggcagaaaggacaucaagcugaucgacaucgcccugagcaagaccgacagcagaaaguacgagaacgccgugugggaccaguacaaggaccugugccacaugcacaccggcguggugguggagaagaagaagagaggcggcaaggaggagaucaccccccacugcgcccugauggacugcaucauguucgacgccgccgugagcggcggccugaacaccagcgugcugagagccgugcugcccagagacaugguguucagaaccagcacccccagaguggugcuguga

SEQ ID NO: 8957 - RNA, 1710 nt, Artificial Sequence
  derived and/or modified CDS sequence (opt4) from LASV(G1190-SLE-2010;Clade IV)__AIT17173__NP
augagcgccagcaaggagaucaagagcuuccuguggacccagagccugagaagagagcugagcggcuacugcagcaacaucaagcugcagguggugaaggacgcccaggcccugcugcacggccuggacuucagcgaggugagcaacgugcagagacugaugagaaaggagagaagagacgacaacgaccugaagagacugagagaccugaaccaggccgugaacaaccugguggagcugaagagcacccagcagaagagcauccugagagugggcacccugaccagcgacgaccugcugauccuggccgccgaccuggagaagcugaagagcaaggugaccagaaccgagagaccccugagcgccggcguguacaugggcaaccugagcagccagcagcuggaccagagaagagcccugcugaacaugaucggcaugagcggcagcaaccagggcgccagagccggcagagacggcguggugagagugugggacgugaagaacgccgagcugcugaacaaccaguucggcaccaugcccagccugacccuggccugccugaccaagcagggccagguggaccugaacgacgccgugcaggcccugaccgaccugggccugaucuacaccgccaaguaccccaacaccagcgaccuggacagacugacccagagccaccccauccugaacaugaucgacaccaagaagagcagccugaacaucagcggcuacaacuucagccugggcgccgccgugaaggccggcgccugcaugcuggacggcggcaacaugcuggagaccaucaaggugagcccccagaccauggacggcauccugaagagcauccugaaggugaagaaggcccugggcauguucaucagcgacgcccccggcgagagaaaccccuacgagaacauccuguacaagaucugccugagcggcgacggcuggcccuacaucgccagcagaaccagcaucaccggcagagccugggagaacaccgugguggaccuggagagcgacggcaagccccagaaggccggcagcaacggcagcaacaagagccugcagagcgccggcuucaccgccggccugaccuacagccagcugaugacccugaaggacgccaugcugcagcuggaccccaacgccaagaccuggauggacaucgagggcagacccgaggaccccguggagaucgcccuguaccagcccagcagcggcugcuacauccacuucuucagagagcccaccgaccugaagcaguucaagcaggacgccaaguacagccacggcaucgacgugaccgaccuguucgccgcccagcccggccugaccagcgccgugaucgacgcccugcccagaaacauggugaucaccugccagggcagcgacgacaucagaaagcuguucgagagccagggcagaaaggacaucaagcugaucgacaucgcccugagcaagaccgacagcagaaaguacgagaacgccgugugggaccaguacaaggaccugugccacaugcacaccggcaucgugguggagaagaagaagagaggcggcaaggaggagaucaccccccacugcgcccugauggacugcaucauguucgacgccgccgugagcggcggccugaacaccagcgugcugagagccgugcugcccagagacaugguguucagaaccagcacccccagaguggugcuguga

SEQ ID NO: 8958 - RNA, 1710 nt, Artificial Sequence
  derived and/or modified CDS sequence (opt4) from LASV(G1200-LIB-2010;Clade IV)__AIT17177__NP
augagcgccagcaaggagaucaagagcuuccuguggacccagagccugagaagagagcugagcggcuacugcagcaacaucaagcugcagguggugaaggacgcccaggcccugcugcacggccuggacuucagcgaggugagcaacgugcagagacugaugagaaagcagagaagagacgacaacgaccugaagagacugagagaccugaaccaggccgugaacaaccugguggagcugaagagcacccagcagaagagcgugcugagagugggcacccugaccagcgacgaccugcuggugcuggccgccgaccuggagaagcugaagagcaaggugaucagaaccgagagaccccugagcgccggcaucuacaugggcaaccugagcagccagcagcuggaccagagaagagcccugcugaacaugaucggcaugagcggcggcaaccagggcgccagagccggcagagacggcguggugagagugugggacgugaagaacgccgaccugcugaacaaccaguucggcaccaugcccagccugacccuggccugccugaccaagcagggccagguggaccugaacgacguggugcaggcccugaccgaccugggccugaucuacaccgccaaguaccccaacaccagcgaccuggacagacugacccagagccaccccauccugaagaugaucgacgccaacaagagcagccugaacaucagcggcuacaacuucagccugggcgccgccgugaaggccggcgccugcaugcuggacggcggcaacaugcuggagaccaucaaggugagcccccagaccauggacggcauccugaagagcauccugaaggugaagaagagccugggcauguucaucagcgacacccccggcgagagaaaccccuacgagaacauccuguacaagaucugccugagcggcgacggcuggcccuacaucgccagcagaaccagcaucaucggcagagccugggagaacaccgugguggaccuggagagcgacggcaagccccagaagaccggcagcaacaacagcagcaagagccugcagagcgccggcuucgccgccggccugaccuacagccagcugaugacccugaaggacgccaugcugcagcuggaccccaacgccaagaccuggauggacaucgagggcagacccgaggaccccguggagaucgcccuguaccagcccagcagcggcugcuacauccacuucuucagagagcccaccgaccugaagcaguucaagcaggacgccaaguacagccacggcaucgacgugaccgaccuguucgccgcccagcccggccugaccagcgccgugaucgaggcccugcccagaaacauggugaucaccugccagggcagcgacgacaucagaaagcugcuggagagccagggcagaaaggacaucaagcugaucgacaucgcccugagcaagaccgacagcagaaaguacgagaacgccgugugggaccaguacaaggaccugugccacaugcacaccggcaucgugguggagaagaagaagagaggcggcaaggaggagaucaccccccacugcgcccugauggacugcaucauguucgacgccgccgugagcggcggccugaacacccuggugcugagagccgugcugcccagagacaugguguucagaaccagcacccccaagguggugcuguga

SEQ ID NO: 8959 - RNA, 1710 nt, Artificial Sequence
  derived and/or modified CDS sequence (opt4) from LASV(G1442-SLE-2011;Clade IV)__AIT17181__NP
augagcgccagcaaggaggugaagagcuuccuguggacccagagccugagaagagagcugagcggcuacugcagcaacaucaagcugcagguggugaaggacgcccaggcccugcugcacggccuggacuucagcgaggugagcaacgugcagagacugaugagaaagcagagaagagacgacaacgaccugaagagacugagagaccugaaccaggccgugaacaaccugguggagcugaagagcacccagcagaagagcgugcugagagugggcacccugaccagcgacgaccugcuggugcuggccgccgaccuggagaagcugaagagcaaggugaucagaaccgagagaccccugagcgccggcguguacaugggcaaccugagcagccagcagcuggaccagagaagagcccugcugaacaugaucggcaugagcggcggcauccagggcaccagaaccggcagagacggcguggugagagugugggacgugaagaacgccgaccugcugaacaaccaguucggcaccaugcccagccugacccuggccugccugaccaagcagggccagguggaccugaacgacguggugcaggcccugaccgaccugggccugaucuacaccgccaaguaccccaacgccagcgaccuggacagacugacccagagccaccccauccugaacaugaucgacaccaagaagagcagccugaacaucagcggcuacaacuucagccugggcgccgccgugaaggccggcgccugcaugcuggacggcggcaacaugcuggagaccaucaaggugagcccccagaccauggacggcauccugaagagcauccugaaggugaagaagacccugggcauguucaucagcgacacccccggcgagagaaaccccuacgagaacauccuguacaagaucugccugagcggcgacggcuggcccuacaucgccagcagaaccagcaucaccggcagagccugggagaacaccgugguggaccuggagagcgacggcaagccccagaaggccggcagcaacaacagcaacaagagccugcagagcgccggcuucgccgccggccugaccuacagccagcugaugacccugaaggacgccaugcugcagcuggaccccaacgccaagaccuggauggacaucgagggcagacccgaggaccccguggagaucgcccuguaccagcccagcagcggcugcuacauccacuucuucagagagcccaccgaccugaagcaguucaagcaggacgccaaguacagccacggcaucgacgugaccgaccuguucgccgcccagcccggccugaccagcgccgugaucgaggcccugcccagaaacauggugaucaccugccagggcagcgacgacaucaagaagcugcuggagagccagggcagaaaggacaucaagcugaucgacaucgcccugagcaagaccgacagcagaaaguacgagaacgccgugugggaccaguacaaggaccugugccacaugcacaccggcguggugguggagaagaagaagagaggcggcaaggaggagaucaccccccacugcgcccugauggacugcaucauguucgacgccgccgugagcggcggccugaacacccuggugcugagagccgugcugcccagagacaugguguucagaaccagcacccccagaguggugcuguga

SEQ ID NO: 8960 - RNA, 1710 nt, Artificial Sequence
  derived and/or modified CDS sequence (opt4) from LASV(G1529-SLE-2011;Clade IV)__AIT17185__NP
augagcgccagcaaggagaucaagagcuuccuguggacccagagccugagaagagagcugagcggcuacugcagcaacaucaagcugcagguggugaaggacgcccaggcccugcugcacggccuggacuucagcgaggugagcaacgugcagagacugaugagaaagcagagaagagacgacggcgaccugaagagacugagagaccugaaccaggccgugaacaaccugguggagcugaagagcacccagcagaagagcgugcugagagugggcacccugaccagcgacgaccugcugauccuggccgccgaccuggagaagcugaagagcaaggugaccagaaccgagagaccccugagcgccggcguguacaugggcaaccugagcagccagcagcuggaccagagaagagcccugcugaacaugaucggcaugagcggcggcaacagaggcgccagaaccggcaaggacggcguggugagaaucugggacgugaagaacgccgaccugcugaacaaccaguucggcaccaugcccagccugacccuggccugccugaccaagcagggccagguggaccugaacgacguggugcaggcccugaccgaccugggccugaucuacaccgccaaguaccccaacaccagcgaccuggacagacugacccagagccaccccauccugaacaugaucgacaccaacaagagcagccugaacaucagcggcuacaacuucagccugggcgccgccgugaaggccggcgccugcaugcuggacggcggcaacaugcuggagaccaucaaggugagcccccagaccauggacggcauccugaagagcauccugaaggugaagaagagccugggcauguucaucagcgacacccccggcgagagaaaccccuacgagaacauccuguacaagaucugccugagcggcgacggcuggcccuacaucgccagcagaaccagcaucaccggcagagccugggagaacaccgugguggaccuggagagcgacgagaagccccagaaggccggcagcaacaacagcaacaagagccugcagagcaccggcuucaccgccggccugaccuacagccagcugaugacccugaaggacgccaugcugcagcuggaccccaacgccaagaccuggauggacaucgagggcagacccgaggaccccguggagaucgcccuguaccagcccagcagcggcugcuacauccacuucuucagagagcccaccgaccugaagcaguucaagcaggacgccaaguacagccacggcaucgacgugaccgaccuguucgccgcccagcccggccugaccagcgccgugaucgacacccugcccagaaacauggugaucaccugccagggcagcgacgacaucagaaagcugcuggagagccagggcagaaaggacaucaagcugaucgacaucgcccugagcaagaccgacagcagaaaguacgagaacgccgugugggaccaguacaaggaccugugccacaugcacaccggcguggugguggagaagaagaagagaggcggcaaggaggagaucaccccccacugcgcccugauggacugcaucauguucgacgccgccgugagcggcggccugaacgccagcgugcugagagccgugcugcccagagacaugguguucagaaccagcacccccagaguggugcuguga

SEQ ID NO: 8961 - RNA, 1710 nt, Artificial Sequence
  derived and/or modified CDS sequence (opt4) from LASV(G1618-SLE-2011;Clade IV)__AIT17189__NP
augagcgccagcaaggagaucaagagcuuccuguggacccagagccugagaagagagcugagcggcuacugcagcaacaucaagcugcagguggugaaggacgcccaggcccugcugcacggccuggacuucagcgaggugagcaacgugcagagacugaugagaaaggagagaagagacgacaacgaccugaagagacugagagaccugaaccaggccgugaacaaccugguggagcugaagagcacccagcagaagagcgugcugagagugggcacccugaccagcgacgaccugcugauccuggccgccgaccuggagaagcugaagagcaaggugaccagaaccgagagaccccugagcgccggcguguacaugggcaaccugagcagccagcagcuggaccagagaagagcccugcugagcaugaucggcaugagcggcggcaaccagggcgccagaaccggcagagacggcguggugagagugugggacgugaagaacgccgagcugcugaacaaccaguucggcaccaugcccagccugacccuggccugccugaccaagcagggccagguggaccugaacgacguggugcaggcccugaccgaccugggccugaucuacaccgccaaguaccccaacaccagcgaccuggacagacugacccagagccaccccauccugaacaugaucgacaccaagaagagcagccugaacaucagcggcuacaacuucagccugggcgccgccgugaaggccggcgccugcaugcuggacggcggcaacaugcuggagaccaucaaggugagcccccagaccaucgacggcauccugaagagcauccugaaggugaagaaggcccugggcauguucaucagcgacacccccggcgagagaaaccccuacgagaacauccuguacaagaucugccugagcggcgacggcuggcccuacaucgccagcagaaccagcaucaccggcagagccugggagaacaccgugguggaccuggagagcgacggcaagccccagaaggccggcagcaacaacagcaacaagagccugcagagcgccggcuucaccgccggccugaccuacagccagcugaugacccugaaggacgccaugcugcagcuggaccccaacgccaagaccuggauggacaucgagggcagacccgaggaccccguggagaucgcccuguaccagcccagcagcggcugcuacauccacuucuucagagagcccaccgaccugaagcaguucaagcaggacgccaaguacagccacggcaucgacgugaccgaccuguucgccgcccagcccggccugaccagcgccgugaucgacgcccugcccagaaacauggugaucaccugccagggcagcgacgacaucagaaagcugcuggagagccagggcagaaaggacaucaagcugaucgacaucgcccugagcaagaccgacagcagaaaguacgagaacgccgugugggaccaguacaaggaccugugccacaugcacaccggcguggugguggagaagaagaagagaggcggcaaggaggagaucaccccccacugcgcccugauggacugcaucauguucgacgccgccgugagcggcggccugaacagccuggugcugagagccgugcugcccagagacaugguguucagaaccagcacccccagaguggugcuguga

SEQ ID NO: 8962 - RNA, 1710 nt, Artificial Sequence
  derived and/or modified CDS sequence (opt4) from LASV(G1646-SLE-2011;Clade IV)__AIT17193__NP
augagcgccagcaaggagaucaagagcuuccuguggacccagagccugagaagagagcugagcggcuacugcagcaacaucaagcugcagguggugaaggacgcccaggcccugcugcacggccuggacuucagcgaggugagcaacgugcagagacugaugagaaaggagagaagagacgacaacgaccugaagagacugagagaccugaaccaggccgugaacaaccugguggagcugaagagcacccagcagaagagcgugcugagagugggcacccugaccagcgacgaccugcugauccuggccgccgaccuggagaagcugaagagcaaggugaccagaaccgagagaccccugagcgccggcguguacaugggcaaccugagcagccagcagcuggaccagagaagagcccugcugagcaugaucggcaugagcggcggcaaccagggcgccagaaccggcagagacggcguggugagagugugggacgugaagaacgccgagcugcugaacaaccaguucggcaccaugcccagccugacccuggccugccugaccaagcagggccagguggaccugaacgacgccgugcaggcccugaccgaccugggccugaucuacaccgccaaguaccccaacaccagcgaccuggacagacugacccagagccaccccauccugaacaugaucgacaccaagaagagcagccugaacaucagcggcuacaacuucagccugggcgccgccgugaaggccggcgccugcaugcuggacggcggcaacaugcuggagaccaucaaggugagcccccagaccauggacggcauccugaagagcauccugaaggugaagaaggcccugggcauguucaucagcgacacccccggcgagagaaaccccuacgagaacauccuguacaagaucugccugagcggcgacggcuggcccuacaucgccagcagaaccagcaucaccggcagagccugggagaacaccgugguggaccuggagagcgacggcaagccccagaaggccggcaacaacaacagcaacaagagccugcagagcgccggcuucaccgccggccugaccuacagccagcugaugacccugaaggacgccaugcugcagcuggaccccaacgccaagaccuggauggacaucgagggcagacccgaggaccccguggagaucgcccuguaccagcccagcagcggcugcuacauccacuucuucagagagcccaccgaccugaagcaguucaagcaggacgccaaguacagccacggcaucgacgugaccgaccuguucgccgcccagcccggccugaccagcgccgugaucgacgcccugcccagaaacauggugaucaccugccagggcagcgacgacaucagaaagcugcuggagagccagggcagaaaggacaucaagcugaucgacaucgcccugagcaagaccgacagcagaaaguacgagaacgccgugugggaccaguacaaggaccugugccacaugcacaccggcguggugguggagaagaagaagagaggcggcaaggaggagaucaccccccacugcgcccugauggacugcaucauguucgacgccgccgugagcggcggccugaacagccuggugcugagagccgugcugcccagagacaugguguucagaaccagcacccccagaguggugcuguga

SEQ ID NO: 8963 - RNA, 1710 nt, Artificial Sequence
  derived and/or modified CDS sequence (opt4) from LASV(G1647-SLE-2011;Clade IV)__AIT17197__NP
augagcgccagcaaggagaucaagagcuuccuguggacccagagccugagaagagagcugagcggcuacugcagcaacaucaagcugcagguggugaaggacgcccaggcccugcugcacggccuggacuucagcgaggugagcaacgugcagagacugaugagaaaggagagaagagacgacaacgaccugaagagacugagagaccugaaccaggccgugaacaaccugguggagcugaagagcacccagcagaagagcauccugagagugggcacccugaccagcgacgaccugcugauccuggccgccgaccuggagaagcugaagagcaaggugaucagaaccgagagaccccugagcgccggcguguacaugggcaaccugagccugcagcagcuggaccagagaagagcccugcugaacaugaucggcaugagcggcagcaaccagggcgugagagccggcagagacggcguggugagagugugggacgugaagaacgccgagcugcugaacaaccaguucggcaccaugcccagccugacccuggccugccugaccaagcagggccagguggaccugaacgacgccgugcaggcccugaccgaccugggccugaucuacaccgccaaguaccccaacaccagcgaccuggacagacugacccagagccaccccauccugaacaugaucgacaccaagaagagcagccugaacaucagcggcuacaacuucagccugggcgccgccgugaaggccggcgccugcaugcuggacggcggcaacaugcuggagaccaucaaggugagcccccagaccauggacggcauccugaagagcauccugaaggugaagaaggcccugggcauguucaucagcgacacccccggcgagagaaaccccuacgagaacauccuguacaagaucugccugagcggcgacggcuggcccuacaucgccagcagaaccagcaucaccggcagagccugggagaacaccgugguggaccuggagagcgacggcaagccccagaaggccggcagcaacggcagcaacaagagccugcagagcgccggcuucaccgccggccugaccuacagccagcugaugacccugaaggacgccaugcugcagcuggaccccaacgccaagaccuggauggacaucgagggcagacccgaggaccccguggagaucgcccuguaccagcccagcagcggcugcuacauccacuucuucagagagcccaccgaccugaagcaguucaagcaggacgccaaguacagccacggcaucgacgugaccgaccuguucgccgcccagcccggccugaccagcgccgugaucgacgcccugcccagaaacauggugaucaccugccagggcagcgacgacaucagaaagcugcuggagagccagggcagaaaggacaucaagcugaucgacaucgcccugagcaagaccgacagcagaaaguacgagaacgccgugugggaccaguacaaggaccugugccacaugcacaccggcaucgugguggagaagaagaagagaggcggcaaggaggagaucaccccccacugcgcccugauggacugcaucauguucgacgccgccgugagcggcggccugaacaccagcgugcugagagccgugcugcccagagacaugguguucagaaccagcacccccagaguggugcuguga

SEQ ID NO: 8964 - RNA, 1710 nt, Artificial Sequence
  derived and/or modified CDS sequence (opt4) from LASV(G1727-SLE-2011;Clade IV)__AIT17201__NP
augagcgccagcaaggagaucaagagcuuccuguggacccagagccugagaagagagcugagcggcuacugcagcaacaucaagcugcagguggugaaggacgcccaggcccugcugcacggccuggacuucagcgaggugagcaacgugcagagacugaugagaaaggagagaagagacgacaacgaccugaagagacugagagaccugaaccaggccgugaacaaccugguggagcugaagagcacccagcagaagagcauccugagagugggcacccugaccagcgacgaccugcugauccuggccgccgaccuggagaagcugaagagcaaggugaccagaaccgagagaccccugagcgccggcguguacaugggcaaccugagcagccagcagcuggaccagagaagagcccugcugaacaugaucggcaugagcggcagcaaccagggcgccagagccggcagagacggcguggugagagugugggacgugaagaacgccgagcugcugaacaaccaguucggcaccaugcccagccugacccuggccugccugaccaagcagggccagguggaccugaacgacgccgugcaggcccugaccgaccugggccugaucuacaccgccaaguaccccaacaccagcgaccuggacagacugacccagagccaccccauccugaacaugaucgacaccaagaagagcagccugaacaucagcggcuacaacuucagccugggcgccgccgugaaggccggcgccugcaugcuggacggcggcaacaugcuggagaccaucaaggugagcccccagaccauggacggcauccugaagagcauccugaaggugaagaaggcccugggcauguucaucagcgacgcccccggcgagagaaaccccuacgagaacauccuguacaagaucugccugagcggcgacggcuggcccuacaucgccagcagaaccagcaucaccggcagagccugggagaacaccgugguggaccuggagagcgacggcaagccccagaaggccggcagcaacggcagcaacaagagccugcagagcgccggcuucaccgccggccugaccuacagccagcugaugacccugaaggacgccaugcugcagcuggaccccaacgccaagaccuggauggacaucgagggcagacccgaggaccccguggagaucgcccuguaccagcccagcagcggcugcuacauccacuucuucagagagcccaccgaccugaagcaguucaagcaggacgccaaguacagccacggcaucgacgugaccgaccuguucgccgcccagcccggccugaccagcgccgugaucgacgcccugcccagaaacauggugaucaccugccagggcagcgacgacaucaagaagcuguucgagagccagggcagaaaggacaucaagcugaucgacaucgcccugagcaagaccgacagcagaaaguacgagaacgccgugugggaccaguacaaggaccugugccacaugcacaccggcaucgugguggagaagaagaagagaggcggcaaggaggagaucaccccccacugcgcccugauggacugcaucauguucgacgccgccgugagcggcggccugaacaccagcgugcugagagccgugcugcccagagacaugguguucagaaccagcacccccagaguggugcuguga

SEQ ID NO: 8965 - RNA, 1710 nt, Artificial Sequence
  derived and/or modified CDS sequence (opt4) from LASV(G1774-SLE-2011;Clade IV)__AIT17205__NP
augagcgccagcaaggagaucaagagcuuccuguggacccagagccugagaagagagcugagcggcuacugcagcaacaucaagcugcagguggugaaggacgcccaggcccugcugcacggccuggacuucagcgaggugagcaacgugcagagacugaugagaaaggagagaagagacgacaacgaccugaagagacugagagaccugaaccaggccgugaacaaccugguggagcugaagagcacccagcagaagagcauccugagagugggcacccugaccagcgacgaccugcugauccuggccgccgaccuggagaagcugaagagcaaggugaccagaaccgagagaccccugagcgccggcguguacaugggcaaccugagcagccagcagcuggaccagagaaaggcccugcugaacaugaucggcaugagcggcagcaaccagggcgccagaaucggcagagacggcguggugagagugugggacgugaagaacgccgagcugcugaacaaccaguucggcaccaugcccagccugacccuggccugccugaccaagcagggccagguggaccugaacgacgccgugcaggcccugaccgaccugggccugaucuacaccgccaaguaccccaacaccagcgaccuggacagacugacccagagccaccccauccugaacaugaucgacaccaagaagagcagccugaacaucagcggcuacaacuucagccugggcgccgccgugaaggccggcgccugcaugcuggacggcggcaacaugcuggagaccaucaaggugagcccccagaccauggacggcauccugaagagcauccugaaggugaagaaggcccugggcauguucaucagcgacacccccggcgagagaaaccccuacgagaacauccuguacaagaucugccugagcggcgacggcuggcccuacaucgccagcagaaccagcaucaccggcagagccugggagaacaccgugguggaccuggagagcgacggcaagccccagaaggccggcagcaacagcagcaacaagagccugcagagcgccggccugaccgccggccugaccuacagccagcugaugacccugaaggacgccaugcugcagcuggaccccaacgccaagaccuggauggacaucgagggcagacccgaggaccccguggagaucgcccuguaccagcccagcagcggcugcuacauccacuucuucagagagcccaccgaccugaagcaguucaagcaggacgccaaguacagccacggcaucgacgugaccgaccuguucgccgcccagcccggccugaccagcgccgugaucgacgcccugcccagaaaccuggugaucaccugccagggcagcgacgacaucagaaagcugcuggagagccagggcagaaaggacaucaagcugaucgacaucgcccugagcaagaccgacagcagaaaguacgagaacgccgugugggaccaguacaaggaccugugccacaugcacaccggcaucgugguggagaagaagaagagaggcggcaaggaggagaucaccccccacugcgcccugauggacugcaucauguucgacgccgccgugagcggcggccugaacgccagcgugcugagagccgugcugcccagagacaugguguucagaaccagcacccccagaguggugcuguga

SEQ ID NO: 8966 - RNA, 1710 nt, Artificial Sequence
  derived and/or modified CDS sequence (opt4) from LASV(G1792-SLE-2011;Clade IV)__AIT17209__NP
augagcgccagcaaggagaucaagagcuuccuguggacccagagccugagaagagagcugagcggcuacugcagcaacaucaagcugcagguggugaaggacgcccaggcccugcugcacggccuggacuucagcgaggugagcaacgugcagagacugaugagaaaggagagaagagacgacaacgaccugaagagacugagagaccugaaccaggccgugaacaaccugguggagcugaagagcacccagcagaagagcauccugagagugggcacccugaccagcgacgaccugcugauccuggccgccgaccuggagaagcugaagagcaaggugaccagaaccgagagaccccugagcgccggcguguacaugggcaaccugagcagccagcagcuggaccagagaagagcccugcugagcaugaucggcaugagcggcggcaaccagggcgccagagccggcagagacggcguggugagagugugggacgugaagaacgccgagcugcugaacaaccaguucggcaccaugcccagccugacccuggccugccugaccaagcagggccagguggaccugaacgacguggugcaggcccugaccgaccugggccugaucuacaccgccaaguaccccaacaccagcgaccuggacagacugacccagagccaccccauccugaacaugaucgacaccaagaagagcagccugaacaucagcggcuacaacuucagccugggcgccgccgugaaggccggcgccugcaugcuggacggcggcaacaugcuggagaccaucaaggugagcccccagaccauggacggcauccugaagagcauccugaaggugaagaaggcccugggcauguucaucagcgacacccccggcgagagaaaccccuacgagaacauccuguacaagaucugccugagcggcgacggcuggcccuacaucgccagcagaaccagcaucaccggcagagccugggagaacaccgugguggaccuggagagcgacggcaagcugcagaagaccggcagcaacaacagcaacaagagccugcagagcgccggcuucaccgccggccugaccuacagccagcugaugacccugaaggacgccaugcugcagcuggaccccaacgccaagaucuggauggacaucgagggcagacccgaggaccccguggagaucgcccuguaccagcccagcagcggcugcuacauccacuucuucagagagcccaccgaccugaagcaguucaagcaggacgccaaguacagccacggcaucgacgugaccgaccuguucgccgcccagcccggccugaccagcgccgugaucgacgcccugcccagaaacauggugaucaccugccagggcagcgacgacaucagaaagcugcuggagagccagggcagaaaggacaucaagcugaucgacaucgcccugaacaagaccgacagcagaaaguacgagaacgccgugugggaccaguacaaggaccugugccacaugcacaccggcguggugguggagaagaagaagaagggcggcaaggaggagaucaccccccacugcgcccugauggacugcaucauguucgacgccgccgugagcggcggccugaacaccagcgugcugagagccgugcugcccagagacaugguguucagaaccagcacccccagaguggugcuguga

SEQ ID NO: 8967 - RNA, 1710 nt, Artificial Sequence
  derived and/or modified CDS sequence (opt4) from LASV(G1897-SLE-2011;Clade IV)__AIT17211__NP
augagcgccagcaaggagaucaagagcuuccuguggacccagagccugagaagagagcugagcggcuacugcagcaacaucaagcugcagguggugaaggacgcccaggcccugcugcacggccuggacuucagcgaggugagcaacgugcagagacugaugagaaaggagagaagagacgacaacgaccugaagagacugagagaccugaaccaggccgugaacaaccugguggagcugaagagcacccagcagaagagcauccugagagugggcacccugaccagcgacgaccugcugauccuggccgccgaccuggagaagcugaagagcaaggugaccagaaccgagagaccccugagcgccggcguguacaugggcaaccugagcagccagcagcuggaccagagaagagcccugcugaacaugaucggcaugagcggcggcaaccagggcgcccaggccggcagagacggcguggugagagugugggacgugaagaacgccgagcugcugaacaaccaguucggcaccaugcccagccugacccuggccugccugaccaagcagggccagguggaccugaacgacgccgugcaggcccugaccgaccugggccugaucuacaccgccaaguaccccaacaccagcgaccuggacagacugacccagagccaccccauccugaacaugaucgacaccaagaagagcagccugaacaucagcggcuacaacuucagccugggcgccgccgugaaggccggcgccugcaugcuggacggcggcaacaugcuggagaccaucaaggugagcccccagaccauggacggcauccugaagagcauccugaaggugaagaaggcccugggcauguucaucagcgacacccccggcgagagaaaccccuacgagaacauccuguacaagaucugccugagcggcgacggcuggcccuacaucgccagcagaaccagcaucaccggcagagccugggagaacaccgugguggaccuggagagcgacggcaagccccagaaggccaacagcaacagcagcaacaagagccugcagagcgccggcuucaccgccggccugaccuacagccagcugaugacccugaaggacgccaugcugcagcuggaccccaacgccaagaccuggauggacaucgagggcagacccgaggaccccguggagaucgcccuguaccagcccagcagcggcugcuacauccacuucuucagagagcccaccgaccugaagcaguucaagcaggacgccaaguacagccacggcaucgacgugaccgaccuguucgccgcccagcccggccugaccagcgccgugaucgacgcccugcccagaaacauggugaucaccugccagggcagcgacgacaucagaaagcugcuggagagccagggcagaaaggacaucaagcugaucgacaucgcccugagcaagaccgacagcagaaaguacgagaacgccgugugggaccaguacaaggaccugugccacaugcacaccggcaucgugguggagaagaagaagagaggcggcaaggaggagaucaccccccacugcgcccugauggacugcaucauguucgacgccgccgugagcggcggccugaacaccagcgugcugagagccgugcugcccagagacaugguguucagaaccagcacccccagaguggugcuguga

SEQ ID NO: 8968 - RNA, 1710 nt, Artificial Sequence
  derived and/or modified CDS sequence (opt4) from LASV(G1932-SLE-2011;Clade IV)__AIT17213__NP
augagcgccagcaaggagaucaagagcuuccuguggacccagagccugagaagagagcuggccggcuacugcagcaacaucaagcugcagguggugaaggacgcccaggcccugcugcacggccuggacuucagcgaggugagcaacgugcagagacugaugagaaaggagagaagagacgacaacgaccugaagagacugagagaccugaaccaggccgugaacaaccugguggagcugaagagcacccagcagaagagcgugcugagagugggcacccugaccagcgacgaccugcugauccuggccgccgaccuggagaagcugaagagcaaggugaucagaaccgagagaccccugagcgccggcguguacaugggcaaccugagcagccagcagcuggaccagagaagagcccugcugaacaugaucggcaugagcggcagcaaccagggcgugagagccggcagagacggcguggugagagugugggacgugaagaacgccgagcugcugaacaaccaguucggcaccaugcccagccugacccuggccugccugaccaagcagggccagguggaccugaacgacgccgugcaggcccugaccgaccugggccugaucuacaccgccaaguaccccaacaccagcgaccuggacagacugacccagagccaccccauccugaacaugaucgacaccaagaagagcagccugaacaucagcggcuacaacuucagccugggcgccgccgugaaggccggcgccugcaugcuggacggcggcaacaugcuggagaccaucaaggugagcccccagaccauggacggcauccugaagagcauccugaaggugaagaaggcccugggcauguucaucagcgacacccccggcgagagaaaccccuacgagaacauccuguacaagaucugccugagcggcgacggcuggcccuacaucgccagcagaaccagcaucaccggcagagccugggagaacaccgugguggaccuggagagcgacggcaagccccagaaggccggcagcaacggcagcaacaagagccugcagagcgccggcuucaccgccggccugaccuacagccagcugaugacccugaaggacgccaugcugcagcuggaccccaacgccaagaccuggauggacaucgagggcagacccgaggaccccguggagaucgcccuguaccagcccagcagcggcugcuacauccacuucuucagagagcccaccgaccugaagcaguucaagcaggacgccaaguacagccacggcaucgacgugaccgaccuguucgccgcccagcccggccugaccagcgccgugaucgacgcccugcccagaaacauggugaucaccugccagggcagcgacgacaucagaaagcugcuggagagccagggcagaaaggacaucaagcugaucgacaucgcccugagcaagaccgacagcagaaaguacgagaacgccgugugggaccaguacaaggaccugugccacaugcacaccggcaucgugguggagaagaagaagagaggcggcaaggaggagaucaccccccacugcgcccugauggacugcaucauguucgacgccgccgugagcggcggccugaacaccagcgugcugagagccgugcugcccagagacaugguguucagaaccagcacccccagaguggugcuguga

SEQ ID NO: 8969 - RNA, 1710 nt, Artificial Sequence
  derived and/or modified CDS sequence (opt4) from LASV(G1959-SLE-2011;Clade IV)__AIT17217__NP
augagcgccagcaaggagaucaagagcuuccuguggacccagagccugagaagagagcugagcggcuacugcagcaacaucaagcugcagguggugaaggacgcccaggcccugcugcacggccuggacuucagcgaggugagcaacgugcagagacugaugagaaaggagagaagagacgacaacgaccugaagagacugagagaccugaaccaggccgugaacaaccugguggagcugaagagcacccagcagaagagcauccugagagugggcacccugaccagcgacgaccugcugauccuggccgccgaccuggagaagcugaagagcaaggugaccagaaccgagagaccccugagcgccggcguguacaugggcaaccugagcagccagcagcuggaccagagaagagcccugcugagcaugaucggcaugagcagcggcgugcagggcgccagagccggcagagacggcguggugagagugugggacgugaagaacgccgagcugcugaacaaccaguucggcaccaugcccagccugacccuggccugccugaccaagcagggccagguggaccugaacgacguggugcaggcccugaccgaccugggccugaucuacaccgccaaguaccccaacaccagcgaccuggacagacugacccagagccaccccauccugaacaugaucgacaccaagaagagcagccugaacaucagcggcuacaacuucagccugggcgccgccgugaaggccggcgccugcaugcuggacggcggcaacaugcuggagaccaucaaggugagcccccagaccauggacggcauccugaagagcauccugaaggugaagaaggcccugggcauguucaucagcgagacccccggcgagagaaaccccuacgagaacauccuguacaagaucugccugagcggcgacggcuggcccuacaucgccagcagaaccagcaucaccggcagagccugggagaacaccgugguggaccuggagagcgacggcaagccccagaaggccggcagcaacaacagcaacaagagccugcagagcaccggcuucgccgccggccugaccuacagccagcugaugacccugaaggacgccaugcugcagcuggaccccaacgccaagaccuggauggacaucgagggcagacccgaggaccccguggagguggcccuguaccagcccagcagcggcugcuacauccacuucuucagagagcccaccgaccugaagcaguucaagcaggacgccaaguacagccacggcaucgacgugaccgaccuguucgccgcccagcccggccugaccagcgccgugaucgacgcccugcccagaaacauggugaucaccugccagggcagcgacgacaucaagaagcugcuggagagccagggcagaaaggacaucaagcugaucgacaucgcccugagcaagaccgacagcagaaaguacgagaacgccgugugggaccaguacaaggaccugugccacaugcacaccggcguggugguggagaagaagaagagaggcggcaaggaggagaucaccccccacugcgcccugauggacugcaucauguucgacgccgccgugagcggcggccugaacaccagcgugcugagagccgugcugcccagagacaugguguucagaaccagcacccccagaguggugcuguga

SEQ ID NO: 8970 - RNA, 1710 nt, Artificial Sequence
  derived and/or modified CDS sequence (opt4) from LASV(G2141-SLE-2011;Clade IV)__AIT17225__NP
augagcgccagcaaggagaucaagagcuuccuguggacccagagccugagaagagagcugagcggcuacugcagcaacaucaagcugcagguggugaaggacgcccaggcccugcugcacggccuggacuucagcgaggugagcaacgugcagagacugaugagaaagcagagaagagacgacaacgaccugaagagacugagagaccugaaccaggccgugaacaaccugguggagcugaagagcacccagcagaagagcgugcugagagugggcacccugaccagcgacgaccugcuggugcuggccgccgaccuggagaagcugaagagcaaggugaccagaaccgagagaccccugagcgccggcguguacaugggcaaccugagcagccagcagcuggaccagagaagagcccugcugaacaugaucggcaugagcggcggcaaccagggcgccagagccggcaacgacggcguggugagagugugggacgugaagaacgccgaccugcugaacaaccaguucggcaccaugcccagccugacccuggccugccugaccaagcagggccagguggaccugaacgacguggugcaggcccugaccgaccugggccugaucuacaccgccaaguaccccaacaccagcgaccuggacagacugacccagagccaccccauccugaacaugaucgacaccaagaagagcagccugaacaucagcggcuacaacuucagccugggcgccgccgugaaggccggcgccugcaugcuggacggcggcaacaugcuggagaccaucaaggugagcccccagaccauggacggcauccugaagagcauccugaaggugaagaaggcccugggcauguucaucagcgacacccccggcgagagaaaccccuacgagaacauccuguacaagaucugccugagcggcgacggcuggcccuacaucgccagcagaaccagcaucaccggcagagccugggagaacaccgugguggaccuggagagcgacggcaagccccagaagaccggcaacaacagcagcaacaagagccugcagagcgccggcuucaccgccggccugaccuacagccagcugaugacccugaaggacgccaugcugcagcuggaccccaacgccaagaccuggauggacaucgagggcagacccgaggaccccguggagguggcccuguaccagcccagcagcggcugcuacauccacuucuucagagagcccaccgaccugaagcaguucaagcaggacgccaaguacagccacggcaucgacgugaccgaccuguucgccgcccagcccggccugaccagcgccgugaucgaggcccugcccagaaacauggugaucaccugccagggcagcgacgacaucagaaagcugcuggagagccagggcagaaaggacaucaagcugaucgacaucgcccugagcaagaucgacagcagaaaguacgagaacgccgugugggaccaguacaaggaccugugccacaugcacaccggcguggugguggagaagaagaagagaggcggcaaggaggagaucaccccccacugcgcccugauggacugcaucauguucgacgccgccgugagcggcggccugaacacccuggugcugagagccgugcugcccagagacaugguguucagaaccagcacccccaagguggugcuguga

SEQ ID NO: 8971 - RNA, 1710 nt, Artificial Sequence
  derived and/or modified CDS sequence (opt4) from LASV(G2147-SLE-2011;Clade IV)__AIT17229__NP
augagcgccagcaaggagaucaagagcuuccuguggacccagagccugagaagagagcugagcggcuacugcagcaacaucaagcugcagguggugaaggacgcccaggcccugcugcacggccuggacuucagcgaggugagcaacgugcagagacugaugagaaaggagagaagagacgacaacgaccugaagagacugagagaccugaaccaggccgugaacaaccugguggagcugaagagcacccagcagaagagcgugcugagagugggcacccugaccagcgacgaccugcugauccuggccgccgaccuggagaagcugaagagcaaggugaucagaaccgagagaccccugagcgccggcguguacaugggcaaccugagcagccagcagcuggaccagagaagagcccugcugagcaugaucggcaugagcggcggcaaccagggcaccagagccggcagagacggcguggugagagugugggacgugaagaacgccgagcugcugaacaaccaguucggcaccaugcccagccugacccuggccugccugaccaagcagggccagguggaccugaacgacgccgugcaggcccugaccgaccugggccugaucuacaccgccaaguaccccaacaccagcgaccuggacagacugacccagagccaccccauccugaacaugaucgacaccaagaagagcagccugaacaucagcggcuacaacuucagccugggcgccgccgugaaggccggcgccugcaugcuggacggcggcaacaugcuggagaccaucaaggugagcccccagaccauggacggcauccugaagagcauccugaaggugaagaaggcccugggcauguucaucagcgacacccccggcgagagaaaccccuacgagaacauccuguacaagaucugccugagcggcgacggcuggcccuacaucgccagcagaaccagcaucaccggcagagccugggagaacaccgugguggaccuggagagcgacggcaagccccagaaggccggcagcaacaacagcaacaagagccugcagagcgccggcuucaccgccggccugaccuacagccagcugaugacccugaaggacgccaugcugcagcuggaccccaacgccaagaccuggauggacaucgagggcagacccgaggaccccguggagaucgcccuguaccagcccagcagcggcugcuacauccacuucuucagagagcccaccgaccugaagcaguucaagcaggacgccaaguacagccacggcaucgacgugaccgaccuguucgccgcccagcccggccugaccagcgccgugaucgacgcccugcccagaaacauggugaucaccugccagggcagcgacgacaucagaaagcugcuggagagccagggcagaaaggacaucaagcugaucgacaucgcccugagcaaggccgacagcagaaaguacgagaacgccgugugggaccaguacaaggaccugugccacaugcacaccggcguggugguggagaagaagaagagaggcggcaaggaggagaucaccccccacugcgcccugauggacugcaucauguucgacgccgccgugagcggcggccugaacaccagcgugcugagagccgugcugcccagagacaugguguucagaaccagcacccccagaguggugcuguga

SEQ ID NO: 8972 - RNA, 1710 nt, Artificial Sequence
  derived and/or modified CDS sequence (opt4) from LASV(G2165-SLE-2011;Clade IV)__AIT17233__NP
augagcgccagcaaggaggugaagagcuuccuguggacccagagccugagaagagagcugagcggcuacugcagcaacaucaagcugcagguggugaaggacgcccaggcccugcugcacggccuggacuucagcgaggugagcaacgugcagagacugaugagaaaggagagaagagacgacaacgaccugaagagacugagagaccugaaccaggccgugaacaaccugguggagcugaagagcacccagcagaagagcauccugagagugggcacccugaccagcgacgaccugcuggugcuggccgccgaccuggagaagcugaagagcaaggugaccagaaccgagagaccccugagcgccggcguguacaugggcaaccugagcagccagcagcuggaccagagaagagcccugcugagcaugaucggcaugagcggcggcaaccagggcgcccaggccggcagagacggcguggugagagugugggacgugaagaacgccgagcugcugaacaaccaguucggcaccaugcccagccugacccuggccugccugaccaagcagggccagguggaccugaacgacgccgugcaggcccugaccgaccugggccugaucuacaccgccaaguaccccaacaccagcgaccuggacagacugacccagagccaccccauccugaacaugaucgacaccaagaagagcagccugaacaucagcggcuacaacuucagccugggcgccgccgugaaggccggcgccugcaugcuggacggcggcaacaugcuggagaccaucaaggugagcccccagaccauggacggcauccugaagagcauccugaaggugaagaaggcccugggcauguucaucagcgacacccccggcgagagaaaccccuacgagaacauccuguacaagaucugccugagcggcgacggcuggcccuacaucgccagcagaaccagcaucaccggcagagccugggagaacaccgugguggaccuggagagcgacggcaagccccagaaggccggcagcaacaacagcaacaagagccugcagagcgccggcuucaccgccggccugaccuacagccagcugaugacccugaaggacgccaugcugcagcuggaccccaacgccaagaccuggauggacaucgagggcagacccgaggaccccguggagguggcccuguaccagcccagcagcggcugcuacauccacuucuucagagagcccaccgaccugaagcaguucaagcaggacgccaaguacagccacggcaucgacgugaccgaccuguucgccgcccagcccggccugaccagcgccgugaucgacgcccugcccagaaacauggugaucaccugccagggcagcgacgacaucagaaagcugcuggagagccagggcagaaaggacaucaagcugaucgacaucgcccugagcaagaccgacagcagaaaguacgagaacgccgugugggaccaguacaaggaccugugccacaugcacaccggcguggugguggagaagaagaagagaggcggcaaggaggagaucaccccccacugcgcccugauggacugcaucauguucgacgccgccgugagcggcggccugaacaccagcgugcugagagccgugcugcccagagacaugguguucagaaccagcacccccagaguggugcuguga

SEQ ID NO: 8973 - RNA, 1710 nt, Artificial Sequence
  derived and/or modified CDS sequence (opt4) from LASV(G2184-SLE-2011;Clade IV)__AIT17237__NP
augagcgccagcaaggagaucaagagcuuccuguggacccagagccugagaagagagcugagcggcuacugcagcaacaucaagcugcagguggugaaggacgcccaggcccugcugcacggccuggacuucagcgaggugagcaacgugcagagacugaugagaaaggagagaagagacgacaacgaccugaagagacugagagaccugaaccaggccgugaacaaccugguggagcugaagagcacccagcagaagagcauccugagagugggcacccugaccagcgacgaccugcugauccuggccgccgaccuggagaagcugaagagcaaggugaccagaaccgagagaccccugagcgccggcguguacaugggcaaccugagcagccagcagcuggaccagagaagagcccugcugagcaugaucggcaugagcggcggcaaccagggcgccagagccggcagagacggcguggugagagugugggacgugaagaacgccgagcugcugaacaaccaguucggcaccaugcccagccugacccuggccugccugaccaagcagggccagguggaccugaacgacgccgugcaggcccugaccgaccugggccugaucuacaccgccaaguaccccaacaccagcgaccuggacagacugacccagagccaccccauccugaacaugaucgacaccaagaagagcagccugaacaucagcggcuacaacuucagccugggcgccgccgugaaggccggcgccugcaugcuggacggcggcaacaugcuggagaccaucaaggugagcccccagaccauggacggcauccugaagagcauccugaaggugaagaaggcccugggcauguucaucagcgacacccccggcgagagaaaccccuacgagaacauccuguacaagaucugccugagcggcgacggcuggcccuacaucgccagcagaaccagcaucaccggcagagccugggagaacaccgugguggaccuggagagcgacggcaagccccagaaggccggcagcaacaacagcaacaagagccugcagagcgccggcuucaccgccggccugaccuacagccagcugaugacccugaaggacgccaugcugcagcuggaccccaacgccaagaccuggauggacaucgagggcagacccgaggaccccguggagguggcccuguaccagcccagcagcggcugcuacauccacuucuucagagagcccaccgaccugaagcaguucaagcaggacgccaaguacagccacggcaucgacgugaccgaccuguucgccgcccagcccggccugaccagcgccgugaucgacgcccugcccagaaacauggugaucaccugccagggcagcgacgacaucagaaagcugcuggagagccagggcagaaaggacaucaagcugaucgacaucgcccugagcaagaccgacagcagaaaguacgagaacgccgugugggaccaguacaaggaccugugccacaugcacaccggcguggugguggagaagaagaagagaggcggcaaggaggagaucaccccccacugcgcccugauggacugcaucauguucgacgccgccgugagcggcggccugaacaccagcgugcugagagccgugcugcccagagacaugguguucagaaccagcacccccagaguggugcuguga

SEQ ID NO: 8974 - RNA, 1710 nt, Artificial Sequence
  derived and/or modified CDS sequence (opt4) from LASV(G2197-SLE-2011;Clade IV)__AIT17241__NP
augagcgccagcaaggagaucaagagcuuccuguggacccagagccugagaagagagcugagcggcuacugcagcaacaucaagcugcagguggugaaggacgcccaggcccugcugcacggccuggacuucagcgaggugagcaacgugcagagacugaugagaaaggagagaagagacgacaacgaccugaagagacugagagaccugaaccaggccgugaacaaccugguggagcugaagagcacccagcagaagagcauccugagagugggcacccugaccagcgacgaccugcugauccuggccgccgaccuggagaagcugaagagcaaggugaccagaaccgagagaccccugagcgccggcguguacaugggcaaccugagcagccagcagcuggaccagagaagagcccugcugagcaugaucggcaugagcggcggcaaccagggcgccagagccggcagagacggcguggugagagugugggacgugaagaacgccgagcugcugaacaaccaguucggcaccaugcccagccugacccuggccugccugaccaagcagggccagguggaccugaacgacgccgugcaggcccugaccgaccugggccugaucuacaccgccaaguaccccaacaccagcgaccuggacagacugacccagagccaccccauccugaacaugaucgacaccaagaagagcagccugaacaucagcggcuacaacuucagccugggcgccgccgugaaggccggcgccugcaugcuggacggcggcaacaugcuggagaccaucaaggugagcccccagaccauggacggcauccugaagagcauccugaaggugaagaaggcccugggcauguucaucagcgacacccccggcgagagaaaccccuacgagaacauccuguacaagaucugccugagcggcgacggcuggcccuacaucgccagcagaaccagcaucaccggcagagccugggagaacaccgugguggaccuggagagcgacggcaagccccagaaggccggcagcaacaacagcaacaagagccugcagagcgccggcuucaccgccggccugaccuacagccagcugaugacccugaaggacgccaugcugcagcuggaccccaacgccaagaccuggauggacaucgagggcagacccgaggaccccguggagaucgcccuguaccagcccagcagcggcugcuacauccacuucuucagagagcccaccgaccugaagcaguucaagcaggacgccaaguacagccacggcaucgacgugaccgaccuguucgccgcccagcccggccugaccagcgccgugaucgacgcccugcccagaaacauggugaucaccugccagggcagcgacgacaucagaaagcuguucgagagccagggcagaaaggacaucaagcugaucgacaucgcccugagcaagaccgacagcagaaaguacgagaacgccgugugggaccaguacaaggaccugugccacaugcacaccggcguggugguggagaagaagaagagaggcggcaaggaggagaucaccccccacugcgcccugauggacugcaucauguucgacgccgccgugagcggcggccugaacaccagcgugcugagagccgugcugcccagagacaugguguucagaaccagcacccccagaguggugcuguga

SEQ ID NO: 8975 - RNA, 1710 nt, Artificial Sequence
  derived and/or modified CDS sequence (opt4) from LASV(G2222-SLE-2011;Clade IV)__AIT17245__NP
augagcgccagcaaggagaucaagagcuuccuguggacccagagccugagaagagagcugagcggcuacugcagcaacaucaagcugcagguggugaaggacgcccaggcccugcugcacggccuggacuucagcgaggugagcaacgugcagagacugaugagaaaggagagaagagacgacaacgaccugaagagacugagagaccugaaccaggccgugaacaaccugguggagcugaagagcacccagcagaagagcauccugagagugggcacccugaccagcgacgaccugcugauccuggccgccgaccuggagaagcugaagagcaaggugaccagaaccgagagaccccugagcgccggcguguacaugggcaaccugagcagccagcagcuggaccagagaagagcccugcugaacaugaucggcaugagcggcagcaaccagggcgccagaaccggcagagacggcguggugagagugugggacgugaagaacgccgagcugcugaacaaccaguucggcaccaugcccagccugacccuggccugccugaccaagcagggccagguggaccugaacgacgccgugcaggcccugaccgaccugggccugaucuacaccgccaaguaccccaacaccagcgaccuggacagacugacccagagccaccccauccugaacaugaucgacaccaagaagagcagccugaacaucagcggcuacaacuucagccugggcgccgccgugaaggccggcgccugcaugcuggacggcggcaacaugcuggagaccaucaaggugagcccccagaccauggacggcauccugaagagcauccugaaggugaagaaggcccugggcauguucaucagcgacacccccggcgagagaaaccccuacgagaacauccuguacaagaucugccugagcggcgacggcuggcccuacaucgccagcagaaccagcaucaccggcagagccugggagaacaccgugguggaccuggagagcgacggcaagccccagaaggccggcagcaacaacagcaacaagagccugcagagcgccggccugaccgccggccugaccuacagccagcugaugacccugaaggacgccaugcugcagcuggaccccaacgccaagaccuggauggacaucgagggcagacccgaggaccccguggagaucgcccuguaccagcccagcagcggcugcuacauccacuucuucagagagcccaccgaccugaagcaguucaagcaggacgccaaguacagccacggcaucgacguggccgaccuguucgccgcccagcccggccugaccagcgccgugaucgacgcccugcccagaaaccuggugaucaccugccagggcagcgacgacaucagaaagcugcuggagagccagggcagaaaggacaucaagcugaucgacaucgcccugagcaagaccgacagcagaaaguacgagaacgccgugugggaccaguacaaggaccugugccacaugcacaccggcaucgugguggagaagaagaagagaggcggcaaggaggagaucaccccccacugcgcccugauggacugcaucauguucgacgccgccgugagcggcggccugaacgccagcgugcugagagccgugcugcccagagacaugguguucagaaccagcacccccagaguggugcuguga

SEQ ID NO: 8976 - RNA, 1710 nt, Artificial Sequence
  derived and/or modified CDS sequence (opt4) from LASV(G2230-SLE-2012;Clade IV)__AIT17247__NP
augagcgccagcaaggagaucaagagcuuccuguggacccagagccugagaagagagcugagcggcuacugcagcaacaucaagcugcagguggugaaggacgcccaggcccugcugcacggccuggacuucagcgaggugagcaacgugcagagacugaugagaaagcagagaagagacgacagcgaccugaagagacugagagaccugaaccaggccgugaacaaccugguggagcugaagagcacccagcagaagagcgugcugagagugggcacccugaccagcgacgaccugcugauccuggccgccgaccuggagaagcugaagagcaaggugaucagaaccgagagaccccugagcagcggcguguacaugggcaaccugagcagccagcagcuggaccagagaagagcccugcugaacaugaucggcaugagcggcggcaaccagggcgcccaggugggcagagacggcguggugagagugugggacgugaagaacgccgaccugcugaacaaccaguucggcaccaugcccagccugacccuggccugccugaccaagcagggccagguggaccugaacgacguggugcaggcccugaccgaccugggccugaucuacaccgccaaguaccccaacaccagcgaccuggacagacuggcccagagccaccccauccugaacaugaucgacaccaagaagagcagccugaacaucagcggcuacaacuucagccugggcgccgccgugaaggccggcgccugcaugcuggacggcggcaacaugcuggagaccaucaaggugagcccccagaccauggacggcauccugaagagcauccugaaggugaagaaggcccugggcauguucaucagcgagacccccggcgagagaaaccccuacgagaacauccuguacaagaucugccugagcggcgacggcuggcccuacaucgccagcagaaccagcaucaccggcagagccugggagaacaccaucguggaccuggagagcgacggcaagccccagaaggccggcagcaacaacagcaacaagagccugcagagcgccggcuucaccgccggccugaccuacagccagcugaugacccugaaggacagcaugcugcagcuggaccccaacgccaagaccuggauggacaucgagggcagacccgaggaccccguggagguggcccuguaccagcccagcagcggcugcuacauccacuucuucagagagcccaccgaccugaagcaguucaagcaggacgccaaguacagccacggcaucgacgugaccgaccuguucgccgcccagcccggccugaccagcgccgugaucgaggcccugcccagaaacauggugaucaccugccagggcagcgacgacaucagaaagcugcuggagagccagggcagaaaggacaucaagcugaucgacaucgcccugaacaagaccgacagcagaaaguacgagaacgccgugugggaccaguacaaggaccugugccacaugcacaccggcguggugguggagaagaagaagagaggcggcaaggaggagaucaccccccacugcgcccugauggacugcaucauguucgacgccgccgugagcggcggccugaagacccuggugcugagagccgugcugcccagagacaugguguucagaaccagcacccccaagguggugcuguga

SEQ ID NO: 8977 - RNA, 1710 nt, Artificial Sequence
  derived and/or modified CDS sequence (opt4) from LASV(G2259-SLE-2012;Clade IV)__AIT17251__NP
augagcgccagcaaggagaucaagagcuuccuguggacccagagccugagaagagagcugagcggcuacugcagcaacaucaagcugcagguggugaaggacgcccaggcccugcugcacggccuggacuucagcgaggugagcaacgugcagagacugaugagaaagcagagaagagacgacagcgaccugaagagacugagagaccugaaccaggccgugaacaaccugguggagcugaagagcacccagcagaagagcgugcugagagugggcacccugaccagcgacgaccugcugauccuggccgccgaccuggagaagcugaagagcaaggugaucagaaccgagagaccccugagcagcggcguguacaugggcaaccugagcagccagcagcuggaccagagaagagcccugcugaacaugaucggcaugagcggcggcaaccagggcgcccaggugggcagagacggcguggugagagugugggacgugaagaacgccgaccugcugaacaaccaguucggcaccaugcccagccugacccuggccugccugaccaagcagggccagguggaccugaacgacguggugcaggcccugaccgaccugggccugaucuacaccgccaaguaccccaacaccagcgaccuggacagacuggcccagagccaccccauccugaacaugaucgacaccaagaagagcagccugaacaucagcggcuacaacuucagccugggcgccgccgugaaggccggcgccugcaugcuggacggcggcaacaugcuggagaccaucaaggugagcccccagaccauggacggcauccugaagagcauccugaaggugaagaaggcccugggcauguucaucagcgagacccccggcgagagaaaccccuacgagaacauccuguacaagaucugccugagcggcgacggcuggcccuacaucgccagcagaaccagcaucaccggcagagccugggagaacaccaucguggaccuggagagcgacggcaagccccagaagaccggcagcaacaacagcaacaagagccugcagagcgccggcuucaccgccggccugaccuacagccagcugaugacccugaaggacagcaugcugcagcuggaccccaacgccaagaccuggauggacaucgagggcagacccgaggaccccguggagguggcccuguaccagcccagcagcggcugcuacauccacuucuucagagagcccaccgaccugaagcaguucaagcaggacgccaaguacagccacggcaucgacgugaccgaccuguucgccgcccagcccggccugaccagcgccgugaucgaggcccugcccagaaacauggugaucaccugccagggcagcgacgacaucagaaagcugcuggagagccagggcagaaaggacaucaagcugaucgacaucgcccugaacaagaccgacagcagaaaguacgagaacgccgugugggaccaguacaaggaccugugccacaugcacaccggcguggugguggagaagaagaagagaggcggcaaggaggagaucaccccccacugcgcccugauggacugcaucauguucgacgccgccgugagcggcggccugaagacccuggugcugagagccgugcugcccagagacaugguguucagaaccagcacccccaagguggugcuguga

SEQ ID NO: 8978 - RNA, 1710 nt, Artificial Sequence
  derived and/or modified CDS sequence (opt4) from LASV(G2263-SLE-2012;Clade IV)__AIT17255__NP
augagcgccagcaaggagaucaagagcuuccuguggacccagagccugagaagagagcugagcggcuacugcagcaacaucaagcugcagguggugaaggacgcccaggcccugcugcacggccuggacuucagcgaggugagcaacgugcagagacugaugagaaaggagagaagagacgacaacgaccugaagagacugagagaccugaaccaggccgugaacaaccugguggagcugaagagcacccagcagaagagcgugcugagagugggcacccugaccagcgacgaccugcuggugcuggccgccgaccuggagaagcugaagagcaaggugaccagaaccgagagaccccugagcgccggcguguacaugggcaaccugagcagccagcagcuggaccagagaagagcccugcugagcaugaucggcaugagcggcggcaaccagagagcccaggccggcagagacggcguggugagagugugggacgugaagaacgccgagcugcugaacaaccaguucggcaccaugcccagccugacccuggccugccugaccaagcagggccagguggaccugaacgacgccgugcaggcccugaccgaccugggccugaucuacaccgugaaguaccccaacgccagcgaccuggacagacugacccagagccaccccauccugaacaugaucgacaccaagaagagcagccugaacaucagcggcuacaacuucagccugggcgccgccgugaaggccggcgccugcaugcuggacggcggcaacaugcuggagaccaucaaggugagcccccagaccauggacggcauccugaagagcauccugaaggugaagaagacccugggcauguucaucagcgacacccccggcgagagaaaccccuacgagaacauccuguacaagaucugccugagcggcgacggcuggcccuacaucgccagcagaaccagcaucaccggcagagccugggagaacaccgugguggaccuggagagcaacggcaagccccagaaggccgacagcaacagcagcaacaagagccugcagagcgccggcuucaccgccggccugaccuacagccagcugaugacccugaaggacgccaugcugcagcuggaccccaacgccaagaccuggauggacaucgagggcagacccgaggaccccguggagaucgccuucuaccagcccagcagcggcugcuacauccacuucuucagagagcccaccgaccugaagcaguucaagcaggacgccaaguacagccacggcaucgacgugaccgaccuguucgccgcccagcccggccugaccagcgccgugaucgacgcccugcccagaaacauggugaucaccugccagggcagcgacgacaucagaaagcugcuggagagccagggcagaaaggacaucaagcugaucgacaucgcccugagcaagaccgacagcagaaaguacgagaacgccgugugggaccaguacaaggaccugugccacaugcacaccggcguggugguggagaagaagaagagaggcggcaaggaggagaucaccccccacugcgcccugauggacugcaucauguucgacgccgccgugagcggcggccugaacacccuggugcugagagccgugcugcccagagacaugguguucagaaccagcacccccagaguggugcuguga

SEQ ID NO: 8979 - RNA, 1710 nt, Artificial Sequence
  derived and/or modified CDS sequence (opt4) from LASV(G2280-SLE-2012;Clade IV)__AIT17259__NP
augagcgccagcaaggagaucaagagcuuccuguggacccagagccugagaagagagcugagcagcuacugcagcaacaucaagcugcagguggugaaggacgcccaggcccugcugcacggccuggacuucagcgaggugagcaacgugcagagacugaugagaaaggagagaagagacgacaacgaccugaagagacugagagaccugaaccaggccgugaacaaccugguggagcugaagagcacccagcagaagagcauccugagagugggcacccugaccagcgacgaccugcugauccuggccgccgaccuggagaagcugaagagcaaggugaccagaaccgagagaccccugagcgccggcguguacaugggcaaccugagcagccagcagcuggaccagagaagagcccugcugaacaugcugggcaugagcggcagcaaccagggcgccagagccggcagagacggcguggugagagugugggacgugaagaacgccgagcugcugaacaaccaguucggcaccaugcccagccugacccuggccugccugaccaagcagggccagguggaccugaacgacgccgugcaggcccugaccgaccugggccugaucuacaccgccaaguaccccaacaccagcgaccuggacagacugacccagagccaccccauccugaacaugaucgacaccaagaagagcagccugaacaucagcggcuacaacuucagccugggcgccgccgugaaggccggcgccugcaugcuggacggcggcaacaugcuggagaccaucaaggugagcccccagaccauggacggcauccugaagagcauccugaaggugaagaaggcccugggcauguucaucagcgacacccccggcgagagaaaccccuacgagaacauccuguacaagaucugccugagcggcgacggcuggcccuacaucgccagcagaaccagcaucaccggcagagccugggagaacaccgugguggaccuggagagcgacggcaagccccagaaggccggcagcaacagcagcaacaagagccugcagagcgccggcuucaccgccggccugaccuacagccagcugaugacccugaaggacgccaugcugcagcuggaccccaacgccaagaccuggauggacaucgagggcagacccgaggaccccguggagaucgcccuguaccagcccagcagcggcugcuacauccacuucuucagagagcccaccgaccugaagcaguucaagcaggacgccaaguacagccacggcaucgacgugaccgaccuguucgccgcccagcccggccugaccagcgccgugaucgacgcccugcccagaaacauggugaucaccugccagggcagcgacgacaucagaaagcugcuggagagccagggcagaaaggacaucaagcugaucgacaucgcccugagcaagaccgacagcagaaaguacgagaacgccgugugggaccaguacaaggaccugugccacaugcacaccggcaucgugguggagaagaagaagagaggcggcaaggaggagaucaccccccacugcgcccugauggacugcaucauguucgacgccgccgugagcggcggccugaacgccagcgugcugagagccgugcugcccagagacaugguguucagaaccagcacccccagaguggugcuguga

SEQ ID NO: 8980 - RNA, 1710 nt, Artificial Sequence
  derived and/or modified CDS sequence (opt4) from LASV(G2295-SLE-2012;Clade IV)__AIT17263__NP
augagcgccagcaaggagaucaagagcuuccuguggacccagagccugagaagagagcugagcggcuacugcagcaacaucaagcugcagguggugaaggacgcccaggcccugcugcacggccuggacuucagcgaggugagcaacgugcagagacugaugagaaaggagagaagagacgacaacgaccugaagagacugagagaccugaaccaggccgugaacaaccugguggagcugaagagcacccagcagaagagcgugcugagagugggcacccugaccagcgacgaccugcugauccuggccgccgaccuggagaagcugaagagcaaggugaucagaaccgagagaccccugagcgccggcguguacaugggcaaccugagcagccagcagcuggaccagagaagagcccugcugaacaugaucggcaugggcggcagcaaccagggcgccagagccggcagagacggcguggugagagugugggacgugaagaacgccgagcugcugaacaaccaguucggcaccaugcccagccugacccuggccugccugaccaagcagggccagguggaccugaacgacgccgugcaggcccugaccgaccugggccugaucuacaccgccaaguaccccaacaccagcgaccuggacagacugacccagagccaccccauccugaacaugaucgacaccaagaagagcagccugaacaucagcggcuacaacuucagccugggcgccgccgugaaggccggcgccugcaugcuggacggcggcaacaugcuggagaccaucaaggugagcccccagaccauggacggcauccugaagagcauccugaaggugaagaaggcccugggcauguucaucagcgacacccccggcgagagaaaccccuacgagaacauccuguacaagaucugccugagcggcgacggcuggcccuacaucgccagcagaaccagcaucaccggcagagccugggagaacaccgugguggaccuggagagcgacggcaagccccagaaggccggcagcaacggcagcaacaagagccugcagagcgccggcuucaccgccggccugaccuacagccagcugaugacccugaaggacgccaugcugcagcuggaccccaacaccaagaccuggauggacaucgagggcagacccgaggaccccguggagguggcccuguaccagcccagcagcggcugcuacauccacuucuucagagagcccaccgaccugaagcaguucaagcaggacgccaaguacagccacggcaucgacgugaccgaccuguucgccgcccagcccggccugaccagcgccgugaucgacgcccugcccagaaacauggugaucaccugccagggcagcgacgacaucagaaagcugcuggagagccagggcagaaaggacaucaagcugaucgacaucgcccugagcaagaccgacagcagaaaguacgagaacgccgugugggaccaguacaaggaccugugccacaugcacaccggcaucgugguggagaagaagaagagaggcggcaaggaggagaucaccccccacugcgcccugauggacugcaucauguucgacgccgccgugagcggcggccugaacaccagcgugcugagagccgugcugcccagagacaugguguucagaaccagcacccccagaguggugcuguga

SEQ ID NO: 8981 - RNA, 1710 nt, Artificial Sequence
  derived and/or modified CDS sequence (opt4) from LASV(G2315-SLE-2012;Clade IV)__AIT17267__NP
augagcgccagcaaggagaucaagagcuuccuguggacccagagccugagaagagagcugagcggcuacugcagcaacaucaagcugcagguggugaaggacgcccaggcccugcugcacggccuggacuucagcgaggugagcaacgugcagagacugaugagaaaggagagaagagacgacaacgaccugaagagacugagagaccugaaccaggccgugaacaaccugguggagcugaagagcacccagcagaagagcgugcugagagugggcacccugaccagcgacgaccugcugauccuggccgccgaccuggagaagcugaagagcaaggugaccagaaccgagagaccccugagcgccggcguguacaugggcaaccugagcagccagcagcuggaccagagaagagcccugcugaacaugaucggcaugagcggcggcaaccagggcgccagagccggcagagacggcguggugagagugugggacgugaagaacgccgagcugcugaacaaccaguucggcaccaugcccagccugacccuggccugccugaccaagcagggccagguggaccugaacgacgccgugcaggcccugaccgaccugggccugaucuacaccgccaaguaccccaacaccagcgaccuggacagacugacccagagccaccccauccugaacaugaucgacaccaagaagagcagccugaacaucagcggcuacaacuucagccugggcgccgccgugaaggccggcgccugcaugcuggacggcggcaacaugcuggagaccaucaaggugagcccccagaccauggacagcauccugaagagcauccugaaggugaagaaggcccugggcauguucaucagcgacacccccggcgagagaaaccccuacgagaacauccuguacaagaucugccugagcggcgacggcuggcccuacaucgccagcagaaccagcaucaccggcagagccugggagaacaccgugguggaccuggagagcgacggcaagccccagaaggccggcagcaacaacagcaacaagagccugcagagcgccggcuucgccgccggccugaccuacagccagcugaugacccugaaggacgccaugcugcagcuggaccccaacgccaagaccuggauggacaucgagggcagacccgaggaccccguggagaucgcccuguaccagcccagcagcggcugcuacauccacuucuucagagagcccaccgaccugaagcaguucaagcaggacgccaaguacagccacggcaucgacgugaccgaccuguucgccgcccagcccggccugaccagcgccgugaucgacgcccugcccagaaacauggugaucaccugccagggcagcgacgacaucagaaagcugcuggagagccagggcagaaaggacaucaagcugaucgacaucgcccugagcaagaccgacagcagaaaguacgagaacgccgugugggaccaguacaaggaccugugccacaugcacaccggcguggugguggagaagaagaagagaggcggcaaggaggagaucaccccccacugcgcccugauggacugcaucauguucgacgccgccgugagcggcggccugaacaccagcgugcugagagccgugcugcccagagacaugguguucagaaccaccacccccagaguggugcuguga

SEQ ID NO: 8982 - RNA, 1710 nt, Artificial Sequence
  derived and/or modified CDS sequence (opt4) from LASV(G2318-SLE-2012;Clade IV)__AIT17271__NP
augagcgccagcaaggagaucaagagcuuccuguggacccagagccugagaagagagcugagcggcuacugcagcaacaucaagcugcagguggugaaggacgcccaggcccugcugcacggccuggacuucagcgaggugagcaacgugcagagacugaugagaaaggagagaagagacgacaacgaccugaagagacugagagaccugaaccaggccgugaacaaccugguggagcugaagagcacccagcagaagagcauccugagagugggcacccugaccagcgacgaccugcugauccuggccgccgaccuggagaagcugaagagcaaggugaccagaaccgagagaccccugagcgccggcguguacaugggcaaccugagcagccagcagcuggaccagagaagagcccugcugaacaugaucggcaugagcggcggcaaccagggcgccagagccggcagagacggcguggugagagugugggacgugaagaacgccgagcugcugaacaaccaguucggcaccaugcccagccugacccuggccugccugaccaagcagggccagguggaccugaacgacgccgugcaggcccugaccgaccugggccugaucuacaccgccaaguaccccaacaccagcgaccuggacagacugacccagagccaccccauccugaacaugaucgacaccaagaagagcagccugaacaucagcggcuacaacuucagccugggcgccgccgugaaggccggcgccugcaugcuggacggcggcaacaugcuggagaccaucaaggugagcccccagaccauggacggcauccugaagaccauccugaaggugaagaaggcccugggcauguucaucagcgacacccccggcgagagaaaccccuacgagaacauccuguacaagaucugccugagcggcgacggcuggcccuacaucgccagcagaaccagcaucaccggcagagccugggagaacaccgugguggaccuggagagcgacggcaagccccagaagaccggcagcaacaacagcaacaagagccugcagagcgccggcuucgccgccggccugaccuacagccagcugaugacccugaaggacgccaugcugcagcuggaccccaacgccaagaccuggauggacaucgagggcagacccgaggaccccguggagaucgcccuguaccagcccagcagcggcugcuacauccacuucuucagagagcccaccgaccugaagcaguucaagcaggacgccaaguacagccacggcaucgacgugaccgaccuguucgccgcccagcccggccugaccagcgccgugaucgacgcccugcccagaaacauggugaucaccugccagggcagcgacgacaucagaaagcugcuggagagccagggcagaaaggacaucaagcugaucgacaucgcccugagcaaggccgacagcagaaaguacgagaacgccgugugggaccaguacaaggaccugugccacaugcacaccggcguggugguggagaagaagaagagaggcggcaaggaggagaucaccccccacugcgcccugauggacugcaucauguacgacgccgccgugagcggcggccugagcaccagcgugcugagagccgugcugcccagagacaugguguucagaaccagcacccccagaguggugcuguga

SEQ ID NO: 8983 - RNA, 1710 nt, Artificial Sequence
  derived and/or modified CDS sequence (opt4) from LASV(G2363-SLE-2012;Clade IV)__AIT17275__NP
augagcgccagcaaggagaucaagagcuuccuguggacccagagccugagaagagagcugagcggcuacugcagcaacaucaagcugcagguggugaaggacgcccaggcccugcugcacggccuggacuucagcgaggugagcaacgugcagagacugaugagaaagcagagaagagacgacggcgaccugaagagacugagagaccugaaccaggccgugaacaaccugguggagcugaagagcacccagcagaagagcgugcugagagugggcacccugaccagcgacgaccugcugacccuggccgccgaccuggagaagcugaagagcaaggugaccagaaccgagagaccccugagcgccggcguguacaugggcaaccugagcagccagcagcuggaccagagaagagcccugcugaacaugaucggcaugagcggcggcaaccagggcgccagaaccggcaaggacggcguggugagaaucugggacgugaagaacgccgaccugcugaacaaccaguucggcaccaugcccagccugacccuggccugccugaccaagcagggccagguggaccugaacgacguggugcaggcccugaccgaccugggccugaucuacaccgccaaguaccccaacaucagcgaccuggacagacuggcccagagccaccccauccugaagaugaucgacaccagcaagagcagccugaacaucagcggcuacaacuucagccugggcgccgccgugaaggccggcgccugcaugcuggacggcggcaacaugcuggagaccgugaaggugagcccccagaccauggacggcauccugaagagcauccugaaggugaagaagagccugggcauguucaucagcgacacccccggcgagagaaaccccuacgagaacauccuguacaagaucugccugagcggcgacggcuggcccuacaucgccagcagaaccagcaucaccggcagagccugggagaacaccgugguggaccuggagagcgacggcaagccccagaaggugggcagcaacaacagcaacaagagccugcagagcaccggcuucaccgccggccugaccuacagccagcugaugacccugaaggacgccaugcugcagcuggaccccaacgccaagaccuggauggacaucgagggcagacccgaggaccccguggagaucgcccuguaccagcccagcagcggcugcuacauccacuucuucagagagcccaccgaccugaagcaguucaagcaggacgccaaguacagccacggcaucgacgugaccgaccuguucgccgcccagcccggccugaccagcgccgugaucgacacccugcccagaaacauggugaucaccugccagggcagcgacgacaucggcaagcugcuggagagccagggcagaaaggacaucaagcugaucgacaucgcccugagcaagaccgacagcagaaaguacgagaacgccgugugggaccaguacaaggaccugugccacaugcacaccggcguggugguggagaagaagaagagaggcggcaaggaggagaucaccccccacugcgcccugauggacugcaucauguucgacgccgccgugagcggcggccugaacgccagcgugcugagagccgugcugcccagagacaugguguucagaaccagcacccccagaguggugcuguga

SEQ ID NO: 8984 - RNA, 1710 nt, Artificial Sequence
  derived and/or modified CDS sequence (opt4) from LASV(G2384-SLE-2012;Clade IV)__AIT17277__NP
augagcgccagcaaggagaucaagagcuuccuguggacccagagccugagaagagagcugagcagcuacugcagcaacaucaagcugcagguggugaaggacgcccaggcccugcugcacggccuggacuucagcgaggugagcaacgugcagagacugaugagaaaggagagaagagacgacaacgaccugaagagacugagagaccugaaccaggccgugaacaaccugguggagcugaagagcacccagcagaagagcauccugagagugggcacccugaccagcgacgaccugcugauccuggccgccgaccuggagaagcugaagagcaaggugaccagaaccgagagaccccugagcgccggcguguacaugggcaaccugagcagccagcagcuggaccagagaagagcccugcugagcaugaucggcaugagcggcagcaaccagggcgccagagccggcagagacggcguggugagagugugggacgugaagaacgccgagcugcugaacaaccaguucggcaccaugcccagccugacccuggccugccugaccaagcagggccagguggaccugaacgacgccgugcaggcccugaccgaccugggccugaucuacaccgccaaguaccccaacaccagcgaccuggacagacugacccagagccaccccauccugaacaugaucgacaccaagaagagcagccugaacaucagcggcuacaacuucagccugggcgccgccgugaaggccggcgccugcaugcuggacggcggcaacaugcuggagaccaucaaggugagcccccagaccauggacggcauccugaagagcauccugaaggugaagaaggcccugggcauguucaucagcgacacccccggcgagagaaaccccuacgagaacauccuguacaagaucugccugagcggcgacggcuggcccuacaucgccagcagaaccagcaucaccggcagagccugggagaacaccgugguggaccuggagagcgacggcaagccccagaaggccggcagcaacaacagcaacaagagccugcagagcgccggcuucaccgccggccugaccuacagccagcugaugacccugaaggacgccaugcugcagcuggaccccaacgccaagaccuggauggacaucgagggcagacccgaggaccccguggagguggcccuguaccagcccagcagcggcugcuacauccacuucuucagagagcccaccgaccugaagcaguucaagcaggacgccaaguacagccacggcaucgacgugaccgaccuguucgccgcccagcccggccugaccagcgccgugaucgacgcccugcccagaaacauggugaucaccugccagggcagcgacgacaucagaaagcugcuggagagccagggcagaaaggacaucaagcugaucgacaucgcccugagcaagaccgacagcagaaaguacgagaacgccgugugggaccaguacaaggaccugugccacaugcacaccggcguggugguggagaagaagaagagaggcggcaaggaggagaucaccccccacugcgcccugauggacugcaucauguucgacgccgccgugagcggcggccugaacaccagcgugcugagagccgugcugcccagagacaugguguucagaaccagcacccccagaguggugcuguga

SEQ ID NO: 8985 - RNA, 1710 nt, Artificial Sequence
  derived and/or modified CDS sequence (opt4) from LASV(G2392-SLE-2012;Clade IV)__AIT17281__NP
augagcgccagcaaggagaucaagagcuuccuguggacccagagccugagaagagagcugagcggcuacugcagcaacaucaagcugcagguggugaaggacgcccaggcccugcugcacggccuggacuucagcgaggugagcaacgugcagagacugaugagaaaggagagaagagacgacagcgaccugaagagacugagagaccugaaccaggccgugaacaaccugguggagcugaagagcacccagcagaagagcgugcugagagugggcacccugaccagcgacgaccugcuggugcuggccgccgaccuggagaagcugaagagcaaggugaccagaaccgagagaccccugagcgccggcguguacaugggcaaccugagcagccagcagcuggaccagagaagagcccugcugagcaugaucggcaugagcggcggcaaccagggcgccagagccggcagagacggcguggugagaaucugggacgugaagaacgccgagcugcugaacaaccaguucggcaccaugcccagccugacccuggccugccugaccaagcagggccagguggaccugaacgacguggugcaggcccugaccgaccugggccugaucuacaccgccaaguaccccaacaccagcgaccuggacagacugacccagagccaccccauccugaacaugaucgacaccaagaagagcagccugaacaucagcggcuacaacuucagccugggcgccgccgugaaggccggcgccugcaugcuggacggcggcaacaugcuggagaccaucaaggugagcccccagaccauggacggcauccugaagagcauccugaaggugaagaaggcccugggcauguucaucagcgacacccccggcgagagaaaccccuacgagaacauccuguacaagaucugccugagcggcgacggcuggcccuacaucgccagcagaaccagcaucaccggcagagccugggagaacaccaucguggaccuggagagcgacggcaagccccagaagaccagcaccaccaacagcaacaagagccugcagagcgccggcuucgccgccggccugaccuacagccagcugaugacccugaaggacgccaugcugcagcuggaccccaacgccaagaccuggauggacaucgagggcagacccgaggaccccguggagaucgcccuguaccagcccagcagcggcugcuacauccacuucuucagagagcccaccgaccugaagcaguucaagcaggacgccaaguacagccacggcaucgacgugaccgaccuguucgccgcccagcccggccugaccagcgccgugaucgacacccugcccagaaacauggugaucaccugccagggcagcgaggacaucagaagacugcuggagagccagggcagaaaggacaucaagcugaucgacaucgcccugagcaagaccgacagcagaaaguacgagaacgccgugugggaccaguacaaggaccugugccacaugcacaccggcguggugguggagaagaagaagaagggcggcaaggaggagaucaccccccacugcgcccugauggacugcaucauguucgacgccgccgugagcggcggccugaacaccagcgugcugagagccgugcugcccagagacaugguguucagaaccagcacccccagaguggugcuguga

SEQ ID NO: 8986 - RNA, 1710 nt, Artificial Sequence
  derived and/or modified CDS sequence (opt4) from LASV(G2405-SLE-2012;Clade IV)__AIT17285__NP
augagcgccagcaaggagaucaagagcuuccuguggacccagagccugagaagagagcugagcggcuacugcagcaacaucaagcugcagguggugaaggacgcccaggcccugcugcacggccuggacuucagcgaggugagcaacgugcagagaagcaugagaaaggagagaagagacgacaacgaccugaagagacugagagaccugaaccaggccgugaacaaccugguggagcugaagagcacccagcagaagagcauccugagagugggcacccugaccagcgacgaccugcugauccuggccgccgaccuggagaagcugaagagcaaggugaccagaaccgagagaccccugagcgccggcguguacaugggcaaccugagcagccagcagcuggaccagagaagagcccugcugaacaugaucggcaugagcggcagcaaccagggcgccagagccggcagagacggcguggugagagugugggacgugaagaacgccgagcugcugaacaaccaguucggcaccaugcccagccugacccuggccugccugaccaagcagggccagguggaccugaacgacguggugcaggcccugaccgaccugggccugaucuacaccgccaaguaccccaacgccagcgaccuggacagacugacccagagccaccccauccugaacaugaucgacaccaagaagagcagccugaacaucagcggcuacaacuucagccugggcgccgccgugaaggccggcgccugcaugcuggacggcggcaacaugcuggagaccaucaaggugagcccccagaccauggacggcauccugaagagcauccugaaggugaagaaggcccugggcauguucaucagcgacacccccggcgagagaaaccccuacgagaacauccuguacaagaucugccugagcggcgacggcuggcccuacaucgccagcagaaccagcaucaccggcagagccugggagaacaccaucguggaccuggagagcgacggcaagccccagaaggccggcaacaacggcagcaacaagagccugcagagcgccggcuucaccgccggccugaccuacagccagcugaugacccugaaggacgccaugcugcagcuggaccccaacgccaagaccuggauggacaucgagggcagacccgaggaccccguggagaucgcccuguaccagcccagcagcggcugcuacauccacuucuucagagagcccaccgaccugaagcaguucaagcaggacgccaaguacagccacggcaucgacgugaccgaccuguucgccgcccagcccggccugaccagcgccgugaucgacgcccugcccagaaaccuggugaucaccugccagggcagcgacgacaucagaaagcugcuggagagccagggcagaaaggacaucaagcugaucgacaucgcccugagcaagaccgacagcagaaaguacgagaacgccgugugggaccaguacaaggaccugugccacaugcacaccggcaucgugguggagaagaagaagagaggcggcaaggaggagaucaccccccacugcgcccugauggacugcaucauguucgacgccgccgugagcggcggccugaacaccagcgugcugagagccgugcugcccagagacaugguguucagaaccagcacccccagaguggugcuguga

SEQ ID NO: 8987 - RNA, 1710 nt, Artificial Sequence
  derived and/or modified CDS sequence (opt4) from LASV(G2427-SLE-2012;Clade IV)__AIT17289__NP
augagcgccagcaaggagaucaagagcuuccuguggacccagagccugagaagagagcugagcggcuacugcagcaacaucaagcugcagguggugaaggacgcccaggcccugcugcacggccuggacuucagcgaggugagcaacgugcagagacugaugagaaaggagagaagagacgacagcgaccugaagagacugagagaccugaaccaggccgugaacaaccugguggagcugaagagcacccagcagaagagcgugcugagagugggcacccugaccagcgacgaccugcuggugcuggccgccgaccuggagaagcugaagagcaaggugaccagaaccgagagaccccugagcgccggcguguacaugggcaaccugagcagccagcagcuggaccagagaagagcccugcugagcaugaucggcaugagcggcggcaaccagggcgugagagccggcagagacggcguggugagaaucugggacgugaagaacgccgagcugcugaacaaccaguucggcaccaugcccagccugacccuggccugccugaccaagcagggccagguggaccugaacgacguggugcaggcccugaccgaccugggccugaucuacaccgccaaguaccccaacaccagcgaccuggacagacugacccagagccaccccauccugaacaugaucgacaccaagaagagcagccugaacaucagcggcuacaacuucagccugggcgccgccgugaaggccggcgccugcaugcuggacggcggcaacaugcuggagaccaucaaggugagcccccagaccauggacggcauccugaagagcauccugaaggugaagaaggcccugggcauguucaucagcgacacccccggcgagagaaaccccuacgagaacauccuguacaagaucugccugagcggcgacggcuggcccuacaucgccagcagaaccagcaucaccggcagagccugggagaacaccaucguggaccuggagagcgacggcaagccccagaagaccggcagcaucaacagcaacaagagccugcagagcaccggcuucgccgccggccugaccuacagccagcugaugacccugaaggacgccaugcugcagcuggaccccaacgccaagaccuggauggacaucgagggcagacccgaggaccccguggagaucgcccuguaccagcccagcagcggcugcuacauccacuucuucagagagcccaccgaccugaagcaguucaagcaggacgccaaguacagccacggcaucgacgugaccgaccuguucgccgcccagcccggccugaccagcgccgugaucgacgcccugcccagaaacauggugaucaccugccagggcagcgacgacaucagaaagcugcuggagagccagggcagaaaggacaucaagcugaucgacaucgcccugagcaagaccgacagcagaaaguacgagaacgccgugugggaccaguacaaggaccugugccacaugcacaccggcaucgugguggagaagaagaagagaggcggcaaggaggagaucaccccccacugcgcccugauggacugcaucauguucgacgccgccgugagcggcggccugaacaccagcgugcugagagccgugcugcccagagacaugguguucagaaccagcacccccagaguggugcuguga

SEQ ID NO: 8988 - RNA, 1710 nt, Artificial Sequence
  derived and/or modified CDS sequence (opt4) from LASV(G2431-SLE-2012;Clade IV)__AIT17293__NP
augagcgccagcaaggagaucaagagcuuccuguggacccagagccugagaagagagcugagcggcuacugcagcaacaucaagcugcagguggugaaggacgcccaggcccugcugcacggccuggacuucagcgaggugagcaacgugcagagacugaugagaaagcagagaagagacgacaacgaccugaagagacugagagaccugaaccaggccgugaacaaccugguggagcugaagagcacccagcagaagagcgugcugagagugggcacccugaccagcgacgaccugcuggugcuggccgccgaccuggagaagcugaagagcaaggugaccagaaccgagagaccccugagcgccggcguguacaugggcaaccugagcacccagcagcuggaccagagaagagcccugcugaacaugaucggcaugagcggcggcaaccagggcgccagagccggcagagacggcguggugagagugugggacgugaagaacgccgaccugcugaacaaccaguucggcaccaugcccagccugacccuggccugccugaccaagcagggccagguggaccugaacgacguggugcaggcccugaccgaccugggccugaucuacaccgccaaguaccccaacaccagcgaccuggacagacugacccagagccaccccauccugaacaugaucgacaccaacaagagcagccugaacaucagcggcuacaacuucagccugggcgccgccgugaaggccggcgccugcaugcuggacggcggcaacaugcuggagaccaucaaggugagcccccagaccauggacggcauccugaagagcauccugaaggugaagaaggcccugggcauguucaucagcgacacccccggcgagagaaaccccuacgagaacauccuguacaagaucugccugagcggcgacggcuggcccuacaucgccagcagaaccagcaucaccggcagagccugggagaacaccgugguggaccuggagagcgacggcaagccccagaaggccggcggcaacaacagcaacaagagccugcagagcgccggcuucaccgccggccugaccuacagccagcugaugacccugaaggacgccaugcugcagcuggaccccaacgccaagaccuggauggacaucgagggcagacccgaggaccccguggagaucgcccuguaccagcccagcagcggcugcuacauccacuucuucagagagcccaccgaccugaagcaguucaagcaggacgccaaguacagccacggcaucgacgugaccgaccuguucgccgcccagcccggccugaccagcgccgugaucgacgcccugcccagaaacauggugaucaccugccagggcagcgacgacaucagaaagcugcuggagagccagggcagaaaggacaucaagcugaucgacaucgcccugagcaagaccgacagcagaaaguacgagaacgccgugugggaccaguacaaggaccugugcaacaugcacaccggcaucgugguggagaagaagaagagaggcggcaaggaggagaucaccccccacugcgcccugauggacugcaucauguucgacgccgccgugagcggcggcaugaacaccagcgugcugagagccgugcugcccagagacaugguguucagaaccagcacccccagaguggugcuguga

SEQ ID NO: 8989 - RNA, 1710 nt, Artificial Sequence
  derived and/or modified CDS sequence (opt4) from LASV(G2511-SLE-2012;Clade IV)__AIT17295__NP
augagcgccagcaaggagaucaagagcuuccuguggacccagagccugagaagagagcugagcggcuacugcagcaacaucaagcugcagguggugaaggacgcccaggcccugcugcacggccuggacuucagcgaggugagcaacgugcagagacugaugagaaaggagagaagagacgacaacgaccugaagagacugagagaccugaaccaggccgugaacaaccugguggagcugaagagcacccagcagaagagcgugcugagagugggcacccugaccagcgacgaccugcugauccuggccgccgaccuggagaagcugaagagcaaggugaucagaaccgagagaccccugagcgccggcguguacaugggcaaccugagcagccagcagcuggaccagagaagagcccugcugaacaugaucggcaugggcggcagcaaccagggcgccagagccggcagagacggcguggugagagugugggacgugaagaacgccgagcugcugaacaaccaguucggcaccaugcccagccugacccuggccugccugaccaagcagggccagguggaccugaacgacgccgugcaggcccugaccgaccugggccugaucuacaccgccaaguaccccaacaccagcgaccuggacagacugacccagagccaccccauccugaacaugaucgacaccaagaagagcagccugaacaucagcggcuacaacuucagccugggcgccgccgugaaggccggcgccugcaugcuggacggcggcaacaugcuggagaccaucaaggugagcccccagaccauggacggcauccugaagagcauccugaaggugaagaaggcccugggcauguucaucagcgacacccccggcgagagaaaccccuacgagaacauccuguacaagaucugccugagcggcgacggcuggcccuacaucgccagcagaaccagcaucaccggcagagccugggagaacaccaucguggaccuggagagcgacggcaagccccagaaggccggcagcaacggcagcaacaagagccugcagagcgccggcuucaccgccggccugaccuacagccagcugaugacccugaaggacgccaugcugcagcuggaccccaacgccaagaccuggauggacaucgagggcagacccgaggaccccguggagaucgcccuguaccagcccagcagcggcugcuacauccacuucuucagagagcccaccgaccugaagcaguucaagcaggacgccaaguacagccacggcaucgacgugaccgaccuguucgccgcccagcccggccugaccagcgccaucaucgacgcccugcccagaaacauggugaucaccugccagggcagcgacgacaucagaaagcugcuggagagccagggcagaaaggacaucaagcugaucgacaucgcccugagcaagaccgacagcagaaaguacgagaacgccgugugggaccaguacaaggaccugugccacaugcacaccggcaucgugguggagaagaagaagagaggcggcaaggaggagaucaccccccacugcgcccugauggacugcaucauguucgacgccgccgugagcggcggccugaacaccagcgugcugagagccgugcugcccagagacaugguguucagaaccagcacccccagaguggugcuguga

SEQ ID NO: 8990 - RNA, 1710 nt, Artificial Sequence
  derived and/or modified CDS sequence (opt4) from LASV(G2554-SLE-2012;Clade IV)__AIT17299__NP
augagcgccagcaaggagaucaagagcuuccuguggacccagagccugagaagagagcugagcggcuacugcagcaacaucaagcugcagguggugaaggacgcccaggcccugcugcacggccuggacuucagcgaggugagcaacgugcagagacugaugagaaaggagagaagagacgacaacgaccugaagagacugagagaccugaaccaggccgugaacaaccugguggagcugaagagcacccagcagaagagcgugcugagagugggcacccugaccagcgacgaccugcuggugcuggccgccgaccuggagaagcugaagagcaaggugaccagaaccgagagaccccugagcgccggcguguacaugggcaaccugagcagccagcagcuggaccagagaagagcccugcugagcaugaucggcaugagcggcggcaaccagggcgccagaaccggcagagacggcguggugagagugugggacgugaagaacgccgagcugcugaacaaccaguucggcaccaugcccagccugacccuggccugccugaccaagcagggccagguggaccugaacgacguggugcaggcccugaccgaccugggccugaucuacaccgccaaguaccccaacaccagcgaccuggacagacugacccagagccaccccauccugaacaugaucgacaccaagaagagcagccugaacaucagcggcuacaacuucagccugggcgccgccgugaaggccggcgccugcaugcuggacggcggcaacaugcuggagaccaucaaggugagcccccagaccauggacggcauccugaagagcauccugaaggugaagaaggcccugggcauguucaucagcgacacccccggcgagagaaaccccuacgagaacauccuguacaagaucugccugagcggcgacggcuggcccuacaucgccagcagaaccagcaucaccggcagagccugggagaacaccgugguggaccuggagagcgacggcaagccccagaaggccggcagcaacaacagcaacaagagccugcagagcgccggcuucaccgccggccugaccuacagccagcugaugacccugaaggacgccaugcugcagcuggaccccaacgccaagaccuggauggacaucgagggcagacccgaggaccccguggagaucgcccuguaccagcccagcagcggcugcuacauccacuucuucagagagcccagcgaccugaagcaguucaagcaggacgccaaguacagccacggcaucgacgugaccgaccuguucgccgcccagcccggccugaccagcgccgugaucgacgcccugcccagaaacauggugaucaccugccagggcagcgacgacaucagaaagcuguucgagagccagggcagaaaggacaucaagcugaucgacaucgcccugagcaagaccgacagcagaaaguacgagaacgccgugugggaccaguacaaggaccugugccacaugcacaccggcguggugguggagaagaagaagagaggcggcaaggaggagaucaccccccacugcgcccugauggacugcaucauguucgacgccgccgugagcggcggccugaacagccuggugcugagagccgugcugcccagagacaugguguucagaaccagcacccccagaguggugcuguga

SEQ ID NO: 8991 - RNA, 1710 nt, Artificial Sequence
  derived and/or modified CDS sequence (opt4) from LASV(G2557-SLE-2012;Clade IV)__AIT17303__NP
augagcgccagcaaggagaucaagagcuuccuguggacccagagccugagaagagagcugagcggcuacugcagcaacaucaagcugcagguggugaaggacgcccaggcccugcugcacggccuggacuucagcgaggugagcaacgugcagagacugaugagaaagcagagaagagacgacagcgaccugaagagacugagagaccugaaccaggccgugaacaaccugguggagcugaagagcacccagcagaagagcgugcugagagugggcacccugaccagcgacgaccugcuggugcuggccgccgaccuggagaagcugaagagcaaggugaucagaaccgagagaccccugagcagcggcguguacaugggcaaccugagcagccagcagcuggaccagagaagagcccugcugaacaugaucggcaugagcggcggcaaccagggcgcccaggugggcagagacggcguggugagagugugggacgugaagaacgccgaccugcugaacaaccaguucggcaccaugcccagccugacccuggccugccugaccaagcagggccagguggaccugaacgacguggugcaggcccugaccgaccugggccugaucuacaccgccaaguaccccaacaccagcgaccuggacagacuggugcagagccaccccauccugaacaugaucgacaccaagaagagcagccugaacaucagcggcuacaacuucagccugggcgccgccgugaaggccggcgccugcaugcuggacggcggcaacaugcuggagaccaucaaggugagcccccagaccauggacggcauccugaagagcauccugaaggugaagaaggcccugggcauguucaucagcgagacccccggcgagagaaaccccuacgagaacauccuguacaagaucugccugagcggcgacggcuggcccuacaucgccagcagaaccagcaucaccggcagagccugggagaacaccaucguggaccuggagagcgacggcaagccccagaaggccggcagcaacaacagcaacaagagccugcagagcgccggcuucaccgccggccugaccuacagccagcugaugacccugaaggacagcaugcugcagcuggaccccaacgccaagaccuggauggacaucgagggcagacccgaggaccccguggagguggcccuguaccagcccagcagcggcugcuacauccacuucuucagagagcccaccgaccugaagcaguucaagcaggacgccaaguacagccacggcaucgacgugaccgaccuguucgccgcccagcccggccugaccagcgccgugaucgaggcccugcccagaaacauggugaucaccugccagggcagcgacgacaucagaaagcugcuggagagccagggcagaaaggacaucaagcugaucgacaucgcccugaacaagaccgacagcagaaaguacgagaacgccgugugggaccaguacaaggaccugugccacaugcacaccggcguggugguggagaagaagaagagaggcggcaaggaggagaucaccccccacugcgcccugauggacugcaucauguucgacgccgccgugagcggcggccugaagacccuggugcugagagccgugcugcccagagacaugguguucagaaccagcacccccaagguggugcuguga

SEQ ID NO: 8992 - RNA, 1710 nt, Artificial Sequence
  derived and/or modified CDS sequence (opt4) from LASV(G2565-SLE-2012;Clade IV)__AIT17307__NP
augagcgccagcaaggagaucaagagcuuccuguggacccagagccugagaagagagcugagcggcuacugcagcaacaucaagcugcagguggugaaggacgcccaggcccugcugcacggccuggacuucagcgaggugagcaacgugcagagacugaugagaaaggagagaagagacgacaacgaccugaagagacugagagaccugaaccaggccgugaacaaccugguggagcugaagagcacccagcagaagagcgugcugagagugggcacccugaccagcgacgaccugcugauccuggccgccgaccuggagaagcugaagagcaaggugaccagaaccgagagaccccugagcgccggcguguacaugggcaaccugagcagccagcagcuggaccagagaagagcccugcugagcaugaucggcaugagcggcggcaaccagggcgccagaaccggcagagacggcguggugagagugugggacgugaagaacgccgagcugcugaacaaccaguucggcaccaugcccagccugacccuggccugccugaccaagcagggccagguggaccugaacgacguggugcaggcccugaccgaccugggccugaucuacaccgccaaguaccccaacaccagcgaccuggacagacugacccagagccaccccauccugaacaugaucgacaccaagaagagcagccugaacaucagcggcuacaacuucagccugggcgccgccgugaaggccggcgccugcaugcuggacggcggcaacaugcuggagaccaucaaggugagcccccagaccauggacggcauccugaagagcauccugaaggugaagaaggcccugggcauguucaucagcgacacccccggcgagagaaaccccuacgagaacauccuguacaagaucugccugagcggcgacggcuggcccuacaucgccagcagaaccagcaucaccggcagagccugggagaacaccgugguggaccuggagagcgacggcaagcugcagaagaccggcagcaacaacagcaacaagagccugcagagcgccggcuucaccgccggccugaccuacagccagcugaugacccugaaggacgccaugcugcagcuggaccccaacgccaagaucuggauggacaucgagggcagacccgaggaccccguggagaucgcccuguaccagcccagcagcggcugcuacauccacuucuucagagagcccaccgaccugaagcaguucaagcaggacgccaaguacagccacggcaucgacgugaccgaccuguucgccgcccagcccggccugaccagcgccgugaucgacgcccugcccagaaacauggugaucaccugccagggcagcgacgacaucagaaagcugcuggagagccagggcagaaaggacaucaagcugaucgacaucgcccugaacaagaccgacagcagaaaguacgagaacgccgugugggaccaguacaaggaccugugccacaugcacaccggcguggugguggagaagaagaagaagggcggcaaggaggagaucaccccccacugcgcccugauggacugcaucauguucgacgccgccgugagcggcggccugaacaccagcgugcugagagccgugcugcccagagacaugguguucagaaccagcacccccagaguggugcuguga

SEQ ID NO: 8993 - RNA, 1710 nt, Artificial Sequence
  derived and/or modified CDS sequence (opt4) from LASV(G2587-SLE-2012;Clade IV)__AIT17311__NP
augagcgccagcaaggagaucaagagcuuccuguggacccagagccugagaagagagcugagcggcuacugcagcaacaucaagcugcagguggugaaggacgcccaggcccugcugcacggccuggacuucagcgaggugagcaacgugcagagacugaugagaaaggagagaagagacgacaacgaccugaagagacugagagaccugaaccaggccgugaacaaccugguggagcugaagagcacccagcagaagagcgugcugagagugggcacccugaccagcgacgaccugcugauccuggccgccgaccuggagaagcugaagagcaaggugaucagaaccgagagaccccugagcgccggcguguacaugggcaaccugagcagccagcagcuggaccagagaagagcccugcugaacaugaucggcaugggcggcagcaaccagggcgccagagccggcagagacggcguggugagagugugggacgugaagaacgccgagcugcugaacaaccaguucggcaccaugcccagccugacccuggccugccugaccaagcagggccagguggaccugaacgacgccgugcaggcccugaccgaccugggccugaucuacaccgccaaguaccccaacaccagcgaccuggacagacugacccagagccaccccauccugaacaugaucgacaccaagaagagcagccugaacaucagcggcuacaacuucagccugggcgccgccgugaaggccggcgccugcaugcuggacggcggcaacaugcuggagaccaucaaggugagcccccagaccauggacggcauccugaagagcauccugaaggugaagaaggcccugggcauguucaucagcgacacccccggcgagagaaaccccuacgagaacauccuguacaagaucugccugagcggcgacggcuggcccuacaucgccagcagaaccagcaucaccggcagagccugggagaacaccgugguggaccuggagagcgacggcaagccccagaaggccggcagcaacggcagcaacaagagccugcagagcgccggcuucaccgccggccugaccuacagccagcugaugacccugaaggacgccaugcugcagcuggaccccaacgccaagaccuggauggacaucgagggcagacccgaggaccccguggagguggcccuguaccagcccagcagcggcugcuacauccacuucuucagagagcccaccgaccugaagcaguucaagcaggacgccaaguacagccacggcaucgacgugaccgaccuguucgccgcccagcccggccugaccagcgccgugaucgacgcccugcccagaaacauggugaucaccugccagggcagcgacgacaucagaaagcugcuggagagccagggcagaaaggacaucaagcugaucgacaucgcccugagcaagaccgacagcagaaaguacgagaacgccgugugggaccaguacaaggaccugugccacaugcacaccggcaucgugguggagaagaagaagagaggcggcaaggaggagaucaccccccacugcgcccugauggacugcaucauguucgacgccgccgugagcggcggccugaacaccagcgugcugagagccgugcugcccagagacaugguguucagaaccagcacccccagaguggugcuguga

SEQ ID NO: 8994 - RNA, 1710 nt, Artificial Sequence
  derived and/or modified CDS sequence (opt4) from LASV(G2612-SLE-2012;Clade IV)__AIT17315__NP
augagcgccagcaaggagaucaagagcuuccuguggacccagagccugagaagagagcugagcggcuacugcagcaacaucaagcugcagguggugaaggacgcccaggcccugcugcacggccuggacuucagcgaggugagcaacgugcagagacugaugagaaaggagagaagagacgacaacgaccugaagagacugagagaccugaaccaggccgugaacaaccugguggagcugaagagcacccagcagaagagcgugcugagagugggcacccugaccagcgacgaccugcugauccuggccgccgaccuggagaagcugaagagcaaggugaccagaaccgagagaccccugagcgccggcguguacaugggcaaccugagcagccagcagcuggaccagagaagagcccugcugaacaugaucggcaugagcggcagcaaccagggcgccagagccggcagagacggcguggugagagugugggacgugaagaacguggagcugcugaacaaccaguucggcaccaugcccagccugacccuggccugccugaccaagcagggccagguggaccugaacgacgccgugcaggcccugaccgaccugggccugaucuacaccgccaaguaccccaacaccagcgaccuggacagacugacccagagccaccccauccugaacaugaucgacaccaagaagagcagccugaacaucagcggcuacaacuucagccugggcgccgccgugaaggccggcgccugcaugcuggacggcggcaacaugcuggagaccaucaaggugagcccccagaccauggacggcauccugaagagcauccugaaggugaagaaggcccugggcauguucaucagcgacacccccggcgagagaaaccccuacgagaacauccuguacaagaucugccugagcggcgacggcuggcccuacaucgccagcagaaccagcaucaccggcagagccugggagaacaccgugguggaccuggagagcgacggcaagccccagaaggccggcagcaacagcagcaacaagagccugcagagcgccggcuucaccgccggccugaccuacagccagcugaugacccugaaggacgccaugcugcagcuggaccccaacgccaagaccuggauggacaucgagggcagacccgaggaccccguggagaucgcccuguaccagcccagcagcggcugcuacauccacuucuucagagagcccaccgaccugaagcaguucaagcaggacgccaaguacagccacggcaucgacgugaccgaccuguucgccgcccagcccggccugaccagcgccgugaucgacgcccugcccagaaacauggugaucaccugccagggcagcgacgacaucagaaagcugcuggagagccagggcagaaaggacaucaagcugaucgacaucgcccugagcaagaccgacagcagaaaguacgagaacgccgugugggaccaguacaaggaccugugccacaugcacaccggcaucgugguggagaagaagaagaagggcagcaaggaggagaucaccccccacugcgcccugauggacugcaucauguucgacgccgccgugagcggcggccugaacgccagcgugcugagagccgugcugcccagagacaugguguucagaaccagcacccccagaguggugcuguga

SEQ ID NO: 8995 - RNA, 1710 nt, Artificial Sequence
  derived and/or modified CDS sequence (opt4) from LASV(G2615-SLE-2012;Clade IV)__AIT17319__NP
augagcgccagcaaggagaucaagagcuuccuguggacccagagccugagaagagagcugagcggcuacugcagcaacaucaagcugcagguggugaaggacgcccaggcccugcugcacggccuggacuucagcgaggugagcaacgugcagagacugaugagaaagcagagaagagacgacagcgaccugaagagacugagagaccugaaccaggccgugaacaaccugguggagcugaagagcacccagcagaagagcgugcugagagugggcacccugaccagcgacgaccugcuggugcuggccgccgaccuggagaagcugaagagcaaggugaucagaaccgagagaccccugagcagcggcguguacaugggcaaccugagcagccagcagcuggaccagagaagagcccugcugaacaugaucggcaugagcggcggcaaccagggcgcccaggugggcagagacggcguggugagagugugggacgugaagaacgccgacaugcugaacaaccaguucggcaccaugcccagccugacccuggccugccugaccaagcagggccagguggaccugaacgacguggugcaggcccugaccgaccugggccugaucuacaccgccaaguaccccaacaccagcgaccuggacagacuggcccagagccaccccauccugaacaugaucgacaccaagaagagcagccugaacaucagcggcuacaacuucagccugggcgccgccgugaaggccggcgccugcaugcuggacggcggcaacaugcuggagaccaucaaggugagcccccagaccauggacggcauccugaagagcauccugaaggugaagaaggcccugggcauguucaucagcgagacccccggcgagagaaaccccuacgagaacauccuguacaagaucugccugagcggcgacggcuggcccuacaucgccagcagaaccagcaucaccggcagagccugggagaacaccaucguggaccuggagagcgacggcaagccccagaaggccggcagcaacaacagcaacaagagccugcagagcgccggcuucaccgccggccugaccuacagccagcugaugacccugaaggacagcaugcugcagcuggaccccaacgccaagaccuggauggacaucgagggcagacccgaggaccccguggagguggcccuguaccagcccagcagcggcugcuacauccacuucuucagagagcccaccgaccugaagcaguucaagcaggacgccaaguacagccacggcaucgacgugaccgaccuguucgccgcccagcccggccugaccagcgccgugaucgaggcccugcccagaaacauggugaucaccugccagggcagcgacgacaucagaaagcugcuggagagccagggcagaaaggacaucaagcugaucgacaucgugcugaacaagaccgacagcagaaaguacgagaacgccgugugggaccaguacaaggaccugugccacaugcacaccggcguggugguggagaagaagaagagaggcggcaaggaggagaucaccccccacugcgcccugauggacugcaucauguucgacgccgccgugagcggcggccugaagaccauggugcugagagccgugcugcccagagacaugguguucagaaccagcacccccaagguggugcuguga

SEQ ID NO: 8996 - RNA, 1710 nt, Artificial Sequence
  derived and/or modified CDS sequence (opt4) from LASV(G2723-SLE-2012;Clade IV)__AIT17323__NP
augagcgccagcaaggagaucaagagcuuccuguggacccagagccugagaagagagcugagcggcuacugcagcaacaucaagcugcagguggugaaggacgcccaggcccugcugcacggccuggacuucagcgaggugagcaacgugcagagacugaugagaaagcagagaagagacgacagcgaccugaagagacugagagaccugaaccaggccgugaacaaccugguggagcugaagagcacccagcagaagagcgugcugagagugggcacccugaccagcgacgaccugcuggugcuggccgccgaccuggagaagcugaagagcaaggugaucagaaccgagagaccccugagcagcggcguguacaugggcaaccugagcagccagcagcuggaccagagaagagcccugcugaacaugaucggcaugagcggcggcaaccagggcgcccaggugggcagagacggcguggugagagugugggacgugaagaacgccgaccugcugaacaaccaguucggcaccaugcccagccugacccuggccugccugaccaagcagggccagguggaccugaacgacguggugcaggcccugaccgaccugggccugaucuacaccgccaaguaccccaacaccagcgaccuggacagacuggcccagagccaccccauccugaacaugaucgacaccaagaagagcagccugaacaucagcggcuacaacuucagccugggcgccgccgugaaggccggcgccugcaugcuggacggcggcaacaugcuggagaccaucaaggugagcccccagaccauggacggcauccugaagagcauccugaaggugaagaaggcccugggcauguucaucagcgagacccccggcgagagaaaccccuacgagaacauccuguacaagaucugccugagcggcgacggcuggcccuacaucgccagcagaaccagcaucaccggcagagccugggagaacaccaucguggaccuggagagcgacggcaagccccagaaggccggcagcaacaacagcaacaagagccugcagagcgccggcuucaccgccggccugaccuacagccagcugaugacccugaaggacagcaugcugcagcuggaccccaacgccaagaccuggauggacaucgagggcagacccgaggaccccguggagguggcccuguaccagcccagcagcggcugcuacauccacuucuucagagagcccaccgaccugaagcaguucaagcaggacgccaaguacagccacggcaucgacgugaccgaccuguucgccgcccagcccggccugaccagcgccgugaucgaggcccugcccagaaacauggugaucaccugccagggcagcgacgacaucagaaagcugcuggagagccagggcagaaaggacaucaagcugaucgacaucgcccugaacaagaccgacagcagaaaguacgagaacgccgugugggaccaguacaaggaccugugccacaugcacaccggcguggugguggagaagaagaagagaggcggcaaggaggagaucaccccccacugcgcccugauggacugcaucauguucgacgccgccgugagcggcggccugaagacccuggugcugagagccgugcugcccagagacaugguguucagaaccagcacccccaagguggugcuguga

SEQ ID NO: 8997 - RNA, 1710 nt, Artificial Sequence
  derived and/or modified CDS sequence (opt4) from LASV(G2789-SLE-2012;Clade IV)__AIT17325__NP
augagcgccagcaaggagaucaagagcuuccuguggacccagagccugagaagagagcugagcggcuacugcagcaacaucaagcugcagguggugaaggacgcccaggcccugcugcacggccuggacuucagcgaggugagcaacgugcagagacugaugagaaagcagagaagagacgacaacgaccugaagagacugagagaccugaaccaggccgugaacaaccugguggagcugaagagcacccagcagaagagcgugcugagagugggcacccugaccagcgacgaccugcuggugcuggccgccgaccuggagaagcugaagagcaaggugaccagaaccgagagaccccugagcgccggcguguacaugggcaaccugagcagccagcagcuggaccagagaagagcccugcugaacaugaucggcaugaccggcggcagcagaggcgcccaggccggcggcgacggcguggugagagugugggacgugaagaacgccgaccugcugaacaaccaguucggcaccaugcccagccugacccuggccugccugaccaagcagggccagguggaccugaacgacguggugcaggcccugaccgaccugggccugaucuacaccgccaaguaccccaacaccagcgaccuggacagacugacccagagccaccccauccugaacaugaucgacaccaagaagagcagccugaacaucagcggcuacaacuucagccugggcgccgccgugaaggccggcgccugcaugcuggacggcggcaacaugcuggagaccaucaaggugagcccccagaccauggacggcauccugaagagcauccugaaggugaagaagagccugggcauguucaucagcgacacccccggcgagagaaaccccuacgagaacauccuguacaagaucugccugagcggcgacggcuggcccuacaucgccagcagaaccagcaucaccggcagagccugggagaacaccgugguggaccuggagagcgacggcaagccccagaaggccggcggcaacaacagcaacaagagccugcagagcgccggcuucaccgccggccugaccuacagccagcugaugacccugaaggacaccaugcugcagcuggaccccaacgccaagaccuggauggacaucgagggcagacccgaggaccccguggagguggcccuguaccagcccagcagcggcugcuacauccacuucuucagagagcccaccgaccugaagcaguucaagcaggacgccaaguacagccacggcaucgacgugaccgaccuguucgccgcccagcccggccugaccagcgccgugaucgaggcccugcccagaaacauggugaucaccugccagggcagcgacgacaucagaaagcugcuggagagccagggcagaaaggacaucaagcugaucgacaucgcccugagcaagguggacagcagaaaguacgagaacgccgugugggaccaguacaaggaccugugccacaugcacaccggcguggugguggagaagaagaagagaggcggcaaggaggagaucaccccccacugcgcccugauggacugcaucauguucgacgccgccgugagcggcggccugaacacccuggugcugagagccgugcugcccagagacaugguguucagaaccagcacccccaagguggugcuguga

SEQ ID NO: 8998 - RNA, 1710 nt, Artificial Sequence
  derived and/or modified CDS sequence (opt4) from LASV(G2868-SLE-2012;Clade IV)__AIT17329__NP
augagcgccagcaaggagaucaagagcuuccuguggacccagagccugagaagagagcugagcggcuacugcagcaacaucaagcugcagguggugaaggacgcccaggcccugcugcacggccuggacuucagcgaggugagcaacgugcagagacugaugagaaaggagagaagagacgacagcgaccugaagagacugagagaccugaaccagaccgugaacaaccugguggagcugaagagcacccagcagaagagcauccugagagugggcacccugaccagcgacgaccugcugauccuggccgccgaccuggagaagcugaagagcaaggugaucagaaccgagagaccccugagcgccggcguguacaugggcaaccugagcagccagcagcuggaccagagaagagcccugcugaacaugaucggcaugagcagcggcaaccagggcgcccaggccggcagagacggcguggugagagugugggacgugaagaacgccgagcugcugaacaaccaguucggcaccaugcccagccugacccuggccugccugaccaagcagggccagguggaccugaacgacgccgugcaggcccugaccgaccugggccugaucuacaccgccaaguaccccaacaccagcgaccuggacagacugacccagagccaccccauccugaacaugaucgacaccaagaagagcagccugaacaucagcggcuacaacuucagccugggcgccgccgugaaggccggcgccugcaugcuggacggcggcaacaugcuggagaccaucaaggugagcccccagaccauggacggcauccugaagagcauccugaaggugaagaaggcccugggcauguucaucagcgacacccccggcgagagaaaccccuacgagaacauccuguacaagaucugccugagcggcgacggcuggcccuacaucgccagcagaaccagcaucaccggcagagccugggagaacaccgugguggaccuggagagcgacggcaugccccagaaggccggcagcagcagcagcaacaagagccugcagagcgccggcuucguggccggccugaccuacagccagcugaugacccugaaggacgccaugcugcagcuggaccccaacgccaagaccuggauggacaucgagggcagacccgaggaccccguggagaucgcccuguaccagcccagcagcggcugcuacauccacuucuucagagagcccaccgaccugaagcaguucaagcaggacgccaaguacagccacggcaucgacgugaccgaccuguucgccgcccagcccggccugaccagcgccgugaucgacgcccugcccagaaacauggugaucaccugccagggcagcgacgacaucagaaagcugcuggagagccagggcagaaaggacaucaagcugaucgacaucgcccugagcaaggccgacagcagaaaguacgagaacgccgugugggaccaguacaaggaccugugccacaugcacaccggcguggugguggagaagaagaagagaggcggcaaggaggagaucaccccccacugcgcccugauggacugcaucauguacgacgccgccgugagcggcggccugaacaccagcgugcugagagccgugcugcccagagacaugguguucagaaccagcacccccagaguggugcuguga

SEQ ID NO: 8999 - RNA, 1710 nt, Artificial Sequence
  derived and/or modified CDS sequence (opt4) from LASV(G2903-SLE-2012;Clade IV)__AIT17333__NP
augagcgccagcaaggagaucaagagcuuccuguggacccagagccugagaagagagcugagcggcuacugcagcaacaucaagcugcagguggugaaggacgcccaggcccugcugcacggccuggacuucagcgaggugagcaacgugcagagacugaugagaaaggagagaagagacgacaacgaccugaagagacugagagaccugaaccaggccgugaacaaccugguggagcugaagagcacccagcagaagagcgugcugagagugggcacccugaccagcgacgaccugcugauccuggccgccgaccuggagaagcugaagagcaaggugaccagaaccgagagaccccugagcgccggcguguacaugggcaaccugagcagccagcagcuggaccagagaagagcccugcugaacaugaucggcaugagcggcggcaaccagggcgccagagccggcagagacggcguggugagagugugggacgugaagaacgccgagcugcugaacaaccaguucggcaccaugcccagccugacccuggccugccugaccaagcagggccagguggaccugaacgacgccgugcaggcccugaccgaccugggccugaucuacaccgccaaguaccccaacaccagcgaccuggacagacugacccagagccaccccauccugaacaugaucgacaccaagaagagcagccugaacaucagcggcuacaacuucagccugggcgccgccgugaaggccggcgccugcaugcuggacggcggcaacaugcuggagaccaucaaggugagcccccagaccauggacagcauccugaagagcauccugaaggugaagaaggcccugggcauguucaucagcgacacccccggcgagagaaaccccuacgagaacauccuguacaagaucugccugagcggcgacggcuggcccuacaucgccagcagaaccagcaucaccggcagagccugggagaacaccgugguggaccuggagagcgacggcaagccccagaaggccggcagcaacaacagcaacaagagccugcagagcgccggcuucgccgccggccugaccuacagccagcugaugacccugaaggacgccaugcugcagcuggaccccaacgccaagaccuggauggacaucgagggcagacccgaggaccccguggagaucgcccuguaccagcccagcagcggcugcuacauccacuucuucagagagcccaccgaccugaagcaguucaagcaggacgccaaguacagccacggcaucgacgugaccgaccuguucgccgcccagcccggccugaccagcgccgugaucgacgcccugcccagaaacauggugaucaccugccagggcagcgacgacaucagaaagcugcuggagagccagggcagaaaggacaucaagcugaucgacaucgcccugagcaagaccgacagcagaaaguacgagaacgccgugugggaccaguacaaggaccugugccacaugcacaccggcaucgugguggagaagaagaagagaggcggcaaggaggagaucaccccccacugcgcccugauggacugcaucauguucgacgccgccgugagcggcggccugaacaccagcgugcugagagccgugcugcccagagacaugguguucagaaccagcacccccagaguggugcuguga

SEQ ID NO: 9000 - RNA, 1710 nt, Artificial Sequence
  derived and/or modified CDS sequence (opt4) from LASV(G2906-SLE-2012;Clade IV)__AIT17335__NP
augagcgccagcaaggagaucaagagcuuccuguggacccagagccugagaagagagcugagcggcuacugcagcaacaucaagcugcagguggugaaggacgcccaggcccugcugcacggccuggacuucagcgaggugagcaacgugcagagacugaugagaaaggagagaagagacgacagcgaccugaagagacugagagaccugaaccaggccgugaacaaccugguggagcugaagagcacccagcagaagagcauccugagagugggcacccugaccagcgacgaccugcugauccuggccgccgaccuggagaagcugaagagcaaggugaccagaaccgagagaccccugagcgccggcguguacaugggcaaccugagcagccagcagcuggaccagagaagagcccugcugagcaugaucggcaugagcagcggcgugcagggcgccagagccggcagagacggcguggugagagugugggacgugaagaacgccgagcugcugaacaaccaguucggcaccaugcccagccugacccuggccugccugaccaagcagggccagguggaccugaacgacguggugcaggcccugaccgaccugggccugaucuacaccgccaaguaccccaacaccagcgaccuggacagacugacccagagccaccccauccugaacaugaucgacaccaagaagagcagccugaacaucagcggcuacaacuucagccugggcgccgccgugaaggccggcgccugcaugcuggacggcggcaacaugcuggagaccaucaaggugagcccccagaccauggacggcauccugaagagcauccugaaggugaagaaggcccugggcauguucaucagcgagacccccggcgagagaaaccccuacgagaacauccuguacaagaucugccugagcggcgacggcuggcccuacaucgccagcagaaccagcaucaccggcagagccugggagaacaccgugguggaccuggagagcgacggcaagccccagaaggccggcagcaacaacagcaacaagagccugcagagcaccggcuucgccgccggccugaccuacagccagcugaugacccugaaggacgccaugcugcagcuggaccccaacgccaagaccuggauggacaucgagggcagacccgaggaccccguggagguggcccuguaccagcccagcagcggcugcuacauccacuucuucagagagcccaccgaccugaagcaguucaagcaggacgccaaguacagccacggcaucgacgugaccgaccuguucgccgcccagcccggccugaccagcgccgugaucgacgcccugcccagaaacauggugaucaccugccagggcagcgacgacaucaagaagcugcuggagagccagggcagaaaggacaucaagcugaucgacaucgcccugagcaagaccgacagcagaaaguacgagaacgccgugugggaccaguacaaggaccugugccacaugcacaccggcguggugguggagaagaagaagagaggcggcaaggaggagaucaccccccacugcgcccugauggacugcaucauguucgacgccgccgugagcggcggccugaacaccagcgugcugagagccgugcugcccagagacaugguguucagaaccagcacccccagaguggugcuguga

SEQ ID NO: 9001 - RNA, 1710 nt, Artificial Sequence
  derived and/or modified CDS sequence (opt4) from LASV(G2944-SLE-2012;Clade IV)__AIT17341__NP
augagcgccagcaaggagaucaagagcuuccuguggacccagagccugagaagagagcugagcggcuacugcagcaacaucaagcugcagguggugaaggacgcccaggcccugcugcacggccuggacuucagcgaggugagcaacgugcagagacugaugagaaaggagagaagagacgacaacgaccugaagagacugagagaccugaaccaggccgugaacaaccugguggagcugaagagcacccagcagaagagcauccugagagugggcacccugaccagcgacgaccugcugauccuggccgccgaccuggagaagcugaagagcaaggugaccagaaccgagagaccccugagcgccggcguguacaugggcaaccugagcagccagcagcuggaccagagaagagcccugcugaacaugaucggcaugagcggcggcaaccagggcgccagagccggcagagacggcguggugagagugugggacgugaagaacgccgagcugcugaacaaccaguucggcaccaugcccagccugacccuggccugccugaccaagcagggccagguggaccugaacgacgccgugcaggcccugaccgaccugggccugaucuacaccgccaaguaccccaacaccagcgaccuggacagacugacccagagccaccccauccugaacaugaucgacaccaagaagagcagccugaacaucagcggcuacaacuucagccugggcgccgccgugaaggccggcgccugcaugcuggacggcggcaacaugcuggagaccaucaaggugagcccccagaccauggacggcauccugaagagcauccugaaggugaagaaggcccugggcauguucaucagcgacgcccccggcgagagaaaccccuacgagaacauccuguacaagaucugccugagcggcgacggcuggcccuacaucgccagcagaaccagcaucaccggcagagccugggagaacaccgugguggaccuggagagcgacggcaagccccagaaggccggcagcaacggcagcaacaagagccugcagagcgccggcuucaccgccggccugaccuacagccagcugaugacccugaaggacgccaugcugcagcuggaccccaacgccaagaccuggauggacaucgagggcagacccgaggaccccguggagaucgcccuguaccagcccagcagcggcugcuacauccacuucuucagagagcccaccgaccugaagcaguucaagcaggacgccaaguacagccacggcaucgacgugaccgaccuguucgccgcccagcccggccugaccagcgccgugaucgacgcccugcccagaaacauggugaucaccugccagggcagcgacgacaucagaaagcuguucgagagccagggcagaaaggacaucaagcugaucgacaucgcccugagcaaggccgacagcagaaaguacgagaacgccgugugggaccaguacaaggaccugugccacaugcacaccggcguggugguggagaagaagaagagaggcggcaaggaggagaucaccccccacugcgcccugauggacugcaucauguucgacgccgccgugagcggcggccugaacaccagcgugcugagagccgugcugcccagagacaugguguucagaaccagcacccccagaguggugcuguga

SEQ ID NO: 9002 - RNA, 1710 nt, Artificial Sequence
  derived and/or modified CDS sequence (opt4) from LASV(G3010-SLE-2013;Clade IV)__AIT17345__NP
augagcgccagcaaggagaucaagagcuuccuguggacccagagccugagaagagagcugagcggcuacugcagcaacaucaagcugcagguggugaaggacgcccaggcccugcugcacggccuggacuucagcgaggugagcaacgugcagagacugaugagaaaggagagaagagacgacaacgaccugaagagacugagagaccugaaccaggccgugaacaaccugguggagcugaagagcacccagcagaagagcauccugagagugggcacccugaccagcgacgaccugcugauccuggccgccgaccuggagaagcugaagagcaaggugaccagaaccgagagaccccugagcgccggcguguacaugggcaaccugagcagccagcagcuggaccagagaagagcccugcugagcaugaucggcaugagcagcggcgugcagggcgccagagccggcagagacggcguggugagagugugggacgugaagaacgccgagcugcugaacaaccaguucggcaccaugcccagccugacccuggccugccugaccaagcagggccagguggaccugaacgacguggugcaggcccugaccgaccugggccugaucuacaccgccaaguaccccaacaccagcgaccuggacagacugacccagagccaccccauccugaacaugaucgacaccaagaagagcagccugaacaucagcggcuacaacuucagccugggcgccgccgugaaggccggcgccugcaugcuggacggcggcaacaugcuggagaccaucaaggugagcccccagaccauggacggcauccugaagagcauccugaaggugaagaaggcccugggcauguucaucagcgagacccccggcgagagaaaccccuacgagaacauccuguacaagaucugccugagcggcgacggcuggcccuacaucgccagcagaaccagcaucaccggcagagccugggagaacaccgugguggaccuggagagcgacggcaagccccagaaggccggcagcaacaacagcaacaagagccugcagagcgccggcuucaccgccggccugaccuacagccagcugaugacccugaaggacgccaugcugcagcuggaccccaacgccaagaccuggauggacaucgagggcagacccgaggaccccguggagguggcccuguaccagcccagcagcggcugcuacauccacuucuucagagagcccaccgaccugaagcaguucaagcaggacgccaaguacagccacggcaucgacgugaccgaccuguucgccgcccagcccggccugaccagcgccgugaucgacgcccugcccagaaacauggugaucaccugccagggcagcgacgacaucaagaagcugcuggagagccagggcagaaaggacaucaagcugaucgacaucgcccugagcaagaccgacagcagaaaguacgagaacgccgugugggaccaguacaaggaccugugccacaugcacaccggcguggugguggagaagaagaagagaggcggcaaggaggagaucaccccccacugcgcccugauggacugcaucauguucgacgccgccgugagcggcggccugaacaccagcgugcugagagccgugcugcccagagacaugguguucagaaccagcacccccagaguggugcuguga

SEQ ID NO: 9003 - RNA, 1710 nt, Artificial Sequence
  derived and/or modified CDS sequence (opt4) from LASV(G3016-SLE-2013;Clade IV)__AIT17349__NP
augagcgccagcaaggagaucaagagcuuccuguggacccagagccugagaagagagcugagcggcuacugcagcaacaucaagcugcagguggugaaggacgcccaggcccugcugcacggccuggacuucagcgaggugagcaacgugcagagacugaugagaaaggagagaagagacgacagcgaccugaagagacugagagaccugaaccaggccgugaacaaccugguggagcugaagagcacccagcagaagagcauccugagagugggcacccugaccagcgacgaccugcugauccuggccgccgaccuggagaagcugaagagcaaggugaccagaaccgagagaccccugagcgccggcguguacaugggcaaccugagcagccagcagcuggaccagagaagagcccugcugaacaugcugggcaugagcggcagcaaccagggcgccagagccggcagagacggcguggugagagugugggacgugaagaacgccgagcugcugaacaaccaguucggcaccaugcccagccugacccuggccugccugaccaagcagggccagguggaccugaacgacgccgugcaggcccugaccgaccugggccugaucuacaccgccaaguaccccaacaccagcgaccuggacagacugacccagagccaccccauccugaacaugaucgacaccaagaagagcagccugaacaucagcggcuacaacuucagccugggcgccgccgugaaggccggcgccugcaugcuggacggcggcaacaugcuggagaccaucaaggugagcccccagaccauggacggcauccugaagagcauccugaaggugaagaaggcccugggcauguucaucagcgacacccccggcgagagaaaccccuacgagaacauccuguacaagaucugccugagcggcgacggcuggcccuacaucgccagcagaaccagcaucaccggcagagccugggagaacaccgugguggaccuggagagcgacgagaagccccagaaggccggcagcaacagcagcaacaagagccugcagagcgccggcuucaccgccggccugaccuacagccagcugaugacccugaaggacgccaugcugcagcuggaccccaacgccaagaccuggauggacaucgagggcagacccgaggaccccguggagaucgcccuguaccagcccagcagcggcugcuacauccacuucuucagagagcccaccgaccugaagcaguucaagcaggacgccaaguacagccacggcaucgacgugaccgaccuguucgccgcccagcccggccugaccagcgccgugaucgacgcccugcccagaaacauggugaucaccugccagggcagcgacgacaucagaaagcugcuggagagccagggcagaaaggacaucaagcugaucgacaucgcccugagcaagaccgacagcagaaaguacgagaacgccgugugggaccaguacaaggaccugugccacaugcacaccggcaucgugguggagaagaagaagagaggcggcaaggaggagaucaccccccacugcgcccugauggacugcaucauguucgacgccgccgugagcggcggccugaacgccagcgugcugagagccgugcugcccagagacaugguguucagaaccagcacccccagaguggugcuguga

SEQ ID NO: 9004 - RNA, 1710 nt, Artificial Sequence
  derived and/or modified CDS sequence (opt4) from LASV(G3034-SLE-2013;Clade IV)__AIT17351__NP
augagcgccagcaaggagaucaagagcuuccuguggacccagagccugagaagagagcugagcggcuacugcagcaacaucaagcugcagguggugaaggacgcccaggcccugcugcacggccuggacuucagcgaggugagcaacgugcagagacugaugagaaagcagagaagagacgacggcgaccugaagagacugagagaccugaaccaggccgugaacaaccugguggagcugaagagcacccagcagaagagcgugcugagagugggcacccugaccagcgacgaccugcugauccuggccgccgaccuggagaagcugaagagcaaggugaucagaaccgagagaccccugagcgccggcguguacaugggcaaccugagcagccagcagcuggagcagagaagagcccugcugaacaugaucggcaugagcagcggcaaccagggcgccagaaccggcaaggacggcguggugagaaucugggacgugaagaacgccgaccugcugaacaaccaguucggcaccaugcccagccugacccuggccugccugaccaagcagggccagguggaccugaacgacguggugcaggcccugaccgaccugggccugaucuacaccgccaaguaccccaacaccagcgaccuggacagacugacccagagccaccccauccugaacaugguggacaccagcaagagcagccugaacaucagcggcuacaacuucagccugggcgccgccgugaaggccggcgccugcaugcuggacggcggcaacaugcuggagaccaucaaggugagcccccagaccauggacggcauccugaagagcauccugaaggugaagaagagccugggcauguucgugagcgacacccccggcgagagaaaccccuacgagaacauccuguacaagaucugccugagcggcgacggcuggcccuacaucgccagcagaaccagcaucaccggcagagccugggagaacaccgugguggaccuggagagcaacggcaagccccagaaggccggcagcaacaacagcaacaagagccugcagagcaccggcuucaccgccggccugaccuacagccagcugaugacccugaaggacgccaugcugcagcuggaccccaacgccaagaccuggauggacaucgagggcagacccgaggaccccguggagaucgcccuguaccagcccagcagcggcugcuacauccacuucuucagagagcccaccgaccugaagcaguucaagcaggacgccaaguacagccacggcaucgacgugaccgaccuguucgccgcccagcccggccugaccagcgccgugaucgacacccugcccagaaacauggugaucaccugccagggcagcgacgacaucagaaagcugcuggagagccagggcagaaaggacaucaagcugaucgacaucgcccugagcaagaucgacagcagaaaguacgagaacgccgugugggaccaguacaaggaccugugccacaugcacaccggcguggugguggagaagaagaagagaggcggcaaggaggagaucaccccccacugcgcccugauggacugcaucauguucgacgccgccgugagcggcggccugaacgccagcgugcugagagccgugcugcccagagacaugguguucagaaccagcacccccagaguggugcuguga

SEQ ID NO: 9005 - RNA, 1710 nt, Artificial Sequence
  derived and/or modified CDS sequence (opt4) from LASV(G3110-SLE-2013;Clade IV)__AIT17361__NP
augagcgccagcaaggagaucaagagcuuccuguggacccagagccugagaagagagcugagcggcuacugcagcaacaucaagcugcagguggugaaggacgcccaggcccugcugcacggccuggacuucagcgaggugagcaacgugcagagacugaugagaaaggagagaagagacgacagcgaccugaagagacugagagaccugaaccaggccgugaacaaccugguggagcugaagagcacccagcagaagagcgugcugagagugggcacccugaccagcgacgaccugcuggugcuggccgccgaccuggagaagcugaagagcaaggugaccagaaccgagagaccccugagcgccggcguguacaugggcaaccugagcagccagcagcuggaccagagaagagcccugcugaacaugaucggcaugagcggcggcaaccagggcgccagagccggcagagacggcguggugagaaucugggacgugaagaacgccgagcugcugaacaaccaguucggcaccaugcccagccugacccuggccugccugaccaagcagggccagguggaccugaacgacguggugcaggcccugaccgaccugggccugaucuacaccgccaaguaccccaacaccagcgaccuggacagacugacccagagccaccccauccugaacaugaucgacaccaagaagagcagccugaacaucagcggcuacaacuucagccugggcgccgccgugaaggccggcgccugcaugcuggacggcggcaacaugcuggagaccaucaaggugagcccccagaccauggacggcauccugaagagcauccugaaggugaagaaggcccugggcauguucaucagcgacacccccggcgagagaaaccccuacgagaacauccuguacaagaucugccugagcggcgacggcuggcccuacaucgccagcagaaccagcaucaccggcagagccugggagaacaccaucguggaccuggagagcgacggcaagccccagaagaccaacaacaccaacagcaacaagagccugcagagcgccggcuucgccgccggccugaccuacagccagcugaugacccugaaggacgccaugcugcagcuggaccccaacgccaagaccuggauggacaucgagggcagacccgaggaccccguggagaucgcccuguaccagcccagcagcggcugcuacauccacuucuucagagagcccaccgaccugaagcaguucaagcaggacgccaaguacagccacggcaucgacgugaccgaccuguucgccgcccagcccggccugaccagcgccgugaucgacacccugcccagaaacauggugaucaccugccagggcagcgaggacaucagaagacugcuggagagccagggcagaaaggacaucaagcugaucgacaucgcccugagcaagaccgacagcagaaaguacgagaacgccgugugggaccaguacaaggaccugugccacaugcacaccggcguggugguggagaagaagaagaagggcggcaaggaggagaucaccccccacugcgcccugauggacugcaucauguucgacgccgccgugagcggcggccugaacaccagcgugcugagagccgugcugcccagagacaugguguucagaaccagcacccccagaguggugcuguga

SEQ ID NO: 9006 - RNA, 1710 nt, Artificial Sequence
  derived and/or modified CDS sequence (opt4) from LASV(G3148-SLE-2013;Clade IV)__AIT17365__NP
augagcgccagcaaggagaucaagagcuuccuguggacccagagccugagaagagagcugagcggcuacugcagcaacaucaagcugcagguggugaaggacgcccaggcccugcugcacggccuggacuucagcgaggugagcaacgugcagagacugaugagaaaggagagaagagacgacaacgaccugaagagacugagagaccugaaccaggccgugaacaaccugguggagcugaagagcacccagcagaagagcauccugagagugggcacccugaccagcgacgaccugcugauccuggccgccgaccuggagaagcugaagagcaaggugaccagaaccgagagaccccugagcgccggcguguacaugggcaaccugagcagccagcagcuggaccagagaagagcccugcugaacaugaucggcaugagcggcagcaaccagggcgcccaggccggcagagacggcguggugagagugugggacgugaagaacgccgagcugcugaacaaccaguucggcaccaugcccagccugacccuggccugccugaccaagcagggccagguggaccugaacgacgccgugcaggcccugaccgaccugggccugaucuacaccgccaaguaccccaacaccagcgaccuggacagacugacccagagccaccccauccugaacaugaucgacaccaagaagagcagccugaacaucagcggcuacaacuucagccugggcgccgccgugaaggccggcgccugcaugcuggacggcggcaacaugcuggagaccaucaaggugagcccccagaccauggacggcauccugaagagcauccugaaggugaagaaggcccugggcauguucaucagcgacgcccccggcgagagaaaccccuacgagaacauccuguacaagaucugccugagcggcgacggcuggcccuacaucgccagcagaaccagcaucaccggcagagccugggagaacaccgugguggaccuggagagcgacggcaagccccagaaggccggcagcaacggcagcaacaagagccugcagagcgccggcuucaccgccggccugaccuacagccagcugaugacccugaaggacgccaugcugcagcuggaccccaacgccaagaccuggauggacaucgagggcagacccgaggaccccguggagaucgcccuguaccagcccagcagcggcugcuacauccacuucuucagagagcccaccgaccugaagcaguucaagcaggacgccaaguacagccacggcaucgacgugaccgaccuguucgccgcccagcccggccugaccagcgccgugaucgacgcccugcccagaaacauggugaucaccugccagggcagcgacgacaucagaaagcuguucgagagccagggcagaaaggacaucaagcugaucgacaucgcccugagcaagaccgacagcagaaaguacgagaacgccgugugggaccaguacaaggaccugugccacaugcacaccggcaucgugguggagaagaagaagagaggcggcaaggaggagaucaccccccacugcgcccugauggacugcaucauguucgacgccgccgugagcggcggccugaacaccagcgugcugagagccgugcugcccagagacaugguguucagaaccagcacccccagaguggugcuguga

SEQ ID NO: 9007 - RNA, 1710 nt, Artificial Sequence
  derived and/or modified CDS sequence (opt4) from LASV(G3151-SLE-2013;Clade IV)__AIT17369__NP
augagcgccagcaaggagaucaagagcuuccuguggacccagagccugagaagagagcugagcggcuacugcagcaacaucaagcugcagguggugaaggacgcccaggcccugcugcacggccuggacuucagcgaggugagcaacgugcagagacugaugagaaaggagagaagagacgacagcgaccugaagagacugagagaccugaaccaggccgugaacaaccugguggagcugaagagcacccagcagaagagcgugcugagagugggcacccugaccagcgacgaccugcuggugcuggccgccgaccuggagaagcugaagagcaaggugaccagaaccgagagaccccugagcgccggcguguacaugggcaaccugagcagccagcagcuggaccagagaagagcccugcugagcaugaucggcaugagcggcggcaaccagggcgccagagccggcagagacggcguggugagaaucugggacgugaagaacgccgagcugcugaacaaccaguucggcaccaugcccagccugacccuggccugccugaccaagcagggccagguggaccugaacgacguggugcaggcccugaccgaccugggccugaucuacaccgccaaguaccccaacaccagcgaccuggacagacugacccagagccaccccauccugaacaugaucgacaccaagaagagcagccugaacaucagcggcuacaacuucagccugggcgccgccgugaaggccggcgccugcaugcuggacggcggcaacaugcuggagaccaucaaggugagcccccagaccauggacggcauccugaagagcauccugaaggugaagaaggcccugggcauguucaucagcgacacccccggcgagagaaaccccuacgagaacauccuguacaagaucugccugagcggcgacggcuggcccuacaucgccagcagaaccagcaucaccggcagagccugggagaacaccaucguggaccuggagagcgacggcaagccccagaagaccagcaacaccaacagcaacaagagccugcagagcgccggcuucgccgccggccugaccuacagccagcugaugacccugaaggacgccaugcugcagcuggaccccaacgccaagaccuggauggacaucgagggcagacccgaggaccccguggagaucgcccuguaccagcccagcagcggcugcuacauccacuucuucagagagcccaccgaccugaagcaguucaagcaggacgccaaguacagccacggcaucgacgugaccgaccuguucgccgcccagcccggccugaccagcgccgugaucgacgcccugcccagaaacauggugaucaccugccagggcagcgaggacaucagaaagcugcuggagagccagggcagaaaggacaucaagcugaucgacaucgcccugagcaagaccgacagcagaaaguacgagaacgccgugugggaccaguacaaggaccugugccacaugcacaccggcguggugguggagaagaagaagaagggcggcaaggaggagaucaccccccacugcgcccugauggacugcaucauguucgacgccgccgugagcggcggccugaacaccagcgugcugagagccgugcugcccagagacaugguguucagaaccagcacccccagaguggugcuguga

SEQ ID NO: 9008 - RNA, 1710 nt, Artificial Sequence
  derived and/or modified CDS sequence (opt4) from LASV(G3157-SLE-2013;Clade IV)__AIT17371__NP
augagcgccagcaaggagaucaagagcuuccuguggacccagagccugagaagagagcugagcggcuacugcagcaacaucaagcugcagguggugaaggacgcccaggcccugcugcacggccuggacuucagcgaggugagcaacgugcagagacugaugagaaaggagagaagagacgacaacgaccugaagagacugagagaccugaaccaggccgugaacaaccugguggagcugaagagcacccagcagaagagcauccugagagugggcacccugaccagcgacgaccugcugauccuggccgccgaccuggagaagcugaagagcaaggugaccagaaccgagagaccccugagcgccggcguguacaugggcaaccugagcagccagcagcuggaccagagaagagcccugcugaacaugaucggcaugagcggcagcaaccagggcgcccaggccggcagagacggcguggugagagugugggacgugaagaacgccgagcugcugaacaaccaguucggcaccaugcccagccugacccuggccugccugaccaagcagggccagguggaccugaacgacgccgugcaggcccugaccgaccugggccugaucuacaccgccaaguaccccaacaccagcgaccuggacagacugacccagagccaccccauccugaacaugaucgacaccaagaagagcagccugaacaucagcggcuacaacuucagccugggcgccgccgugaaggccggcgccugcaugcuggacggcggcaacaugcuggagaccaucaaggugagcccccagaccauggacggcauccugaagagcauccugaaggugaagaaggcccugggcauguucaucagcgacgcccccggcgagagaaaccccuacgagaacauccuguacaagaucugccugagcggcgacggcuggcccuacaucgccagcagaaccagcaucaccggcagagccugggagaacaccgugguggaccuggagagcgacggcaagccccagaaggccggcagcaacagcagcaacaagagccugcagagcgccggcuucaccgccggccugaccuacagccagcugaugacccugaaggacgccaugcugcagcuggaccccaacgccaagaccuggauggacaucgagggcagacccgaggaccccguggagaucgcccuguaccagcccagcagcggcugcuacauccacuucuucagagagcccaccgaccugaagcaguucaagcaggacgccaaguacagccacggcaucgacgugaccgaccuguucgccgcccagcccggccugaccagcgccgugaucgacgcccugcccagaaacauggugaucaccugccagggcagcgacgacaucagaaagcuguucgagagccagggcagaaaggacaucaagcugaucgacaucgcccugagcaagaccgacagcagaaaguacgagaacgccgugugggaccaguacaaggaccugugccacaugcacaccggcaucgugguggagaagaagaagagaggcggcaaggaggagaucaccccccacugcgcccugauggacugcaucauguucgacgccgccgugagcggcggccugaacaccagcgugcugagagccgugcugcccagagacaugguguucagaaccagcacccccagaguggugcuguga

SEQ ID NO: 9009 - RNA, 1710 nt, Artificial Sequence
  derived and/or modified CDS sequence (opt4) from LASV(G3206-SLE-2013;Clade IV)__AIT17379__NP
augagcgccagcaaggagaucaagagcuuccuguggacccagagccugagaagagagcugagcggcuacugcagcaacaucaagcugcagguggugaaggacgcccaggcccugcugcacggccuggacuucagcgaggugagcaacgugcagagacugaugagaaaggagagaagagacgacagcgaccugaagagacugagagaccugaaccaggccgugaacaaccugguggagcugaagagcacccagcagaagagcgugcugagagugggcacccugaccagcgacgaccugcugauccuggccgccgaccuggagaagcugaagagcaaggugaccagaaccgagagaccccugagcgccggcguguacaugggcaaccugagcagccagcagcuggaccagagaagagcccugcugaacaugaucggcaugagcagcggcaacagaggcgcccaggccggcagagacggcguggugagagugugggacgugaagaacgccgagcugcugaacaaccaguucggcaccaugcccagccugacccuggccugccugaccaagcagggccagguggaccugaacgacgccgugcaggcccugaccgaccugggccugaucuacaccgccaaguaccccaacaccagcgaccuggacagacugacccagagccaccccauccugaacaugguggacaccaagaagagcagccugaacaucagcggcuacaacuucagccugggcgccgccgugaaggccggcgccugcaugcuggacggcggcaacaugcuggagaccaucaaggugagcccccagaccauggacggcauccugaagagcauccugaaggugaagaaggcccugggcauguucaucagcgacacccccggcgagagaaaccccuacgagaacauccuguacaagaucugccugagcggcgacggcuggcccuacaucgccagcagaaccagcaucaccggcagagccugggagaacaccgugguggaccuggagagcgacggcaagccccagaaggccggcagcaacaacagcaacaagagccugcagagcgccggcuucgccgccggccugaccuacagccagcugaugacccugaaggacgccaugcugcagcuggaccccaacgccaagaccuggauggacaucgagggcagacccgaggaccccguggagaucgcccuguaccagcccagcagcggcugcuacauccacuucuucagagagcccaccgaccugaagcaguucaagcaggacgccaaguacagccacggcaucgacgugaccgaccuguucgccgcccagcccggccugaccagcgccgugaucgacgcccugcccagaaacauggugaucaccugccagggcagcgacgacaucagaaagcugcuggagagccagggcagaaaggacaucaagcugaucgacaucgcccugagcaagaccgacagcagaaaguacgagaacgccgugugggaccaguacaaggaccugugccacaugcacaccggcaucgugguggagaagaagaagagaggcggcaaggaggagaucaccccccacugcgcccugauggacugcaucauguucgacgccgccgugagcggcggccugaacaccagcgugcugagagccgugcugcccagagacaugguguucagaaccagcacccccagaguggugcuguga

SEQ ID NO: 9010 - RNA, 1710 nt, Artificial Sequence
  derived and/or modified CDS sequence (opt4) from LASV(G3234-SLE-2013;Clade IV)__AIT17389__NP
augagcgccagcaaggagaucaagagcuuccuguggacccagagccugagaagagagcugagcggcuacugcagcaacaucaagcugcagguggugaaggacgcccaggcccugcugcacggccuggacuucagcgaggugagcaacgugcagagacugaugagaaagcagagaagagacgacggcgaccugaagagacugagagaccugaaccaggccgugaacaaccugguggagcugaagagcacccagcagaagagcgugcugagagugggcacccugaccagcgacgaccugcugauccuggccgccgaccuggagaagcugaagagcaaggugaccagaaccgagagaccccugagcgccggcguguacaugggcaaccugagcagccagcagcuggaccagagaagagcccugcugaacaugaucggcaugagcggcggcaaccagggcgccagaaccggcaaggacggcguggugagaaucugggacgugaagaacgccgaccugcugaacaaccaguucggcaccaugcccagccugacccuggccugccugaccaagcagggccagguggaccugaacgacguggugcaggcccugaccgaccugggccugaucuacaccgccaaguaccccaacaccagcgaccuggacagacugacccagagccaccccauccugaacaugaucgacaccagcaagagcagccugaacaucagcggcuacaacuucagccugggcgccgccgugaaggccggcgccugcaugcuggacggcggcaacaugcuggagaccaucaaggugagcccccagaccauggacggcauccugaagagcauccugaaggugaagaagagccugggcauguucaucagcgacacccccggcgagagaaaccccuacgagaacauccuguacaagaucugccugagcggcgacggcuggcccuacaucgccagcagaaccagcaucaccggcagagccugggagaacaccgugguggaccuggagagcgacggcaagccccagaaggccggcagcaacaacagcaacaagagccugcagagcaccggcuucaccgccggccugaccuacagccagcugaugacccugaaggacgccaugcugcagcuggaccccaacgccaagaccuggauggacaucgagggcagacccgaggaccccguggagaucgcccuguaccagcccagcagcggcugcuacauccacuucuucagagagcccaccgaccugaagcaguucaagcaggacgccaaguacagccacggcaucgacgugaccgaccuguucgccgcccagcccggccugaccagcgccgugaucgacacccugcccagaaacauggugaucaccugccagggcagcgacgacaucagaaagcugcuggagagccagggcagaaaggacaucaagcugaucgacaucgcccugagcaagaccgacagcagaaaguacgagaacgccgugugggaccaguacaaggaccugugccacaugcacaccggcguggugguggagaagaagaagagaggcggcaaggaggagaucaccccccacugcgcccugauggacugcaucauguucgacgccgccgugagcggcggccugaacgugagcgugcugagagccgugcugcccagagacaugguguucagaaccagcacccccagaguggugcuguga

SEQ ID NO: 9011 - RNA, 1710 nt, Artificial Sequence
  derived and/or modified CDS sequence (opt4) from LASV(G3278-SLE-2013;Clade IV)__AIT17399__NP
augagcgccagcaaggagaucaagagcuuccuguggacccagagccugagaagagagcugagcggcuacugcagcaacaucaagcugcagguggugaaggacgcccaggcccugcugcacggccuggacuucagcgaggugagcaacgugcagagacugaugagaaagcagagaagagacgacagcgaccugaagagacugagagaccugaaccaggccgugaacaaccugguggagcugaagagcacccagcagaagagcgugcugagagugggcacccugaccagcgacgaccugcuggugcuggccgccgaccuggagaagcugaagagcaaggugaucagaaccgagagaccccugagcagcggcguguacaugggcaaccugagcagccagcagcuggaccagagaagagcccugcugaacaugaucggcaugagcggcggcaaccagggcgcccaggugggcagagacggcguggugagagugugggacgugaagaacgccgaccugcugaacaaccaguucggcaccaugcccagccugacccuggccugccugaccaagcagggccagguggaccugaacgacguggugcaggcccugaccgaccugggccugaucuacaccgccaaguaccccaacaccagcgaccuggacagacuggcccagagccaccccauccugaacaugaucgacaccaagaagagcagccugaacaucagcggcuacaacuucagccugggcgccgccgugaaggccggcgccugcaugcuggacggcggcaacaugcuggagaccaucaaggugaccccccagaccauggacggcauccugaagagcauccugaaggugaagaaggcccugggcauguucaucagcgagacccccggcgagagaaaccccuacgagaacauccuguacaagaucugccugagcggcgacggcuggcccuacaucgccagcagaaccagcaucaccggcagagccugggagaacaccgugguggaccuggagagcgacggcaagccccagaaggccggcaacaacaacagcaacaagagccugcagagcgccggcuucaccgccggccugaccuacagccagcugaugacccugaaggacagcaugcugcagcuggaccccaacgccaagaccuggauggacaucgagggcagacccgaggaccccguggagguggcccuguaccagcccagcagcggcugcuacauccacuucuucagagagcccaccgaccugaagcaguucaagcaggacgccaaguacagccacggcaucgacgugaccgaccuguucgccacccagcccggccugaccagcgccgugaucgaggcccugcccagaaacauggugaucaccugccagggcagcgacgacaucagaaagcugcuggagagccagggcagaaaggacaucaagcugaucgacaucgcccugaacaagaccgacagcagaaaguacgagaacgccgugugggaccaguacaaggaccugugccacaugcacaccggcguggugguggagaagaagaagagaggcggcaaggaggagaucaccccccacugcgcccugauggacugcaucauguucgacgccgccgugagcggcggccugaagacccuggcccugagagccgugcugcccagagacaugguguucagaaccagcacccccaagguggugcuguga

SEQ ID NO: 9012 - RNA, 1710 nt, Artificial Sequence
  derived and/or modified CDS sequence (opt4) from LASV(G502-SLE-2009;Clade IV)__AIT17127__NP
augagcgccagcaaggagaucaagagcuuccuguggacccagagccugagaagagagcugagcggcuacugcagcaacaucaagcugcagguggugaaggacgcccaggcccugcugcacggccuggacuucagcgaggugagcaacgugcagagacugaugagaaaggagagaagagacgacaacgaccugaagagacugagagaccugaaccaggccgugaacaaccugguggagcugaagagcacccagcagaagagcauccugagagugggcacccugaccagcgacgaccugcugauccuggccgccgaccuggagaagcugaagagcaaggugaucagaaccgagagaccccugagcgccggcguguacaugggcaaccugagcagccagcagcuggaccagagaagagcccugcugagcaugaucggcaugagcggcggcaaccagggcgugagagccggcaaggacggcguggugagagugugggacgugaagaacgccgagcugcugaacaaccaguucggcaccaugcccagccugacccuggccugccugaccaagcagggccagguggaccugaacgacgccgugcaggcccugaccgaccugggccugaucuacaccgccaaguaccccaacaccagcgaccuggacagacugacccagagccaccccauccugaacaugaucgacaccaagaagagcagccugaacaucagcggcuacaacuucagccugggcgccgccgugaaggccggcgccugcaugcuggacggcggcaacaugcuggagaccaucaaggugagcccccagaccauggacggcauccugaagagcauccugaaggugaagaaggcccugggcauguucaucagcgacacccccggcgagagaaaccccuacgagaacauccuguacaagaucugccugagcggcgacggcuggcccuacaucgccagcagaaccagcaucaccggcagagccugggagaacaccgugguggaccuggagagcgacggcaagccccagaaggccggcagcaacaacagcaacaagagccugcagagcgccggcuucaccgccggccugaccuacagccagcugaugacccugaaggacgccaugcugcagcuggaccccaacaccaagaccuggauggacaucgagggcagacccgaggaccccguggagaucgcccuguaccagcccagcagcggcugcuacauccacuucuucagagagcccaccgaccugaagcaguucaagcaggacgccaaguacagccacggcaucgacgugaccgaccuguucgccgcccagcccggccugaccagcgccgugaucgacgcccugcccagaaacauggugaucaccugccagggcagcgacgacaucagaaagcugcuggagagccagggcagaaaggacaucaagcugaucgacaucgcccugaacaagaccgacagcagaaaguacgagaacgccgugugggaccaguacaaggaccugugccacaugcacaccggcguggugguggagaagaagaagagaggcggcaaggaggagaucaccccccacugcgcccugauggacugcaucauguucgacgccgccgugagcggcggccugaacaccagcgugcugagagccgugcugcccagagacaugguguucagaaccagcacccccagaguggugcuguga

SEQ ID NO: 9013 - RNA, 1710 nt, Artificial Sequence
  derived and/or modified CDS sequence (opt4) from LASV(G503-SLE-2009;Clade IV)__AIT17131__NP
augagcgccagcaaggagaucaagagcuuccuguggacccagagccugagaagagagcugagcggcuacugcagcaacaucaagcugcagguggugaaggacgcccaggcccugcugcacggccuggacuucagcgaggugagcaacgugcagagacugaugagaaaggagagaagagacgacaacgaccugaagagacugagagaccugaaccaggccgugaacaaccugguggagcugaagagcacccagcagaagagcauccugagagugggcacccugagcagcgacgaccugcuggugcuggccgccgaccuggagaagcugaagagcaaggugaccagaaccgagagaccccugagcgccggcguguacaugggcaaccugagcagccagcagcuggaccagagaagagcccugcugaacaugaucggcaugagcggcggcaaccagggcgccagagccggcagagacggcguggugagagugugggacgugaagaacgccgagcugcugaacaaccaguucggcaccaugcccagccugacccuggccugccugaccaagcagggccagguggaccugaacgacguggugcaggcccugaccgaccugggccugaucuacaccgccaaguaccccaacaccagcgaccuggacagacugacccagagccaccccauccugaacaugguggacaccaagaagagcagccugaacaucagcggcuacaacuucagccugggcgccgccgugaaggccggcgccugcaugcuggacggcggcaacaugcuggagaccaucaaggugagcccccagaccaucgacggcauccugaagagcauccugaaggugaagaaggcccugggcauguucaucagcgacacccccggcgagagaaaccccuacgagaacauccuguacaagaucugccugagcggcgacggcuggcccuacaucgccagcagaaccagcaucaccggcagagccugggagaacaccgugguggaccuggagagcgacggcaagccccagaaggccggcagcaacaacagcaacaagagccugcagagcgccggcuucaccgccggccugaccuacagccagcugaugacccugaaggacgccaugcugcagcuggaccccaacgccaagaucuggauggacaucgagggcagacccgaggaccccguggagaucgcccuguaccagcccagcagcggcugcuacauccacuucuucagagagcccaccgaccugaagcaguucaagcaggacgccaaguacagccacggcaucgacgugaccgaccuguucgccgcccagcccggccugaccagcgccgugaucgacgcccugcccagaaacauggugaucaccugccagggcgccgacgacaucagaaagcugcuggagagccagggcagaaaggacaucaagcugaucgacaucgcccugaacaaggccgacagcagaaaguacgagaacgccgugugggaccaguacaaggaccugugccacaugcacaccggcguggugguggagaagaagaagagaggcggcaaggaggagaucaccccccacugcgcccugauggacugcaucauguucgacgccgccgugagcggcggccugaacaccagcgugcugagagccgugcugcccagagacaugguguucagaaccagcacccccagaguggugcuguga

SEQ ID NO: 9014 - RNA, 1710 nt, Artificial Sequence
  derived and/or modified CDS sequence (opt4) from LASV(G610-SLE-2009;Clade IV)__AIT17135__NP
augagcgccagcaaggagaucaagagcuuccuguggacccagagccugagaagagagcugagcggcuacugcagcaacaucaagcugcagguggugaaggacgcccaggcccugcugcacggccuggacuucagcgaggugagcaacgugcagagacugaugagaaaggagagaagagacgacaacgaccugaagagacugagagaccugaaccaggccgugaacaaccugguggagcugaagagcacccagcagaagagcauccugagagugggcacccugaccagcgacgaccugcugauccuggccgccgaccuggagaagcugaagagcaaggugaccagaaccgagagaccccugagcgccggcguguacaugggcaaccugagcagccagcagcuggaccagagaagagcccugcugagcaugaucggcaugagcggcggcaaccagggcgccagagccggcagagacggcguggugagagugugggacgugaagaacgccgagcugcugaacaaccaguucggcaccaugcccagccugacccuggccugccugaccaagcagggccagguggaccugaacgacguggugcaggcccugaccgaccugggccugaucuacaccgccaaguaccccaacaccagcgaccuggacagacugacccagagccaccccauccugaacaugaucgacaccaagaagagcagccugaacaucagcggcuacaacuucagccugggcgccgccgugaaggccggcgccugcaugcuggacggcggcaacaugcuggagaccaucaaggugagcccccagaccauggacggcauccugaagagcauccugaaggugaagaaggcccugggcauguucaucagcgacacccccggcgagagaaaccccuacgagaacauccuguacaagaucugccugagcggcgacggcuggcccuacaucgccagcagaaccagcaucaccggcagagccugggagaacaccgugguggaccuggagagcgacggcaagcugcagaaggccggcagcaacaacagcaacaagagccugcagagcgccggcuucaccgccggccugaccuacagccagcugaugacccugaaggacgccaugcugcagcuggaccccaacgccaagaccuggauggacaucgagggcagacccgaggaccccguggagaucgcccuguaccagcccagcagcggcugcuacauccacuucuucagagagcccaccgaccugaagcaguucaagcaggacgccaaguacagccacggcaucgacgugaccgaccuguucgccgcccagcccggccugaccagcgccgugaucgacgcccugcccagaaacauggugaucaccugccagggcagcgacgacaucagaaagcugcuggagagccagggcagaaaggacaucaagcugaucgacaucgcccugaacaagaccgacagcagaaaguacgagaacgccgugugggaccaguacaaggaccugugccacaugcacaccggcguggugguggagaagaagaagaagggcggcaaggaggagaucaccccccacugcgcccugauggacugcaucauguucgacgccgccgugagcggcggccugaacaccagcgugcugagagccgugcugcccagagacaugguguucagaaccagcacccccagaguggugcuguga

SEQ ID NO: 9015 - RNA, 1710 nt, Artificial Sequence
  derived and/or modified CDS sequence (opt4) from LASV(G636-SLE-2009;Clade IV)__AIT17139__NP
augagcgccagcaaggagaucaagagcuuccuguggacccagagccugagaagagagcugagcggcuacugcagcaacaucaagcugcagguggugaaggacgcccaggcccugcugcacggccuggacuucagcgaggugagcaacgugcagagacugaugagaaaggagagaagagacgacaacgaccugaagagacugagagaccugaaccaggccgugaacaaccugguggagcugaagagcacccagcagaagagcgugcugagagugggcacccugaccagcgacgaccugcugauccuggccgccgaccuggagaagcugaagagcaaggugaccagaaccgagagaccccugagcgccggcguguacaugggcaaccugagcagccagcagcuggaccagagaagagcccugcugaacaugaucggcaugagcggcggcaaccagggcgccagagccggcagagacggcguggugagagugugggacgugaagaacgccgagcugcugaacaaccaguucggcaccaugcccagccugacccuggccugccugaccaagcagggccagguggaccugaacgacgccgugcaggcccugaccgaccugggccugaucuacaccgccaaguaccccaacaccagcgaccuggacagacugacccagagccaccccauccugaacaugaucgacaccaagaagagcagccugaacaucagcggcuacaacuucagccugggcgccgccgugaaggccggcgccugcaugcuggacggcggcaacaugcuggagaccaucaaggugagcccccagaccauggacagcauccugaagagcauccugaaggugaagaaggcccugggcauguucaucagcgacacccccggcgagagaaaccccuacgagaacauccuguacaagaucugccugagcggcgacggcuggcccuacaucgccagcagaaccagcaucaccggcagagccugggagaacaccgugguggaccuggagagcgacggcaagccccagaaggccggcagcaacaacagcaacaagagccugcagagcgccggcuucgccgccggccugaccuacagccagcugaugacccugaaggacgccaugcugcagcuggaccccaacgccaagaccuggauggacaucgagggcagacccgaggaccccguggagaucgcccuguaccagcccagcagcggcugcuacauccacuucuucagagagcccaccgaccugaagcaguucaagcaggacgccaaguacagccacggcaucgacgugaccgaccuguucgccgcccagcccggccugaccagcgccgugaucgacgcccugcccagaaacauggugaucaccugccagggcagcgacgacaucagaaagcugcuggagagccagggcagaaaggacaucaagcugaucgacaucgcccugagcaagaccgacagcagaaaguacgagaacgccgugugggaccaguacaaggaccugugccacaugcacaccggcaucgugguggagaagaagaagagaggcggcaaggaggagaucaccccccacugcgcccugauggacugcaucauguucgacgccgccgugagcggcggccugaacaccagcgugcugagagccgugcugcccagagacaugguguucagaaccaccacccccagaguggugcuguga

SEQ ID NO: 9016 - RNA, 1710 nt, Artificial Sequence
  derived and/or modified CDS sequence (opt4) from LASV(G676-SLE-2009;Clade IV)__AIT17143__NP
augagcgccagcaaggagaucaagagcuuccuguggacccagagccugagaagagagcugagcggcuacugcagcaacaucaagcugcagguggugaaggacgcccaggcccugcugcacggccuggacuucagcgaggugagcaacgugcagagacugaugagaaaggagagaagagacgacaacgaccugaagagacugagagaccugaaccaggccgugaacaaccugguggagcugaagagcacccagcagaagagcauccugagagugggcacccugaccagcgacgaccugcugauccuggccgccgaccuggagaagcugaagagcaaggugaccagaaccgagagaccccugagcgccggcguguacaugggcaaccugagcagccagcagcuggaccagagaagagcccugcugaacaugaucggcaugagcggcagcaaccagggcgccagagccggcagagacggcguggugagagugugggacgugaagaacgccgagcugcugaacaaccaguucggcaccaugcccagccugacccuggccugccugaccaagcagggccagguggaccugaacgacgccgugcaggcccugaccgaccugggccugaucuacaccgccaaguaccccaacaccagcgaccuggacagacugacccagagccaccccauccugaacaugaucgacaccaagaagagcagccugaacaucagcggcuacaacuucagccugggcgccgccgugaaggccggcgccugcaugcuggacggcggcaacaugcuggagaccaucaaggugagcccccagaccauggacggcauccugaagagcauccugaaggugaagaaggcccugggcauguucaucagcgacacccccggcgagagaaaccccuacgagaacauccuguacaagaucugccugagcggcgacggcuggcccuacaucgccagcagaaccagcaucaccggcagagccugggagaacaccgugguggaccuggagagcgacggcaagccccagaaggccggcaacaacggcagcaacaagagccugcagagcgccggcuucaccgccggccugaccuacagccagcugaugacccugaaggacgccaugcugcagcuggaccccaacgccaagaccuggauggacaucgagggcagacccgaggaccccguggagaucgcccuguaccagcccagcagcggcugcuacauccacuucuucagagagcccaccgaccugaagcaguucaagcaggacgccaaguacagccacggcaucgacgugaccgaccuguucgccgcccagcccggccugaccagcgccgugaucgacgcccugcccagaaaccuggugaucaccugccagggcagcgacgacaucagaaagcugcuggagagccagggcagaaaggacaucaagcugaucgacaucgcccugagcaagaccgacagcagaaaguacgagaacgccgugugggaccaguacaaggaccugugccacaugcacaccggcaucgugguggagaagaagaagagaggcggcaaggaggagaucaccccccacugcgcccugauggacugcaucauguucgacgccgccgugagcggcggccugaacaccagcgugcugagagccgugcugcccagagacaugguguucagaaccagcacccccagaguggugcuguga

SEQ ID NO: 9017 - RNA, 1710 nt, Artificial Sequence
  derived and/or modified CDS sequence (opt4) from LASV(G692-SLE-2009;Clade IV)__AIT17147__NP
augagcgccagcaaggagaucaagagcuuccuguggacccagagccugagaagagagcugagcggcuacugcagcaacaucaagcugcagguggugaaggacgcccaggcccugcugcacggccuggacuucagcgaggugagcaacgugcagagacugaugagaaaggagagaagagacgacaacgaccugaagagacugagagaccugaaccaggccgugaacaaccugguggagcugaagagcacccagcagaagagcgugcugagagugggcacccugaccagcgacgaccugcugauccuggccgccgaccuggagaagcugaagagcaaggugaccagaaccgagagaccccugagcgccggcguguacaugggcaaccugagcagccagcagcuggagcagagaagagcccugcugaacaugaucggcaugagcggcagcaaccagggcgcccaggccggcagagacggcguggugagagugugggacgugaagaacgccgagcugcugaacaaccaguucggcaccaugcccagccugacccuggccugccugaccaagcagggccagguggaccugaacgacgccgugcaggcccugaccgaccugggccugaucuacaccgugaaguaccccaacaccagcgaccuggacagacugacccagagccaccccauccugaacaugaucgacaccaagaagagcagccugaacaucagcggcuacaacuucagccugggcgccgccgugaaggccggcgccugcaugcuggacggcggcaacaugcuggagaccaucaaggugagcccccagaccauggacggcauccugaagagcauccugaaggugaagaaggcccugggcauguucaucagcgacacccccggcgagagaaaccccuacgagaacauccuguacaagaucugccugagcggcgacggcuggcccuacaucgccagcagaaccagcaucaccggcagagccugggagaacaccgugguggaccuggagagcgacggcaagccccagaaggccgacagcaacagcagcaacaagagccugcagagcgccggcuucaccgccggccugaccuacagccagcugaugacccugaaggacgccaugcugcagcuggaccccaacgccaagaccuggauggacaucgagggcagacccgaggaccccguggagguggcccuguaccagcccagcagcggcugcuacauccacuucuucagagagcccaccgaccugaagcaguucaagcaggacgccaaguacagccacggcaucgacgugaccgaccuguucgccgcccagcccggccugaccagcgccgugaucgacgcccugcccagaaacauggugaucaccugccagggcagcgacgacaucagaaagcugcuggagagccagggcagaaaggacaucaagcugaucgacaucgcccugagcaagaccgacagcagaaaguacgagaacgccgugugggaccaguacaaggaccugugccacaugcacaccggcguggugguggagaagaagaagagaggcggcaaggaggagaucaccccccacugcgcccugauggacugcaucauguucgacgccgccgugagcggcggccugaacaccagcgugcugagagccgugcugcccagagacaugguguucagaaccagcacccccagaguggugcuguga

SEQ ID NO: 9018 - RNA, 1710 nt, Artificial Sequence
  derived and/or modified CDS sequence (opt4) from LASV(G733-SLE-2010;Clade IV)__AIT17155__NP
augagcgccagcaaggagaucaagagcuuccuguggacccagagccugagaagagagcugagcggcuacugcagcaacaucaagcugcagguggugaaggacgcccaggcccugcugcacggccuggacuucagcgaggugagcaacgugcagagacugaugagaaaggagagaagagacgacaacgaccugaagagacugagagaccugaaccaggccgugaacaaccugguggagcugaagagcacccagcagaagagcgugcugagagugggcacccugaccagcgacgagcugcuggugcuggccgccgaccuggagaagcugaagagcaaggugaucagaaccgagagaccccugagcgccggcguguacaugggcaaccugagcagccagcagcuggaccagagaagagcccugcugagcaugaucggcaugagcggcggcaaccagggcgccagaaccggcagagacggcguggugagagugugggacgugaagaacgccgagcugcugaacaaccaguucggcaccaugcccagccugacccuggccugccugaccaagcagggccagguggaccugaacgacgccgugcaggcccugaccgaccugggccugaucuacaccgccaaguaccccaacaccagcgaccuggacagacugacccagagccaccccauccugaacaugaucgacaccaagaagagcagccugaacaucagcggcuacaacuucagccugggcgccgccgugaaggccggcgccugcaugcuggacggcggcaacaugcuggagaccaucaaggugagcccccagaccauggacggcauccugaagagcauccugaaggugaagaaggcccugggcauguucaucagcgacacccccggcgagagaaaccccuacgagaacauccuguacaagaucugccugagcggcgacggcuggcccuacaucgccagcagaaccagcaucaccggcagagccugggagaacaccgugguggaccuggagagcgacggcaagccccagaaggccggcagcaacaacagcaacaagagccugcagagcgccggcuucaccgccggccugaccuacagccagcugaugacccugaaggacgccaugcugcagcuggaccccaacgccaagaccuggauggacaucgagggcagacccgaggaccccguggagaucgcccuguaccagcccagcagcggcugcuacauccacuucuucagagagcccaccgaccugaagcaguucaagcaggacgccaaguacagccacggcaucgacgugaccgaccuguucgccgcccagcccggccugaccagcgccgugaucgacgcccugcccagaaacauggugaucaccugccagggcagcgacgacaucagaaagcugcuggagagccagggcagaaaggacaucaagcugaucgacaucgcccugagcaagaucgacagcagaaaguacgagaacgccgugugggaccaguacaaggaccugugccacaugcacaccggcguggugguggagaagaagaagagaggcggcaaggaggagaucaccccccacugcgcccugauggacugcaucauguucgacgccgccgugagcggcggccugaacagccuggugcugagagccgugcugcccagagacaugguguucagaaccagcacccccagaguggugcuguga

SEQ ID NO: 9019 - RNA, 1710 nt, Artificial Sequence
  derived and/or modified CDS sequence (opt4) from LASV(G806-SLE-2010;Clade IV)__AIT17161__NP
augagcgccagcaaggagaucaagagcuuccuguggacccagagccugagaagagagcugagcggcuacugcagcaacaucaagcugcagguggugaaggacgcccaggcccugcugcacggccuggacuucagcgaggugagcaacgugcagagacugaugagaaaggagagaagagacgacaacgaccugaagagacugagagaccugaaccaggccgugaacaaccugguggagcugaagagcacccagcagaagagcauccugagagugggcacccugaccagcgacgaccugcugauccuggccgccgaccuggagaagcugaagagcaaggugaccagaaccgagagaccccugagcgccggcguguacaugggcaaccugagcagccagcagcuggaccagagaagagcccugcugaacaugaucggcaugagcggcagcaaccagggcgccagaaccggcagagacggcguggugagagugugggacgugaagaacgccgagcugcugaacaaccaguucggcaccaugcccagccugacccuggccugccugaccaagcagggccagguggaccugaacgacgccgugcaggcccugaccgaccugggccugaucuacaccgccaaguaccccaacaccagcgaccuggacagacugacccagagccaccccauccugaacaugaucgacaccaagaagagcagccugaacaucagcggcuacaacuucagccugggcgccgccgugaaggccggcgccugcaugcuggacggcggcaacaugcuggagaccaucaaggugagcccccagaccauggacggcauccugaagagcauccugaaggugaagaaggcccugggcauguucaucagcgacacccccggcgagagaaaccccuacgagaacauccuguacaagaucugccugagcggcgacggcuggcccuacaucgccagcagaaccagcaucaccggcagagccugggagaacaccgugguggaccuggagagcgacggcaagccccagaaggccggcagcaacagcagcaacaagagccugcagagcgccggccugaccgccggccugaccuacagccagcugaugacccugaaggacgccaugcugcagcuggaccccaacgccaagaccuggauggacaucgagggcagacccgaggaccccguggagaucgcccuguaccagcccagcagcggcugcuacauccacuucuucagagagcccaccgaccugaagcaguucaagcaggacgccaaguacagccacggcaucgacgugaccgaccuguucgccgcccagcccggccugaccagcgccgugaucgacgcccugcccagaaaccuggugaucaccugccagggcagcgacgacaucagaaagcugcuggagagccagggcagaaaggacaucaagcugaucgacaucgcccugagcaagaccgacagcagaaaguacgagaacgccgugugggaccaguacaaggaccugugccacaugcacaccggcaucgugguggagaagaagaagagaggcggcaaggaggagaucaccccccacugcgcccugauggacugcaucauguucgacgccgccgugagcggcggccugaacgccagcgugcugagagccgugcugcccagagacaugguguucagaaccagcacccccagaguggugcuguga

SEQ ID NO: 9020 - RNA, 1710 nt, Artificial Sequence
  derived and/or modified CDS sequence (opt4) from LASV(G808-SLE-2010;Clade IV)__AIT17165__NP
augagcgccagcaaggagaucaagagcuuccuguggacccagagccugagaagagagcugagcggcuacugcagcaacaucaagcugcagguggugaaggacgcccaggcccugcugcacggccuggacuucagcgaggugaacaacgugcagagacugaugagaaaggagagaagagacgacaacgaccugaagagacugagagaccugaaccaggccgugaacaaccugguggagcugaagagcacccagcagaagagcauccugagagugggcacccugaccagcgacgaccugcugauccuggccgccgaccuggagaagcugaagagcaaggugaccagaaccgagagaccccugagcgccggcguguacaugggcaaccugagcagccagcagcuggaccagagaagagcccugcugaacaugaucggcaugagcaacggcaaccagggcaccagagccggcagagacggcguggugagagugugggacgugaagaacgccgagcugcugaacaaccaguucggcaccaugcccagccugacccuggccugccugaccaagcagggccagguggaccugaacgacguggugcaggcccugaccgaccugggccugaucuacaccgccaaguaccccaacaccagcgaccuggacagacugacccagagccaccccauccugaacaugaucgacaccaagaagagcagccugaacaucagcggcuacaacuucagccugggcgccgccgugaaggccggcgccugcaugcuggacggcggcaacaugcuggagaccaucaaggugagcccccagaccauggacggcauccugaagagcauccugaaggugaagaaggcccugggcauguucaucagcgacacccccggcgagagaaaccccuacgagaacauccuguacaagaucugccugagcggcgacggcuggcccuacaucgccagcagaaccagcaucaccggcagagccugggagaacaccgugguggaccuggagagcgacggcaagccccagaaggccgacagcagcaacagcaacaagagccugcagagcgccggcuucaccgccggccugaccuacagccagcugaugacccugaaggacgccaugcugcagcuggaccccaacgccaagaccuggauggacaucgagggcagacccgaggaccccguggagguggcccuguaccagcccagcagcggcugcuacauccacuucuucagagagcccaccgaccugaagcaguucaagcaggacgccaaguacagccacggcaucgacgugaccgaccuguucgccgcccagcccggccugaccagcgccgugaucgacgcccugcccagaaacauggugaucaccugccagggcagcgacgacaucagaaagcugcuggagagccagggcagaaaggacaucaagcugaucgacaucgcccugagcaaggccgacagcagaaaguacgagaacgccgugugggaccagcacaaggaccugugccacaugcacaccggcguggugguggagaagaagaagagaggcggcaaggaggagaucaccccccacugcgcccugauggacugcaucauguacgacgccgccgugagcggcggccugaacaccagcgugcugagagccgugcugcccagagacaugguguucagaaccagcacccccagaguggugcuguga

SEQ ID NO: 9021 - RNA, 1710 nt, Artificial Sequence
  derived and/or modified CDS sequence (opt4) from LASV(Guinea Faranah;Clade IV)__AMZ00380__NP
augagcgugagcaaggaggugaagagcuuccuguggacccagagccugagaagagagcugagcggcuacugcagcaacaucaagcugcagguggugaaggacgcccaggcccugcugcacggccuggacuucagcgaggugagcaacgugcagagacugaugagaaagcagagaagagacgacagcgaccugaagagacugagagaccugaaccaggccgugaacaaccugguggagcugaagagcacccagcagaagagcgugcugagagugggcacccugaccagcgacgaccugcugauccuggccgccgaccuggagaagcugaagagcaaggugaccagaaccgagagaccccugagcgccggcguguacaugggcaaccugagcagccagcagcuggaccagagaagagcccugcugaacaugaucggcaugaacggcggcaaccagggcgugcaggccggcagagacggcguggugagagugugggacgugaagaacgccgagcugcugaacaaccaguucggcaccaugcccagccugacccuggccugccugaccaagcagggccagguggaccugaacgacgccgugcaggcccugaccgaccugggccugaucuacaccgccaaguaccccaacaccagcgaccuggacagacuggcccagagccaccccauccugaacaugaucgacaccaagaagagcagccugaacaucagcggcuacaacuucagccugggcgccgccgugaaggccggcgccugcaugcuggacggcggcaacaugcuggagaccaucaaggugagcccccagaccauggacggcauccugaaggccauccugaaggugaagagaacccugggcauguucgugagcgacacccccggcgagagaaaccccuacgagaacauccuguacaagaucugccugagcggcgacggcuggcccuacaucgccagcagaaccagcaucaccggcagagccugggagaacaccgugguggaccuggagagcgacggcaagccccagaaggugggcaacaacggcagcaacaagagccugcagagcgccggcuucagcgccggccugaccuacagccagcugaugacccugaaggacgccaugcugcagcuggaccccaacaccaagaccuggauggacaucgagggcagacccgaggaccccguggagguggcccuguaccagcccagcagcggcugcuacauccacuucuucagagagcccaccgaccugaagcaguucaagcaggacgccaaguacagccacggcaucgacgugaccgaccuguucgccgcccagcccggccugaccagcgccgugaucgaggcccugcccagaaacauggugaucaccugccagggcagcgaggacaucagaaagcugcuggagagccagggcagaaaggacaucaagcugaucgacaucgcccugagcaaggccgacagcagaaaguacgagaacgccgugugggaccagugcaaggaccugugccacaugcacaccggcaucgugguggagaagaagaagagaggcggcaaggaggagaucaccccccacugcgcccugauggacugcaucauguucgacgccgccgugagcggcggccugaacacccaggugcugagagccgugcugcccagagacaugguguucagaaccagcacccccaagguggugcuguga

SEQ ID NO: 9022 - RNA, 1710 nt, Artificial Sequence
  derived and/or modified CDS sequence (opt4) from LASV(GUINEA Z-185a;Clade IV)__AMZ00376__NP
augagcgugagcaaggagaucaagagcuuccuguggacccagagccugagaagagagcugagcggcuacugcagcaacaucaagcugcagguggugaaggacgcccaggcccugcugcacggccuggacuucagcgaggugagcaacgugcagagacugaugagaaagcagagaagagacgacaacgaccugaagagacugagagaccugaaccaggccgugaacaaccugguggagcugaagagcacccagcagaagagcgugcugagagugggcacccugaccagcgacgaccugcugauccuggccgccgaccuggagaagcugaagagcaaggugaccagaaccgagagaccccugagcgccggcguguacaugggcaaccugagcagccagcagcuggaccagagaagagcccugcugaacaugaucggcaugagcggcggcaaccagggcgcccagaccggcagagacggcguggugagaaucugggacgugaagaacgccgagcugcugaacaaccaguucggcaccaugcccagccugacccuggccugccugaccaagcagggccagguggaccugaacgacguggugcaggcccugaccgaccugggccugaucuacaccgccaaguaccccaacaccagcgaccuggacagacugacccagagccaccccauccugaacaugaucgacaccaagaagagcagccugaacaucagcggcuacaacuucagccugggcgccgccgugaaggccggcgccugcaugcuggacggcggcaacaugcuggagaccaucaaggugagcccccagaccauggacggcauccugaagagcauccugaaggugaagaaggcccugggcauguucaucagcgacacccccggcgagagaaaccccuacgagaacauccuguacaagaucugccugagcggcgacggcuggcccuacaucgccagcagaaccagcaucaccggcagagccugggagaacaccgugguggaccuggagagcggcgagaagccccagaagaucggcagcaacaacagcaacaagugccugcagagcgccggcuucaccgccggccugagcuacagccagcugaugacccugaaggacgccaugcugcagcuggaccccaacgccaagaccuggauggacaucgagggcagacccgaggaccccguggagaucgcccuguaccagcccagcagcggcugcuacauccacuucuucagagagcccaccgaccugaagcaguucaagcaggacgccaaguacagccacggcaucgacgugaccgaccuguucgccgcccagcccggccugaccagcgccgugaucgaggcccugcccagaaacauggugaugaccugccagggcagcgacgacaucagaaagcugcuggagagccagggcagaaaggacaucaagcugaucgacaucgcccugagcaagaccgacagcagaaaguacgagaacgccgugugggaccaguacaaggaccugugccacaugcacaccggcguggugguggagaagaagaagaagggcggcaaggaggagaucaccccccacugcgcccugauggacugcaucauguucgacgccgccgugagcggcggccugaacaccagcgugcugagagccgugcugcccagagacaugguguucagaaccagcacccccaagguggugcuguga

SEQ ID NO: 9023 - RNA, 1710 nt, Artificial Sequence
  derived and/or modified CDS sequence (opt4) from MOPV/LASV reassortant(IGS-1;Clade IV)__AFY05578__NP
augagcgccagcaaggagaucaagagcuuccuguggacccagagccugagaagagagcugagcggcuacugcagcaacaucaagcugcagguggugaaggacgcccaggcccugcugcacggccuggacuucagcgaggugagcaacgugcagagacugaugagaaaggagagaagagacgacaacgaccugaagagacugagagaccugaaccaggccgugaacaaccugguggagcugaagagcacccagcagaagagcauccugagagugggcacccugaccagcgacgaccugcugauccuggccgccgaccuggagaagcugagaagcaaggugaucagaaccgagagaccccugagcgccggcguguacaugggcaaccugagcagccagcagcuggaccagagaagagcccugcugaacaugaucggcaugagcggcggcaaccagggcgccagagccggcagagacggcguggugagagugugggacgugaagaacgccgagcugcugagcaaccaguucggcaccaugcccagccugacccuggccugccugaccaagcagggccagguggaccugaacgacgccgugcaggcccugaccgaccugggccugaucuacaccgccaaguaccccaacaccagcgaccuggacagacugacccagagccaccccauccugaacaugaucgacaccaagaagagcagccugaacaucagcggcuacaacuucagccugggcgccgccgugaaggccggcgccugcaugcuggacggcggcaacaugcuggagaccaucaaggugagcccccagaccauggacggcauccugaagagcauccugaaggugaagaaggcccugggcauguucaucagcgacacccccggcgagagaaaccccuacgagaacauccuguacaagaucugccugagcggcgacggcuggcccuacaucgccagcagaaccagcaucaccggcagagccugggagaacaccgugguggaccuggagagcgacggcaagccccagaaggccgacagcaacaacagcagcaagagccugcagagcgccggcuucaccgccggccugaccuacagccagcugaugacccugaaggacgccaugcugcagcuggaccccaacgccaagaccuggauggacaucgagggcagacccgaggaccccguggagaucgcccuguaccagcccagcagcggcugcuacauccacuucuucagagagcccaccgaccugaagcaguucaagcaggacgccaaguacagccacggcaucgacgugaccgaccuguucgccacccagcccggccugaccagcgccgugaucgacgcccugcccagaaacauggugaucaccugccagggcagcgacgacaucagaaagcugcuggagagccagggcagaaaggacaucaagcugaucgacaucgaccugagcaagaccgacagcagaaaguacgagaacgccgugugggaccaguacaaggaccugugccacaugcacaccggcguggugguggagaagaagaagagaggcggcaaggaggagaucaccccccacugcgcccugauggacugcaucauguucgacgccgccgugagcggcggccugaacaccagcgugcugagagccgugcugcccagagacaugguguucagaaccagcacccccagaguggugcuguga

SEQ ID NO: 9024 - RNA, 1710 nt, Artificial Sequence
  derived and/or modified CDS sequence (opt4) from MOPV/LASV reassortant(IGS-11;Clade IV)__AFY05589__NP
augagcgccagcaaggagaucaagagcuuccuguggacccagagccugagaagagagcugagcggcuacugcagcaacaucaagcugcagguggugaaggacgcccaggcccugcugcacggccuggacuucagcgaggugagcaacgugcagagacugaugagaaaggagagaagagacgacaacgaccugaagagacugagagaccugaaccaggccgugaacaaccugguggagcugaagagcacccagcagaagagcauccugagagugggcacccugaccagcgacgaccugcugauccuggccgccgaccuggagaagcugaagagcaaggugaucagaaccgagagaccccugagcgccggcguguacaugggcaaccugagcagccagcagcuggaccagagaagagcccugcugaacaugaucggcaugagcggcggcaaccagggcgccagagccggcagagacggcguggugagagugugggacgugaagaacgccgagcugcugagcaaccaguucggcaccaugcccagccugacccuggccugccugaccaagcagggccagguggaccugaacgacgccgugcaggcccugaccgaccugggccugaucuacaccgccaaguaccccaacaccagcgaccuggacagacugacccagagccaccccauccugaacaugaucgacaccaagaagagcagccugaacaucagcggcuacaacuucagccugggcgccgccgugaaggccggcgccugcaugcuggacggcggcaacaugcuggagaccaucaaggugagcccccagaccauggacggcauccugaagagcauccugaaggugaagaaggcccugggcauguucaucagcgacacccccggcgagagaaaccccuacgagaacauccuguacaagaucugccugagcggcgacggcuggcccuacaucgccagcagaaccagcaucaccggcagagccugggagaacaccgugguggaccuggagagcgacggcaagccccagaaggccgacagcaacaacagcagcaagagccugcagagcgccggcuucaccgccggccugaccuacagccagcugaugacccugaaggacgccaugcugcagcuggaccccaacgccaagaccuggauggacaucgagggcagacccgaggaccccguggagaucgcccuguaccagcccagcagcggcugcuacauccacuucuucagagagcccaccgaccugaagcaguucaagcaggacgccaaguacagccacggcaucgacgugaccgaccuguucgccacccagcccggccugaccagcgccgugaucgacgcccugcccagaaacauggugaucaccugccagggcagcgacgacaucagaaagcugcuggagagccagggcagaaaggacaucaagcugaucgacaucgaccugagcaagaccgacagcagaaaguacgagaacgccgugugggaccaguacaaggaccugugccacaugcacaccggcguggugguggagaagaagaagagaggcggcaaggaggagaucaccccccacugcgcccugauggacugcaucauguucgacgccgccgugagcggcggccugaacaccagcgugcugagagccgugcugcccagagacaugguguucagaaccagcacccccagaguggugcuguga

SEQ ID NO: 9025 - RNA, 1710 nt, Artificial Sequence
  derived and/or modified CDS sequence (opt4) from MOPV/LASV reassortant(IGS-12;Clade IV)__AFY05591__NP
augagcgccagcaaggagaucaagagcuuccuguggacccagagccugagaagagagcugagcggcuacugcagcaacaucaagcugcagguggugaaggacgcccaggcccugcugcacggccuggacuucagcgaggugagcaacgugcagagacugaugagaaaggagagaagagacgacaacgaccugaagagacugagagaccugaaccaggccgugaacaaccugguggagcugaagagcacccagcagaagagcauccugagagugggcacccugaccagcgacgaccugcugauccuggccgccgaccuggagaagcugaagagcaaggugaucagaaccgagagaccccugagcgccggcguguacaugggcaaccugagcagccagcagcuggaccagagaagagcccugcugaacaugaucggcaugagcggcggcaaccagggcgccagagccggcagagacggcguggugagagugugggacgugaagaacguggagcugcugagcaaccaguucggcaccaugcccagccugacccuggccugccugaccaagcagggccagguggaccugaacgacgccgugcaggcccugaccgaccugggccugaucuacaccgccaaguaccccaacaccagcgaccuggacagacuggcccagagccaccccauccugaacaugaucgacaccaagaagagcagccugaacaucagcggcuacaacuucagccugggcgccgccgugaaggccggcgccugcaugcuggacggcggcaacaugcuggagaccaucaaggugagcccccagaccauggacggcauccugaagagcauccugaaggugaagaaggcccugggcauguucaucagcgacacccccggcgagagaaaccccuacgagaacauccuguacaagaucugccugagcggcgacggcuggcccuacaucgccagcagaaccagcaucaccggcagagccugggagaacaccgugguggaccuggagagcgacggcaagccccagaaggccgacagcaacaacagcagcaagagccugcagagcgccggcuucaccgccggccugaccuacagccagcugaugacccugaaggacgccaugcugcagcuggaccccaacgccaagaccuggauggacaucgagggcagacccgaggaccccguggagaucgcccuguaccagcccagcagcggcugcuacauccacuucuucagagagcccaccgaccugaagcaguucaagcaggacgccaaguacagccacggcaucgacgugaccgaccuguucgccacccagcccggccugaccagcgccgugaucgacgcccugcccagaaacauggugaucaccugccagggcagcgacgacaucagaaagcugcuggagagccagggcagaaaggacaucaagcugaucgacaucgaccugagcaagaccgacagcagaaaguacgagaacgccgugugggaccaguacaaggaccugugccacaugcacaccggcguggugguggagaagaagaagagaggcggcaaggaggagaucaccccccacugcgcccugauggacugcaucauguucgacgccgccgugagcggcggccugaacaccagcgugcugagagccgugcugcccagagacaugguguucagaaccagcacccccagaguggugcuguga

SEQ ID NO: 9026 - RNA, 1710 nt, Artificial Sequence
  derived and/or modified CDS sequence (opt4) from MOPV/LASV reassortant(IGS-14;Clade IV)__AFY05595__NP
augagcgccagcaaggagaucaagagcuuccuguggacccagagccugagaagagagcugagcggcuacugcagcaacaucaagcugcagguggugaaggacgcccaggcccugcugcacggccuggacuucagcgaggugagcaacgugcagagacugaugagaaaggagagaagagacgacaacgaccugaagagacugagagaccugaaccaggccgugaacaaccugguggagcugaagagcacccagcagaagagcauccugagagugggcacccugaccagcgacgaccugcugauccuggccgccgaccuggagaagcugaagagcaaggugaucagaaccgagagaccccugagcgccggcguguacaugggcaaccugagcagccagcagcuggaccagagaagagcccugcugaacaugaucggcaugagcggcggcaaccagggcgccagagccggcagagacggcguggugagagugugggacgugaagaacgccgagcugcugagcaaccaguucggcaccaugcccagccugacccuggccugccugaccaagcagggccagguggaccugaacgacgccgugcaggcccugaccgaccugggccugaucuacaccgccaaguaccccaacaccagcgaccuggacagacuggcccagagccaccccauccugaacaugaucgacaccaagaagagcagccugaacaucagcggcuacaacuucagccugggcgccgccgugaaggccggcgccugcaugcuggacggcggcaacaugcuggagaccaucaaggugagcccccagaccauggacggcauccugaagagcauccugaaggugaagaaggcccugggcauguucaucagcgacacccccggcgagagaaaccccuacgagaacauccuguacaagaucugccugagcggcgacggcuggcccuacaucgccagcagaaccagcaucaccggcagagccugggagaacaccgugguggaccuggagagcgacggcaagccccagaaggccgacagcaacaacagcagcaagagccugcagagcgccggcuucaccgccggccugaccuacagccagcugaugacccugaaggacgccaugcugcagcuggaccccaacgccaagaccuggauggacaucgagggcagacccgaggaccccguggagaucgcccuguaccagcccagcagcggcugcuacauccacuucuucagagagcccaccgaccugaagcaguucaagcaggacgccaaguacagccacggcaucgacgugaccgaccuguucgccacccagcccggccugaccagcgccgugaucgacgcccugcccagaaacauggugaucaccugccagggcagcgacgacaucagaaagcugcuggagagccagggcagaaaggacaucaagcugaucgacaucgaccugagcaagaccgacagcagaaaguacgagaacgccgugugggaccaguacaaggaccugugccacaugcacaccggcguggugguggagaagaagaagagaggcggcaaggaggagaucaccccccacugcgcccugauggacugcaucauguucgacgccgccgugagcggcggccugaacaccagcgugcugagagccgugcugcccagagacaugguguucagaaccagcacccccagaguggugcuguga

SEQ ID NO: 9027 - RNA, 1710 nt, Artificial Sequence
  derived and/or modified CDS sequence (opt4) from MOPV/LASV reassortant(IGS-23;Clade IV)__AFY05610__NP
augagcgccagcaaggagaucaagagcuuccuguggacccagagccugagaagagagcugagcggcuacugcagcaacaucaagcugcagguggugaaggacgcccaggcccugcugcacggccuggacuucagcgaggugagcaacgugcagagacugaugagaaaggagagaagagacgacaacgaccugaagagacugagagaccugaaccaggccgugaacaaccugguggagcugaagagcacccagcagaagagcauccugagagugggcacccugaccagcgacgaccugcugauccuggccgccgaccuggagaagcugaagagcaaggugaucagaaccgagagaccccugagcgccggcguguacaugggcaaccugagcagccagcagcuggaccagagaagagcccugcugaacaugaucggcaugagcggcggcaaccagggcgccagagccggcagagacggcguggugagagugugggacgugaagaacgccgagcugcugagcaaccaguucggcaccaugcccagccugacccuggccugccugaccaagcagggccagguggaccugaacgacgccgugcaggcccugaccgaccugggccugaucuacaccgccaaguaccccaacaccagcgaccuggacagacugacccagagccaccccauccugaacaugaucgacaccaagaagagcagccugaacaucagcggcuacaacuucagccugggcgccgccgugaaggccggcgccugcaugcuggacggcggcaacaugcuggagaccaucaaggugagcccccagaccauggacggcauccugaagagcauccugaaggugaagaaggcccugggcauguucaucagcgacacccccggcgagagaaaccccuacgagaacauccuguacaagaucugccugagcggcgacggcuggcccuacaucgccagcagaaccagcaucaccggcagagccugggagaacaccgugguggaccuggagagcgacggcaagccccagaaggccgacagcaacaacagcagcaagagccugcagagcgccggcuucaccgccggccugaccuacagccagcugaugacccugaaggacgccaugcugcagcuggaccccaacaccaagaccuggauggacaucgagggcagacccgaggaccccguggagaucgcccuguaccagcccagcagcggcugcuacauccacuucuucagagagcccaccgaccugaagcaguucaagcaggacgccaaguacagccacggcaucgacgugaccgaccuguucgccacccagcccggccugaccagcgccgugaucgacgcccugcccagaaacauggugaucaccugccagggcagcgacgacaucagaaagcugcuggagagccagggcagaaaggacaucaagcugaucgacaucgaccugagcaagaccgacagcagaaaguacgagaacgccgugugggaccaguacaaggaccugugccacaugcacaccggcguggugguggagaagaagaagagaggcggcaaggaggagaucaccccccacugcgcccugauggacugcaucauguucgacgccgccgugagcggcggccugaacaccagcgugcugagagccgugcugcccagagacaugguguucagaaccagcacccccagaguggugcuguga

SEQ ID NO: 9028 - RNA, 1716 nt, Artificial Sequence
  derived and/or modified CDS sequence (opt4) from MOPV/LASV reassortant(IGS-27;Clade IV)__AFY05618__NP
augagcgccagcaaggagaucaagagcuuccuguggacccagagccugagaagagagcugagcggcuacugcagcaacaucaagcugcagguggugaaggacgcccaggcccugcugcacggccuggacuucagcgaggugagcaacgugcagagacugaugagaaaggagagaagagacgacaacgaccugaagagacugagagaccugaaccaggccgugaacaaccugguggagcugaagagcacccagcagaagagcauccugagagugggcacccugaccagcgacgaccugcugauccuggccgccgaccuggagaagcugagaagcaaggugaucagaaccgagagaccccugagcgccggcguguacaugggcaaccugagcagccagcagcuggaccagagaagagcccugcugaacaugaucggcaugagcggcggcaaccagggcgccagagccggcagagacggcguggugagagugugggacgugaagaacgccgagcugcugagcaaccaguucggcaccaugcccagccugacccuggccugccugaccaagcagggccagguggaccugaacgacgccgugcaggcccugaccgaccugggccugaucuacaccgccaaguaccccaacaccagcgaccuggacagacugacccagagccaccccauccugaacaugaucgacaccaagaagagcagccugaacaucagcggcuacaacuucagccugggcgccgccgugaaggccggcgccugcaugcuggacggcggcaacaugcuggagaccaucaaggugagcccccagaccauggacggcauccugaagagcauccugaaggugaagaaggcccugggcauguucaucagcgacacccccggcgagagaaaccccuacgagaacauccuguacaagaucugccugagcggcgacggcuggcccuacaucgccagcagaaccagcaucaccggcagagccugggagaacaccgugguggaccuggagagcgacggcaagccccagaaggccgacagcaacaacagcagcaagagccugcagagcgccggcuucaccgccggccugaccuacagccagcugaugacccugaaggacgccaugcugcagcuggaccccaacgccaagaccuggauggacaucgagggcagacccgaggaccccguggagaucgcccuguaccagcccagcagcggcugcuacauccacuucuucagagagcccaccgaccugaagcagaagcaguucaagcaggacgccaaguacagccacggcaucgacgugaccgaccuguucgccacccagcccggccugaccagcgccgugaucgacgcccugcccagaaacauggugaucaccugccagggcagcgacgacaucagaaagcugcuggagagccagggcagaaaggacaucaagcugaucgacaucgaccugagcaagaccgacagcagaaaguacgagaacgccgugugggaccaguacaaggaccugugccacaugcacaccggcguggugguggagaagaagaagagaggcggcaaggaggagaucaccccccacugcgcccugauggacugcaucauguucgacgccgccgugagcggcggccugaacaccagcgugcugagagccgugcugcccagagacaugguguucagaaccagcacccccagaguggugcuguga

SEQ ID NO: 9029 - RNA, 1710 nt, Artificial Sequence
  derived and/or modified CDS sequence (opt4) from MOPV/LASV reassortant(IGS-3;Clade IV)__AFY05580__NP
augagcgccagcaaggagaucaagagcuuccuguggacccagagccugagaagagagcugagcggcuacugcagcaacaucaagcugcagguggugaaggacgcccaggcccugcugcacggccuggacuucagcgaggugagcaacgugcagagacugaugagaaaggagagaagagacgacaacgaccugaagagacugagagaccugaaccaggccgugaacaaccugguggagcugaagagcacccagcagaagagcauccugagagugggcacccugaccagcgacgaccugcugauccuggccgccgaccuggagaagcugagaagcaaggugaucagaaccgagagaccccugagcgccggcguguacaugggcaaccugagcagccagcagcuggaccagagaagagcccugcugaacaugaucggcaugagcggcggcaaccagggcgccagagccggcagagacggcguggugagagugugggacgugaagaacgccgagcugcugagcaaccaguucggcaccauccccagccugacccuggccugccugaccaagcagggccagguggaccugaacgacgccgugcaggcccugaccgaccugggccugaucuacaccgccaaguaccccaacaccagcgaccuggacagacugacccagagccaccccauccugaacaugaucgacaccaagaagagcagccugaacaucagcggcuacaacuucagccugggcgccgccgugaaggccggcgccugcaugcuggacggcggcaacaugcuggagaccaucaaggugagcccccagaccauggacggcauccugaagagcauccugaaggugaagaaggcccugggcauguucaucagcgacacccccggcgagagaaaccccuacgagaacauccuguacaagaucugccugagcggcgacggcuggcccuacaucgccagcagaaccagcaucaccggcagagccugggagaacaccgugguggaccuggagagcggcggcaagccccagaaggccgacagcaacaacagcagcaagagccugcagagcgccggcuucaccgccggccugaccuacagccagcugaugacccugaaggacgccaugcugcagcuggaccccaacgccaagaccuggauggacaucgagggcagacccgaggaccccguggagaucgcccuguaccagcccagcagcggcugcuacauccacuucuucagagagcccaccgaccugaagcaguucaagcaggacgccaaguacagccacggcaucgacgugaccgaccuguucgccacccagcccggccugaccagcgccgugaucgacgcccugcccagaaacauggugaucaccugccagggcagcgacgacaucagaaagcugcuggagagccagggcagaaaggacaucaagcugaucgacaucgaccugagcaagaccgacagcagaaaguacgagaacgccgugugggaccaguacaaggaccugugccacaugcacaccggcguggugguggagaagaagaagagaggcggcaaggaggagaucaccccccacugcgcccugauggacugcaucauguucgacgccgccgugagcggcggccugaacaccagcgugcugagagccgugcugcccagagacaugguguucagaaccagcacccccagaguggugcuguga

SEQ ID NO: 9030 - RNA, 1710 nt, Artificial Sequence
  derived and/or modified CDS sequence (opt4) from MOPV/LASV reassortant(IGS-4;Clade IV)__AFY05581__NP
augagcgccagcaaggagaucaagagcuuccuguggacccagagccugagaagagagcugagcggcuacugcagcaacaucaagcugcagguggugaaggacgcccaggcccugcugcacggccuggacuucagcgaggugagcaacgugcagagacugaugagaaaggagagaagagacgacaacgaccugaagagacugagagaccugaaccaggccgugaacaaccugguggagcugaagagcacccagcagaagagcauccugagagugggcacccugaccagcgacgaccugcugauccuggccgccgaccuggagaagcugaagagcaaggugaucagaaccgagagaccccugagcgccggcguguacaugggcaaccugagcagccagcagcuggaccagagaagagcccugcugaacaugaucggcaugagcggcggcaaccagggcgccagagccggcagagacggcguggugagagugugggacgugaagaacgccgagcugcugagcaaccaguucggcaccauccccagccugacccuggccugccugaccaagcagggccagguggaccugaacgacgccgugcaggcccugaccgaccugggccugaucuacaccgccaaguaccccaacaccagcgaccuggacagacugacccagagccaccccauccugaacaugaucgacaccaagaagagcagccugaacaucagcggcuacaacuucagccugggcgccgccgugaaggccggcgccugcaugcuggacggcggcaacaugcuggagaccaucaaggugagcccccagaccauggacggcauccugaagagcauccugaaggugaagaaggcccugggcauguucaucagcgacacccccggcgagagaaaccccuacgagaacauccuguacaagaucugccugagcggcgacggcuggcccuacaucgccagcagaaccagcaucaccggcagagccugggagaacaccgugguggaccuggagagcggcggcaagccccagaaggccgacagcaacaacagcagcaagagccugcagagcgccggcuucaccgccggccugaccuacagccagcugaugacccugaaggacgccaugcugcagcuggaccccaacgccaagaccuggauggacaucgagggcagacccgaggaccccguggagaucgcccuguaccagcccagcagcggcugcuacauccacuucuucagagagcccaccgaccugaagcaguucaagcaggacgccaaguacagccacggcaucgacgugaccgaccuguucgccacccagcccggccugaccagcgccgugaucgacgcccugcccagaaacauggugaucaccugccagggcagcgacgacaucagaaagcugcuggagagccagggcagaaaggacaucaagcugaucgacaucgaccugagcaagaccgacagcagaaaguacgagaacgccgugugggaccaguacaaggaccugugccacaugcacaccggcguggugguggagaagaagaagagaggcggcaaggaggagaucaccccccacugcgcccugauggacugcaucauguucgacgccgccgugagcggcggccugaacaccagcgugcugaaggccgugcugcccagagacaugguguucagaaccagcacccccagaguggugcuguga

SEQ ID NO: 9031 - RNA, 1710 nt, Artificial Sequence
  derived and/or modified CDS sequence (opt4) from MOPV/LASV reassortant(IGS-9;Clade IV)__AFY05585__NP
augagcgccagcaaggagaucaagagcuuccuguggacccagagccugagaagagagcugagcggcuacugcagcaacaucaagcugcagguggugaaggacgcccaggcccugcugcacggccuggacuucagcgaggugagcaacgugcagagacugaugagaaaggagagaagagacgacaacgaccugaagagacugagagaccugaaccaggccgugaacaaccugguggagcugaagagcacccagcagaagagcauccugagagugggcacccugaccagcgacgaccugcugauccuggccgccgaccuggagaagcugagaagcaaggugaucagaaccgagagaccccugagcgccggcguguacaugggcaaccugagcagccagcagcuggaccagagaagagcccugcugaacaugaucggcaugagcggcggcaaccagggcgccagagccggcagagacggcguggugagagugugggacgugaagaacgccgagcugcugagcaaccaguucggcaccauccccagccugacccuggccugccugaccaagcagggccagguggaccugaacgacgccgugcaggcccugaccgaccugggccugaucuacaccgccaaguaccccaacaccagcgaccuggacagacugacccagagccaccccauccugaacaugaucgacaccaagaagagcagccugaacaucagcggcuacaacuucagccugggcgccgccgugaaggccggcgccugcaugcuggacggcggcaacaugcuggagaccaucaaggugagcccccagaccauggacggcauccugaagagcauccugaaggugaagaaggcccugggcauguucaucagcgacacccccggcgagagaaaccccuacgagaacauccuguacaagaucugccugagcggcgacggcuggcccuacaucgccagcagaaccagcaucaccggcagagccugggagaacaccgugguggaccuggagagcgacggcaagccccagaaggccgacagcaacaacagcagcaagagccugcagagcgccggcuucaccgccggccugaccuacagccagcugaugacccugaaggacgccaugcugcagcuggaccccaacgccaagaccuggauggacaucgagggcagacccgaggaccccguggagaucgcccuguaccagcccagcagcggcugcuacauccacuucuucagagagcccaccgaccugaagcaguucaagcaggacgccaaguacagccacggcaucgacgugaccgaccuguucgccacccagcccggccugaccagcgccgugaucgacgcccugcccagaaacauggugaucaccugccagggcagcgacgacaucagaaagcugcuggagagccagggcagaaaggacaucaagcugaucgacaucgaccugagcaagaccgacagcagaaaguacgagaacgccgugugggaccaguacaaggaccugugccacaugcacaccggcguggugguggagaagaagaagagaggcggcaaggaggagaucaccccccacugcgcccugauggacugcaucauguucgacgccgccgugagcggcggccugaacaccagcgugcugagagccgugcugcccagagacaugguguucagaaccagcacccccagaguggugcuguga

SEQ ID NO: 9032 - RNA, 1710 nt, Artificial Sequence
  derived and/or modified CDS sequence (opt4) from LASV(LM032-SLE-2010;Clade IV)__AIT17803__NP
augagcgccagcaaggagaucaagagcuuccuguggacccagagccugagaagagagcugagcggcuacugcagcaacaucaagcugcagguggugaaggacgcccaggcccugcugcacggccuggacuucagcgaggugagcaacgugcagagacugaugagaaaggagagaagagacgacaacgaccugaagagacugagagaccugaaccaggccgugaacaaccugguggagcugaagagcacccagcagaagagcauccugagagugggcacccugaccagcgacgaccugcugauccuggccgccgaccuggagaagcugaagagcaaggugaucagaaccgagagaccccugagcgccggcguguacaugggcaaccugagcagccagcagcuggaccagagaagagcccugcugagcaugaucggcaugagcggcggcagccaggaggccagagccggcagagacggcguggugagagugugggacgugaagaacgccgagcugcugaacaaccaguucggcaccaugcccagccugacccuggccugccugaccaagcagggccagguggaccugaacgacgccgugcaggcccugaccgaccugggccugaucuacaccgccaaguaccccaacaccagcgaccuggacagacugacccagagccaccccauccugaacaugaucgacaccaagaagagcagccugaacaucagcggcuacaacuucagccugggcgccgccgugaaggccggcgccugcaugcuggacggcggcaacaugcuggagaccaucaaggugagcccccagaccguggacggcauccugaagagcauccugaaggugaagaaggcccugggcauguucaucagcgacacccccggcgagagaaaccccuacgagaacauccuguacaagaucugccugagcggcgacggcuggcccuacaucgccagcagaaccagcaucaccggcagagccugggagaacaccgugguggaccuggagagcgacggcaagccccagaaggccggcagcaacaacagcaacaagagccugcagagcgccggcuucaccgccggccugaccuacagccagcugaugacccugaaggacgccaugcugcagcuggaccccaacgccaagaccuggauggacaucgagggcagacccgaggaccccguggagaucgcccuguaccagcccagcagcggcugcuacauccacuucuucagagagcccaccgaccugaagcaguucaagcaggacgccaaguacagccacggcaucgacgugaccgaccuguucgccgcccagcccggccugaccagcgccgugaucgacgcccugcccagaaacauggugaucaccugccagggcagcgacgacaucagaaagcugcuggagagccagggcagaaaggacaucaagcugaucgacaucgcccugagcaagaccgacagcagaaaguacgagaacgccgugugggaccaguacaaggaccugugccacaugcacaccggcguggugguggagaagaagaagaagggcggcaaggaggagaucaccccccacugcgcccugauggacugcaucauguucgacgccgccgugagcggcggccugaacaccagcgugcugagagccgugcugcccagagacaugguguucagaaccagcacccccagaguggugcuguga

SEQ ID NO: 9033 - RNA, 1710 nt, Artificial Sequence
  derived and/or modified CDS sequence (opt4) from LASV(LM395-SLE-2009;Clade IV)__AIT17811__NP
augagcgccagcaaggagaucaagagcuuccuguggacccagagccugagaagagagcugagcggcuacugcagcaacaucaagcugcagguggugaaggacgcccaggcccugcugcacggccuggacuucagcgaggugagcaacgugcagagacugaugagaaaggagagaagagacgacaacgaccugaagagacugagagaccugaaccaggccgugaacaaccugguggagcugaagagcacccagcagaagagcauccugagagugggcacccugaccagcgacgaccugcugauccuggccgccgaccuggagaagcugaagagcaaggugaccagaaccgagagaccccugagcgccggcguguacaugggcaaccugagcagccagcagcuggaccagagaagagcccugcugaacaugaucggcaugagcggcagcaaccagggcgccagagccggcagagacggcguggugagagugugggacgugaagaacgccgagcugcugaacaaccaguucggcaccaugcccagccugacccuggccugccugaccaagcagggccagguggaccugaacgacgccgugcaggcccugaccgaccugggccugaucuacaccgccaaguaccccaacaccagcgaccuggacagacugacccagagccaccccauccugaacaugaucgacaccaagaagagcagccugaacaucagcggcuacaacuucagccugggcgccgccgugaaggccggcgccugcaugcuggacggcggcaacaugcuggagaccaucaaggugagcccccagaccauggacggcauccugaagagcauccugaaggugaagaaggcccugggcauguucaucagcgacacccccggcgagagaaaccccuacgagaacauccuguacaagaucugccugagcggcgacggcuggcccuacaucgccagcagaaccagcaucaccggcagagccugggagaacaccgugguggaccuggagagcgacggcaagccccagaaggccggcagcaacggcagcaacaagagccugcagagcgccggcuucaccgccggccugaccuacagccagcugaugacccugaaggacgccaugcugcagcuggaccccaacgccaagaccuggauggacaucgagggcagacccgaggaccccguggagaucgccuucuaccagcccagcagcggcugcuacauccacuucuucagagagcccaccgaccugaagcaguucaagcaggacgccaaguacagccacggcaucgacgugaccgaccuguucgccgcccagcccggccugaccagcgccgugaucgacgcccugcccagaaaccuggugaucaccugccagggcagcgacgacaucagaaagcuguucgagagccagggcagaaaggacaucaagcugaucgacaucgcccugagcaagaccgacagcagaaaguacgagaacgccgugugggaccaguacaaggaccugugccacaugcacaccggcaucgugguggagaagaagaagagaggcggcaaggaggagaucaccccccacugcgcccugauggacugcaucauguucgacgccgccgugagcggcggccugaacgccagcgugcugagagccgugcugcccagagacaugguguucagaaccagcacccccagaguggugcuguga

SEQ ID NO: 9034 - RNA, 1710 nt, Artificial Sequence
  derived and/or modified CDS sequence (opt4) from LASV(LM765-SLE-2012;Clade IV)__AIT17815__NP
augagcgccagcaaggagaucaagagcuuccuguggacccagagccugagaagagagcugagcggcuacugcagcaacaucaagcugcagguggugaaggacgcccaggcccugcugcacggccuggacuucagcgaggugagcaacgugcagagacugaugagaaaggagagaagagacgacaacgaccugaagagacugagagaccugaaccaggccgugaacaaccugguggagcugaagagcacccagcagaagagcauccugagagugggcacccugaccagcgacgaccugcugauccuggccgccgaccuggagaagcugaagagcaaggugaccagaaccgagagaccccugagcgccggcguguacaugggcaaccugagcagccagcagcuggaccagagaagagcccugcuggacaugaucggcaugagcggcagcaaccagggcgccagagccggcagagacggcguggugagagugugggacgugaagaacgccgagcugcugaacaaccaguucggcaccaugcccagccugacccuggccugccugaccaagcagggccagguggaccugaacgacgccgugcaggcccugaccgaccugggccugaucuacaccgccaaguaccccaacaccagcgaccuggacagacugacccagagccaccccauccugaacaugaucgacaccaagaagagcagccugaacaucagcggcuacaacuucagccugggcgccgccgugaaggccggcgccugcaugcuggacggcggcaacaugcuggagaccaucaaggugagcccccagaccauggacggcauccugaagagcauccugaaggugaagaaggcccugggcauguucaucagcgacgcccccggcgagagaaaccccuacgagaacauccuguacaagaucugccugagcggcgacggcuggcccuacaucgccagcagaaccagcaucaccggcagagccugggagaacaccgugguggaccuggagagcgacggcaagccccagaaggccggcagcaacggcagcaacaagagccugcagagcgccggcuucaccgccggccugaccuacagccagcugaugacccugaaggacgccaugcugcagcuggaccccaacgccaagaccuggauggacaucgagggcagacccgaggaccccguggagaucgcccuguaccagcccagcagcggcugcuacauccacuucuucagagagcccaccgaccugaagcaguucaagcaggacgccaaguacagccacggcaucgacgugaccgaccuguucgccgcccagcccggccugaccagcgccgugaucgacgcccugcccagaaacauggugaucaccugccagggcagcgacgacaucagaaagcuguucgagagccagggcagaaaggacaucaagcugaucgacaucgcccugagcaagaccgacagcagaaaguacgagaacgccgugugggaccaguacaaggaccugugccacaugcacaccggcaucgugguggagaagaagaagagaggcggcaaggaggagaucaccccccacugcgcccugauggacugcaucauguucgacgccgccgugagcggcggccugaacaccagcgugcugagagccgugcugcccagagacaugguguucagaaccagcacccccagaguggugcuguga

SEQ ID NO: 9035 - RNA, 1710 nt, Artificial Sequence
  derived and/or modified CDS sequence (opt4) from LASV(LM774-SLE-2012;Clade IV)__AIT17821__NP
augagcgccagcaaggagaucaagagcuuccuguggacccagagccugagaagagagcugagcggcuacugcagcaacaucaagcugcagguggugaaggacgcccaggcccugcugcacggccuggacuucagcgaggugagcaacgugcagagacugaugagaaaggagagaagagacgacaacgaccugaagagacugagagaccugaaccaggccgugaacaaccugguggagcugaagagcacccagcagaagagcauccugagagugggcacccugaccagcgacgaccugcugauccuggccgccgaccuggagaagcugaagagcaaggugaucagaaccgagagaccccugagcgccggcguguacaugggcaaccugagcagccagcagcuggaccagagaagagcccugcugagcaugaucggcaugagcggcggcaaccagggcgccagagccggcagagacggcguggugagagugugggacgugaagaacgccgagcugcugaacaaccaguucggcaccaugcccagccugacccuggccugccugaccaagcagggccagguggaccugaacgacgccgugcaggcccugaccgaccugggccugaucuacaccgccaaguaccccaacaccagcgaccuggacagacugacccagagccaccccauccugaacaugaucgacaccaagaagagcagccugaacaucagcggcuacaacuucagccugggcgccgccgugaaggccggcgccugcaugcuggacggcggcaacaugcuggagaccaucaaggugagcccccagaccguggacggcauccugaagagcauccugaaggugaagaaggcccugggcauguucaucagcgacacccccggcgagagaaaccccuacgagaacauccuguacaagaucugccugagcggcgacggcuggcccuacaucgccagcagaaccagcaucaccggcagagccugggagaacaccgugguggaccuggagagcgacggcaagccccagaagaccggcagcaacaacagcaacaagagccugcagagcgccggcuucaccgccggccugaccuacagccagcugaugacccugaaggacgccaugcugcagcuggaccccaacgccaagaccuggauggacaucgagggcagacccgaggaccccguggagguggcccuguaccagcccagcagcggcugcuacauccacuucuucagagagcccaccgaccugaagcaguucaagcaggacgccaaguacagccacggcaucgacgugaccgaccuguucgccgcccagcccggccugaccagcgccgugaucgacgcccugcccagaaacauggugaucaccugccagggcagcgacgacaucagaaagcugcuggagagccagggcagaaaggacaucaagcugaucgacaucgcccugagcaagaccgacagcagaaaguacgagaacgccgugugggaccaguacaaggaccugugccacaugcacaccggcguggugguggagaagaagaagagaggcggcaaggaggagaucaccccccacugcgcccugauggacugcaucauguucgacgccgccgugagcggcggccugaacaccagcgugcugagagccgugcugcccagagacaugguguucagaaccagcacccccagaguggugcuguga

SEQ ID NO: 9036 - RNA, 1710 nt, Artificial Sequence; identical to SEQ ID NO: 8984
  derived and/or modified CDS sequence (opt4) from LASV(LM776-SLE-2012;Clade IV)__AIT17825__NP

SEQ ID NO: 9037 - RNA, 1710 nt, Artificial Sequence
  derived and/or modified CDS sequence (opt4) from LASV(Mad39;Clade IV)__ANH09723__NP
augagcgccagcaaggagaucaagagcuuccuguggacccagagccugagaagagagcugagcggcuacugcagcaacaucaagcugcagguggugaaggacgcccaggcccugcugcacggccuggacuucagcgaggugagcaacgugcagagacugaugagaaagcagagaagagacgacaacgaccugaagagacugagagaccugaaccaggccgugaacaaccugguggagcugaagagcacccagcagaagagcgugcugagagugggcacccugaccagcgacgaccugcugacccuggccgccgaccuggagaagcugaagagcaaggugaccagaaccgagagaccccugaccgccggcguguacaugggcaaccugagcagccagcagcuggaccagagaagagcccugcugaacaugaucggcaugagcggcggcaaccagggcgccagaaccggcagagacggcguggugagagugugggacgugaagaacgccgagcugcugaacaaccaguucggcaccaugcccagccugacccuggccugccugaccaagcagggccagguggaccugaacgacguggugcaggcccugaccgaccugggccugaucuacaccgccaaguaccccaacaccagcgaccuggacagacugacccagagccaccccauccugaacaugaucgacaccaacaagagcagccugaacaucagcggcuacaacuucagccugggcgccgccgugaaggccggcgccugcaugcuggacggcggcaacaugcuggagaccaucaaggugagcccccagaccauggacggcauccugaagagcauccugaaggugaagaagagccugggcauguucaucagcgacacccccggcgagagaaaccccuacgagaacauccuguacaagaucugccugagcggcgacggcuggcccuacaucgccagcagaaccagcaucaccggcagagccugggagaacaccgugguggaccuggagagcggcggcaagccccagaaggccggcagcaacaacagcaacaagagccugcagagcgccggcuucgccgccggccugaccuacagccagcugaugacccugaaggacgccaugcugcagcuggaccccaacgccaagaccuggauggacaucgagggcagacccgaggaccccguggagaucgcccuguaccagcccaucagcggcugcuacauccacuucuucagagagcccaccgaccugaagcaguucaagcaggacgccaaguacagccacggcaucgacgugaccgaccuguucgccgcccagcccggccugaccagcgccgugaucgaggcccugcccagaaacauggugaucaccugccagggcagcgacgacaucagaaagcuguucgagagccagggcagaaaggacaucaagcugaucgacaucgcccugagcaagaccgacagcagaaaguacgagaacgccgugugggaccaguacaaggaccugugccacaugcacaccggcguggugguggagaagaagaagaagggcggcaaggaggagaucaccccccacugcgcccugauggacugcaucauguucgacgccgccgugagcggcggccugaacacccuggugcugagagccgugcugcccagagacaugguguucagaaccagcacccccaagguggugcuguga

SEQ ID NO: 9038 - RNA, 1710 nt, Artificial Sequence
  derived and/or modified CDS sequence (opt4) from LASV(Mad41;Clade IV)__ANH09725__NP
augagcgccagcaaggagaucaagagcuuccuguggacccagagccugagaagagagcugagcggcuacugcagcaacaucaagcugcagguggugaaggacgcccaggcccugcugcacggccuggacuucagcgaggugagcaacgugcagagacugaugagaaagcagagaagagacgacaacgaccugaagagacugagagaccugaaccaggccgugaacaaccugguggagcugaagagcacccagcagaagagcgugcugagagugggcacccugaccagcgacgaccugcugauccuggccgccgaccuggagaagcugaagagcaaggugaccagaaccgagagaccccugagcgccggcguguacaugggcaaccugagcagccagcagcuggaccagagaagagcccugcugaacaugaucggcaugagcggcggcaaccagggcgccagagccggcagagacggcguggugagagugugggacgugaagaacgccgaccugcugaacaaccaguucggcaccaugcccagccugacccuggccugccugaccaagcagggccagguggaccugaacgacguggugcaggcccugaccgaccugggccugaucuacaccgccaaguaccccaacaccagcgaccuggacagacugacccagagccaccccauccugaacaugaucgacaccaacaagagcagccugaacaucagcggcuacaacuucagccugggcgccgccgugaaggccggcgccugcaugcuggacggcggcaacaugcuggagaccaucaaggugagcccccagaccauggacggcauccugaagagcauccugaaggugaagaagagccugggcauguucaucagcgacacccccggcgagagaaaccccuacgagaacauccuguacaagaucugccugagcggcgacggcuggcccuacaucgccagcagaaccagcaucaccggcagagccugggagaacaccgugguggaccuggagagcggcggcaagccccagaaggccggcagcaacaacagcaacaagagccugcagagcgccggcuucgccgccggccugaccuacagccagcugaugacccugaaggacgccaugcugcagcuggaccccaacgccaagaccuggauggacaucgagggcagacccgaggaccccguggagaucgcccuguaccagcccaucagcggcugcuacauccacuucuucagagagcccaccgaccugaagcaguucaagcaggacgccaaguacagccacggcaucgacgugaccgaccuguucgccgcccagcccggccugaccagcgccgugaucgaggcccugcccagaaacauggugaucaccugccagggcagcgacgacaucagaaagcugcuggagagccagggcagaaaggacaucaagcugaucgacaucgcccugagcaagaccgacagcagaaaguacgagaacgccgugugggaccaguacaaggaccugugccacaugcacaccggcguggugguggagaagaagaagagaggcggcaaggaggagaucaccccccacugcgcccugauggacugcaucauguucgacgccgccgugagcggcggccugaacacccuggugcugagagccgugcugcccagagacaugguguucagaaccagcacccccaagguggugcuguga

SEQ ID NO: 9039 - RNA, 1710 nt, Artificial Sequence
  derived and/or modified CDS sequence (opt4) from LASV(Mad63;Clade IV)__ANH09729__NP
augagcgccagcaaggagaucaagagcuuccuguggacccagagccugagaagagagcugagcggcuacugcagcaacaucaagcugcagguggugaaggacgcccaggcccugcugcacggccuggacuucagcgaggugagcaacgugcagagacugaugagaaagcagagaagagacgacagcgaccugaagagacugagagaccugaaccaggccgugaacaaccugguggagcugaagagcacccagcagaagagcgugcugagagugggcacccugaccagcgacgaccugcugacccuggccgccgaccuggagaagcugaagagcaaggugaccagaaccgagagaccccugagcgccggcguguacaugggcaaccugagcagccagcagcuggaccagagaagagcccugcugaacaugaucggcaugagcggcggcaaccagggcgccagaaccggcagagacggcguggugagagugugggacgugaagaacgccgaccugcugaacaaccaguucggcaccaugcccagccugacccuggccugccugaccaagcagggccagguggaccugaacgacguggugcaggcccugaccgaccugggccugaucuacaccgccaaguaccccaacaccagcgaccuggacagacugacccagagccaccccauccugaacaugaucgacaccaacaagagcagccugaacaucagcggcuacaacuucagccugggcgccgccgugaaggccggcgccugcaugcuggacggcggcaacaugcuggagaccaucaaggugagcccccagaccauggacggcauccugaagagcauccugaaggugaagaagagccugggcauguucaucagcgacacccccggcgagagaaaccccuacgagaacauccuguacaagaucugccugagcggcgacggcuggcccuacaucgccagcagaaccagcaucaccggcagagccugggagaacaccgugguggaccuggagagcggcggcaagccccagagagccggcagcaacaacagcaacaagagccugcagagcgccggcuucgccgccggccugaccuacagccagcugaugacccugaaggacgccaugcugcagcuggaccccaacgccaagaccuggauggacaucgagggcagacccgaggaccccguggagaucgcccuguaccagcccaccagcggcugcuacauccacuucuucagagagcccaccgaccugaagcaguucaagcaggacgccaaguacagccacggcaucgacgugaccgaccuguucgccgcccagcccggccugaccagcgccgugaucgaggcccugcccagaaacauggugaucaccugccagggcagcgacgacaucagaaagcugcuggagagccagggcagaaaggacaucaagcugaucgacaucgcccugagcaagaccgacagcagaaaguacgagaacgccgugugggaccaguacaaggaccugugccacaugcacaccggcguggugguggagaagaagaagaagggcggcaaggaggagaucaccccccacugcgcccugauggacugcaucauguucgacgccgccgugagcggcggccugaacacccuggugcugagagccgugcugcccagagacaugguguucagaaccagcacccccaagguggugcuguga

SEQ ID NO: 9040 - RNA, 1710 nt, Artificial Sequence
  derived and/or modified CDS sequence (opt4) from LASV(Mad69;Clade IV)__ANH09731__NP
augagcgccagcaaggagaucaagagcuuccuguggacccagagccugagaagagagcugagcggcuacugcagcaacaucaagcugcagguggugaaggacgcccaggcccugcugcacggccuggacuucagcgaggugagcaacgugcagagacugaugagaaagcagagaagagacgacaacgaccugaagagacugagagaccugaaccaggccgugaacaaccugguggagcugaagagcacccagcagaagagcgugcugagagugggcacccugaccagcgacgaccugcugacccuggccgccgaccuggagaagcugaagagcaaggugaccagaaccgagagaccccugagcgccggcguguacaugggcaaccugagcagccagcagcuggaccagagaagagcccugcugaacaugaucggcaugaccggcggcaaccagggcgccagaaccggcagagacggcguggugagagugugggacgugaagaacgccgaccugcugaacaaccaguucggcaccaugcccagccugacccuggccugccugaccaagcagggccagguggaccugaacgacguggugcaggcccugaccgaccugggccugaucuacaccgccaaguaccccaacaccagcgaccuggacagacugacccagagccaccccauccugaacaugaucgacaccaacaagagcagccugaacaucagcggcuacaacuucagccugggcgccgccgugaaggccggcgccugcaugcuggacggcggcaacaugcuggagaccaucaaggugagcccccagaccauggacggcauccugaagagcauccugaaggugaagaagagccugggcauguucaucagcgacacccccggcgagagaaaccccuacgagaacauccuguacaagaucugccugagcggcgacggcuggcccuacaucgccagcagaaccagcaucaccggcagagccugggagaacaccgugguggaccuggagagcggcggcaagccccagagagccggcagcaacaacagcaacaagagccugcagagcgccggccuggccgccggccugaccuacagccagcugaugacccugaaggacgccaugcugcagcuggaccccaacgccaagaccuggauggacaucgagggcagacccgaggaccccguggagaucgcccuguaccagcccaccagcggcugcuacauccacuucuucagagagcccaccgaccugaagcaguucaagcaggacgccaaguacagccacggcaucgacgugaccgaccuguucgccgcccagcccggccugaccagcgccgugaucgaggcccugcccagaaacauggugaucaccugccagggcagcgacgacaucagaaagcugcuggagagccagggcagaaaggacaucaagcugaucgacaucgcccugagcaagaccgacagcagaaaguacgagaacgccgugugggaccaguacaaggaccugugccacaugcacaccggcguggugguggagaagaagaagaagggcggcaaggaggagaucaccccccacugcgcccugauggacugcaucauguucgacgccgccgugagcggcggccugaacacccuggugcugagagccgugcugcccagagacaugguguucagaaccagcacccccaagguggugcuguga

SEQ ID NO: 9041 - RNA, 1710 nt, Artificial Sequence
  derived and/or modified CDS sequence (opt4) from LASV(Mad83;Clade IV)__ANH09733__NP
augagcgccagcaaggagaucaagagcuuccuguggacccagagccugagaagagagcugagcggcuacugcagcaacaucaagcugcagguggugaaggacgcccaggcccugcugcacggccuggacuucagcgaggugagcaacgugcagagacugaugagaaagcagagaagagacgacaacgaccugaagagacugagagaccugaaccaggccgugaacaaccugguggagcugaagagcacccagcagaagagcgugcugagagugggcacccugaccagcgacgaccugcugacccuggccgccgaccuggagaagcugaagagcaaggugaccagaaccgagagaccccugagcgccggcguguacaugggcaaccugagcagccagcagcuggaccagagaagagcccugcugaacaugaucggcaugagcggcggcaaccagggcgccagaaccggcagagacggcguggugagagugugggacgugaagaacgccgaccugcugaacaaccaguucggcaccaugcccagccugacccuggccugccugaccaagcagggccagguggaccugaacgacguggugcaggcccugaccgaccugggccugaucuacaccgccaaguaccccaacaccagcgaccuggacagacugacccagagccaccccauccugaacaugaucgacaccaacaagagcagccugaacaucagcggcuacaacuucagccugggcgccgccgugaaggccggcgccugcaugcuggacggcggcaacaugcuggagaccaucaaggugagcccccagaccauggacggcauccugaagagcauccugaaggugaagaagagccugggcauguucaucagcgacacccccggcgagagaaaccccuacgagaacauccuguacaagaucugccugagcggcgacggcuggcccuacaucgccagcagaaccagcaucaccggcagagccugggagaacaccgugguggaccuggagagcggcggcaagccccagagagccggcagcaacaacagcaacaagagccugcagagcgccggcuucgccgccggccugaccuacagccagcugaugacccugaaggacgccaugcugcagcuggaccccaacgccaagaccuggauggacaucgagggcagacccgaggaccccguggagaucgccuucuaccagcccaucagcggcugcuacauccacuucuucagagagcccaccgaccugaagcaguucaagcaggacgccaaguacagccacggcaucgacgugaccgaccuguucgccgcccagcccggccugaccagcgccgugaucgaggcccugcccagaaacauggugaucaccugccagggcagcgacgacaucagaaagcugcuggagagccagggcagaaaggacaucaagcugaucgacaucgcccugagcaagaccgacagcagaaaguacgagaacgccgugugggaccaguacaaggaccugugccacaugcacaccggcguggugguggagaagaagaagaagggcggcaaggaggagaucaccccccacugcgcccugauggacugcaucauguucgacgccgccgugagcggcggccugaacacccuggugcugagagccgugcugcccagagacaugguguucagaaccagcacccccaagguggugcuguga

SEQ ID NO: 9042 - RNA, 1710 nt, Artificial Sequence
  derived and/or modified CDS sequence (opt4) from LASV(NL;Clade IV)__AAO59513__NP
augagcgccagcaaggaggugaagagcuuccuguggacccagagccugagaagagagcugagcggcuacugcagcaacaucaagcugcagguggugaaggacgcccaggcccugcugcacggccuggacuucagcgaggugagcaacgugcagagacugaugagaaaggagagaagagacgacagcgaccugaagagacugagagaccugaaccaggccgugaacaaccugguggagcugaagagcacccagcagaagagcgugcugagagugggcacccugaccagcgacgaccugcuggugcuggccgccgaccuggagaagcugagaagcaaggugaccagaaccgagagaccccugagcgccggcguguacaugggcaaccugagcagccagcagcuggaccagagaagagcccugcugagcaugaucggcaugaacggcagcaaccagggcgccagagccggcagagacggcguggugagagugugggacgugaagaacgccgagcugcugaacaaccaguucggcaccaugcccagccugacccuggccugccugaccaagcagggccagguggaccugaacgacgccgugcaggcccugaccgaccugggccugaucuacaccgccaaguaccccaacaccagcgaccuggacagacugacccagagccaccccauccugaacaugaucgacaccaagaagagcagccugaacgugagcggcuacaacuucagccugggcgccgccgugaaggccggcgccugcaugcuggacggcggcaacaugcuggagaccaucaaggugagcccccagaccauggacggcauccugaagagcauccugaaggugaagaaggcccugggcauguucaucagcgacacccccggcgagagaaaccccuacgagaacauccuguacaagaucugccugagcggcgacggcuggcccuacaucgccagcagaaccagcaucaccggcagagccugggagaacaccgugguggaccuggagagcgacgagaagccccagaaggccggcagcaacaacagcaacaagagccugcagagcgccggcuucaccgccggccugaccuacagccagcugaugacccugaaggacgccaugcugcagcuggaccccaacgccaagaccuggauggacaucgagggcagacccgaggaccccguggagaucgcccuguaccagcccagcagcggcugcuacauccacuucuucagagagcccaccgaccugaagcaguucaagcaggacgccaaguacagccacggcaucgacaucaccgaccuguucgccgcccagcccggccugaccagcgccgugaucgacgcccugcccagaaacauggugaucaccugccagggcagcgacgacaucagaaagcugcuggagagccagggcagaaaggacaucaagcugaucgacaucgcccugaacaaggccgacagcagaaaguacgagaacgccgugugggaccaguacaaggaccugugccacaugcacaccggcguggugguggagaagaagaagagaggcggcaaggaggagaucaccccccacugcgcccugauggacugcaucauguucgacgccgccgugagcggcggccugaagacccuggugcugagagccgugcugcccagagacaugguguucagaaccagcacccccagaguggugcuguga

SEQ ID NO: 9043 - RNA, 1710 nt, Artificial Sequence
  derived and/or modified CDS sequence (opt4) from LASV(Z0947-SLE-2011;Clade IV)__AIT17841__NP
augagcgccagcaaggagaucaagagcuuccuguggacccagagccugagaagagagcugagcggcuacugcagcaacaucaagcugcagguggugaaggacgcccaggcccugcugcacggccuggacuucagcgaggugagcaacgugcagagacugaugagaaaggagagaagagacgacaacgaccugaagagacugagagaccugaaccaggccgugaacaaccugguggagcugaagagcacccagcagaagagcauccugagagugggcacccugaccagcgacgaccugcugauccuggccgccgaccuggagaagcugaagagcaaggugaccagaaccgagagaccccugagcgccggcguguacaugggcaaccugagcagccagcagcuggaccagagaagagcccugcugaacaugaucggcaugagcggcagcaaccagggcgccagaaccggcagagacggcguggugagagugugggacgugaagaacgccgagcugcugaacaaccaguucggcaccaugcccagccugacccuggccugccugaccaagcagggccagguggaccugaacgacgccgugcaggcccugaccgaccugggccugaucuacaccgccaaguaccccaacaccagcgaccuggacagacugacccagagccaccccauccugaacaugaucgacaccaagaagagcagccugaacaucagcggcuacaacuucagccugggcgccgccgugaaggccggcgccugcaugcuggacggcggcaacaugcuggagaccaucaaggugagcccccagaccauggacggcauccugaagagcauccugaaggugaagaaggcccugggcauguucaucagcgacgcccccggcgagagaaaccccuacgagaacauccuguacaagaucugccugagcggcgacggcuggcccuacaucgccagcagaaccagcaucaccggcagagccugggagaacaccgugguggaccuggagagcgacggcaagccccagaaggccggcagcaacggcagcaacaagagccugcagagcgccggcuucaccgccggccugaccuacagccagcugaugacccugaaggacgccaugcugcagcuggaccccaacgccaagaccuggauggacaucgagggcagacccgaggaccccguggagaucgcccuguaccagcccagcagcggcugcuacauccacuucuucagagagcccaccgaccugaagcaguucaagcaggacgccaaguacagccacggcaucgacgugaccgaccuguucgccgcccagcccggccugaccagcgccgugaucgacgcccugcccagaaacauggugaucaccugccagggcagcgacgacaucagaaagcuguucgagagccagggcagaaaggacaucaagcugaucgacaucgcccugagcaagaccgacagcagaaaguacgagaacgccgugugggaccaguacaaggaccugugccacaugcacaccggcaucgugguggagaagaagaagagaggcggcaaggaggagaucaccccccacugcgcccugauggacugcaucauguucgacgccgccgugagcggcggccugaacaccagcgugcugagagccgugcugcccagagacaugguguucagaaccagcacccccagaguggugcuguga

SEQ ID NO: 9044 - RNA, 1710 nt, Artificial Sequence
  derived and/or modified CDS sequence (opt4) from LASV(Z0948-SLE-2011;Clade IV)__AIT17845__NP
augagcgccagcaaggagaucaagagcuuccuguggacccagagccugagaagagagcugagcggcuacugcagcaacaucaagcugcagguggugaaggacgcccaggcccugcugcacggccuggacuucagcgaggugagcaacgugcagagacugaugagaaaggagagaagagacgacaacgaccugaagagacugagagaccugaaccaggccgugaacaaccugguggagcugaagagcacccagcagaagagcauccugagagugggcacccugaccagcgacgaccugcugauccuggccgccgaccuggagaagcugaagagcaaggugaccagaaccgagagaccccugagcgccggcguguacaugggcaaccugagcagccagcagcuggaccagagaagagcccugcugaacaugaucggcaugagcggcagcaaccagggcgcccagaccggcagagacggcguggugagagugugggacgugaagaacgccgagcugcugaacaaccaguucggcaccaugcccagccugacccuggccugccugaccaagcagggccagguggaccugaacgacgccgugcaggcccugaccgaccugggccugaucuacaccgccaaguaccccaacaccagcgaccuggacagacugacccagagccaccccauccugaacaugaucgacaccaagaagagcagccugaacaucagcggcuacaacuucagccugggcgccgccgugaaggccggcgccugcaugcuggacggcggcaacaugcuggagaccaucaaggugagcccccagaccauggacggcauccugaagagcauccugaaggugaagaaggcccugggcauguucaucagcgacgcccccggcgagagaaaccccuacgagaacauccuguacaagaucugccugagcggcgacggcuggcccuacaucgccagcagaaccagcaucaccggcagagccugggagaacaccgugguggaccuggagagcgacggcaagccccagaaggccggcagcaacggcagcaacaagagccugcagagcgccggcuucaccgccggccugaccuacagccagcugaugacccugaaggacgccaugcugcagcuggaccccaacgccaagaccuggauggacaucgagggcagacccgaggaccccguggagaucgcccuguaccagcccagcagcggcugcuacauccacuucuucagagagcccaccgaccugaagcaguucaagcaggacgccaaguacagccacggcaucgacgugaccgaccuguucgccgcccagcccggccugaccagcgccgugaucgacgcccugcccagaaacauggugaucaccugccagggcagcgacgacaucagaaagcuguucgagagccagggcagaaaggacaucaagcugaucgacaucgcccugagcaagaccgacagcagaaaguacgagaacgccgugugggaccaguacaaggaccugugccacaugcacaccggcaucgugguggagaagaagaagagaggcggcaaggaggagaucaccccccacugcgcccugauggacugcaucauguucgacgccgccgugagcggcggccugaacaccagcgugcugagagccgugcugcccagagacaugguguucagaaccagcacccccagaguggugcuguga

SEQ ID NO: 9045 - RNA, 1710 nt, Artificial Sequence
  derived and/or modified CDS sequence (opt4) from LASV(Z148;Clade IV)__AAT49007__NP
augagcgugagcaaggagaucaagagcuuccuguggacccagagccugagaagagagcugagcggcuacugcagcaacaucaagcugcagguggugaaggacgcccaggcccugcugcacggccuggacuucagcgaggugagcaacgugcagagacugaugagaaagcagagaagagacgacaacgaccugaagagacugagagaccugaaccaggccgugaacaaccugguggagcugaagagcacccagcagaagagcgugcugagagugggcacccugaccagcgacgaccugcugauccuggccgccgaccuggagaagcugaagagcaaggugaccagaaccgagagaccccugagcgccggcaucuacaugggcaaccugagcagccagcagcuggaccagagaagagcccugcugaacaugaucggcaugagcggcggcaaccagggcgcccagaccggcagagacggcguggugagaaucugggacgugaagaacgccgagcugcugaacaaccaguucggcaccaugcccagccugacccuggccugccugaccaagcagggccagguggaccugaacgacguggugcaggcccugaccgaccugggccugaucuacaccgccaaguaccccaacaccagcgaccuggacagacugacccagagccaccccauccugaacaugaucgacaccaagaagagcagccugaacaucagcggcuacaacuucagccugggcgccgccgugaaggccggcgccugcaugcuggacggcggcaacaugcuggagaccaucaaggugagcccccagaccauggacggcauccugaagagcauccugaaggugaagaaggcccugggcauguucaucagcgacacccccggcgagagaaaccccuacgagaacauccuguacaagaucugccugagcggcgacggcuggcccuacaucgccagcagaaccagcaucaccggcagagccugggagaacaccgugguggaccuggagagcggcgagaagccccagaagaucggcagcaacaacagcaacaagagccugcagagcgccggcuucaccgccggccugaccuacagccagcugaugacccugaaggacgccaugcugcagcuggaccccaacgccaagaccuggauggacaucgagggcagacccgaggaccccguggagaucgcccuguaccagcccagcagcggcugcuacauccacuucuucagagagcccaccgaccugaagcaguucaagcaggacgccaaguacagccacggcaucgacgugaccgaccuguucgccgcccagcccggccugaccagcgccgugaucgaggcccugcccagaaacauggugaugaccugccagggcagcgacgacaucagaaagcugcuggagagccagggcagaaaggacaucaagcugaucgacaucgcccugagcaagaccgacagcagaaaguacgagaacgccgugugggaccaguacaaggaccugugccacaugcacaccggcguggugguggagaagaagaagaagggcggcaaggaggagaucaccccccacugcgcccugauggacugcaucauguucgacgccgccgccagcggcggccugaacacccuggugcugagagccgugcugcccagagacaugguguucagaaccagcacccccaagguggugcuguga

SEQ ID NO: 9046 - RNA, 1710 nt, Artificial Sequence
  derived and/or modified CDS sequence (opt4) from LASV(Bamba-R114;Clade V)__AHC95554__NP
augagcgccagcaaggaggugagaagcuuccuguggacccagagccugagaagagagcugagcggcuacugcagcaacaucaagcugcagguggugaaggacgcccaggcccugcugcacggccuggacuucagcgaggugagcaacgugcagagacugaugagaaagcagagaagagacgacggcgaccugaagagacugagagaccugaaccaggccgugaacaaccugguggagcugaagagcacccagcagaagagcgugcugagagugggcacccugaacagcgacgaccugcugacccuggccgccgaccuggagaagcugaagagcaaggugaccagaaccgagagaccccugagcagcggcguguacaugggcaaccugagcagccagcagcuggaccagagaagagcccugcugaacaugaucggcaugaccggcggcaaccagggcgcccaggccggcagagacggcguggugagagugugggacgugaagaacgccgagcugcugaacaaccaguucggcaccaugcccagccugacccuggccugccugaccaagcagggccagguggaccugaacgacguggugcaggcccugaccgaccugggccugaucuacaccgccaaguaccccaacaccagcgaccuggacagacugacccagagccaccccauccugaacaugaucgacaccaagaagagcagccugaacaucagcggcuacaacuucagccugggcgccgccgugaaggccggcgccugcaugcuggacggcggcaacaugcuggagaccaucaagaucagcccccagagcguggacggcauccugaagagcauccugaaggugaagagaagccugggcauguucgugagcgacacccccggcgagagaaaccccuacgagaacauccuguacaagaucugccugagcggcgacggcuggcccuacaucgccagcagaaccagcaucgugggcagagccugggagaacaccgugguggaccuggaggccgacggcaagccccagaagcccaacagcggcagcagcaacaagagccugcagagcgccggcuuccccgccggccugaccuacagccagcugaugacccugaaggacgccaugcugcagcuggaccccaacgccaagaccuggauggacaucgagggcagacccgaggaccccguggagguggcccuguaccagcccagcagcggcugcuacauccacuucuucagagagcccaccgaccugaagcaguucaagcaggacgccaaguacagccacggcaucgacgugaccgaccuguucgccgcccagcccggccugaccagcgccgugaucgaggcccugcccagaaacauggugaucaccugccagggcagcgaggacaucaagaagcugcuggagagccagggcagaaaggacaucaagcugaucgacaucgcccugagcaagaucgacagcagaaaguucgagaacgccgugugggaccaguacaaggaccugugccacaugcacaccggcguggugguggagaagaagaagagaggcggcaaggaggagaucaccccccacugcgcccugauggacugcaucauguucgacgccgccgugagcggcggccugaacgccagcgugcugagagccgugcugcccagagacaugguguucagaaccagcacccccaagguggugcuguga

SEQ ID NO: 9047 - RNA, 1710 nt, Artificial Sequence
  derived and/or modified CDS sequence (opt4) from LASV(Komina-R16;Clade V)__AHC95556__NP
augagcgccagcaaggaggugaagagcuuccuguggacccagagccugagaagagagcugagcggcuacugcagcaacaucaagcugcagguggugaaggacgcccaggcccugcugcacggccuggacuucagcgaggugagcaacgugcagagacugaugagaaagcagagaagagacgacggcgaccugaagagacugagagaccugaaccaggccgugaacaaccugguggagcugaagagcacccagcagaagaacgugcugagagugggcacccugaacagcgacgaccugcugacccuggccgccgaccuggagaagcugaagagcaaggugaccagaaccgagagaccccugagcagcggcguguacaugggcaaccugagcagccagcagcuggaccagagaagagcccugcugaacaugaucggcaugaccggcggcaaccagggcacccagaccggcagagacggcguggugagagugugggacgugaagaacgccgagcugcugaacaaccaguucggcaccaugcccagccugacccuggccugccugaccaagcagggccaggccgaccugaacgacguggugcaggcccugaccgaccugggccugaucuacaccgccaaguaccccaacgccagcgaccuggacagacugacccagagccaccccauccugaacaugaucgacaccaagaagagcagccugaacaucagcggcuacaacuucagccugggcgccgccgugaaggccggcgccugcaugcuggacggcggcaacaugcuggagaccaucaaggugagcccccagagcauggacggcauccugaagagcauccugaaggugaagagagcccugggcauguucgugagcgacacccccggcgagagaaaccccuacgagaacauccuguacaagaucugccugagcggcgacggcuggcccuacaucgccagcagaaccagcaucgugggcagagccugggagaacaccgugguggaccuggaggccgacggcaaccccaagaagcugaacagcaacggcagcaacaagagccugcagagcgccggcuuccccgccggccugaccuacagccagcugaugacccugaaggacgccaugcugcagcuggaccccaacgccaagaccuggauggacaucgagggcagacccgaggaccccguggagguggcccuguaccagcccaacagcggcugcuacauccacuucuucagagagcccaccgaccugaagcaguucaagcaggacgccaaguacagccacggcaucgacgugaccgaccuguucgccgcccagcccggccugaccagcgccgugaucgaggcccugcccagaaacauggugaucaccugccagggcagcgaggacaucagaaagcugcuggagagccagggcagaaaggacaucaagcugaucgacaucgcccugagcaagaccgacagcagaaaguucgagaacgccgugugggaccagcacaaggaccugugccacaugcacaccggcguggugguggagaagaagaagagaggcggcaaggaggagaucaccccccacugcgcccugauggacugcaucauguucgacgccgccgugagcggcggccugaacacccuggugcugagagccgugcugcccagagacaugguguucagaaccagcacccccaagguggugcuguga

SEQ ID NO: 9048 - RNA, 1710 nt, Artificial Sequence
  derived and/or modified CDS sequence (opt4) from LASV(Ouoma-R123;Clade V)__AHC95558__NP
augagcgccagcaaggaggugagaagcuuccuguggacccagagccugagaagagagcugagcggcuacugcagcaacaucaagcugcagguggugaaggacgcccaggcccugcugcacggccuggacuucagcgaggugagcaacgugcagagacugaugagaaagcagagaagagacgacagcgaccugaagagacugagagaccugaaccaggccgugaacaaccugguggagcugaagagcacccagcagaagagcgugcugagagugggcacccugagcagcgacgaccugcugacccuggccgccgaccuggagaagcugaagagcaaggugaucagaaccgagagaccccugagcagcggcguguacaugggcaaccugagcagccagcagcuggaccagagaagagcccugcugaacaugaucggcaugaccggcggcaaccagggcgcccaggccggcagagacggcguggugagagugugggacgugagaaacgccgagcugcugaacaaccaguucggcaccaugcccagccugacccuggccugccugaccaagcagggccagguggaccugaacgacguggugcaggcccugaccgaccugggccugaucuacaccgccaaguaccccaacaccagcgaccuggacagacugacccagaaccaccccauccugaacaugaucgacaccaagaagagcagccugaacaucagcggcuacaacuucagccugggcgccgccgugaaggccggcgccugcaugcuggacggcggcaacaugcuggagaccaucaaggugagcccccagagcaucgacggcauccugaagagcauccugaaggugaagagaacccugggcauguucgugagcgacacccccggcgagagaaaccccuacgagaacauccuguacaagaucugccugagcggcgacggcuggcccuacaucgccagcagaaccagcaucgugggcagagccugggagaacaccgugguggaccuggagaccgacagaaagagccagggccccaacagcggcaacagcaacaagagccugcagagcgccggcuucagcgccggccugaccuacagccagcugaugacccugaaggacgccaugcugcagcuggaccccaacgccaagaccuggauggacaucgagggcagacccgaggaccccguggagguggcccuguaccagcccaucagcggcugcuacauccacuucuucagagagcccaccgaccugaagcaguucaagcaggacgccaaguacagccacggcaucgacaucaccgaccuguucgccgcccagcccggccugaccagcgccgugaucgaggcccugcccagaaacauggugaucaccugccagggcagcgaggacaucaagaagcugcuggagagccagggcagaaaggacaucaagcugaucgacaucgcccugagcaagaucgacagcagaaaguucgagaacgccgugugggaccaguacaaggaccugugccacaugcacaccggcguggugguggagaagaagaagagaggcggcaaggaggagaucaccccccacugcgcccugauggacugcaucauguucgacgccgccgugagcggcggccugaacgccagcgugcugagagccgugcugcccagagacaugguguucagaaccagcacccccaagguggugcuguga

SEQ ID NO: 9049 - RNA, 1710 nt, Artificial Sequence
  derived and/or modified CDS sequence (opt4) from LASV(Soromba-R;Clade V)__AHC95552__NP
augagcgccagcaaggaggugaagagcuuccuguggacccagagccugagaagagagcugagcggcuacugcagcaacaucaagcugcagguggugaaggacgcccaggcccugcugcacggccuggacuucagcgaggugagcaacgugcagagacugaugagaaagcagagaagagacgacggcgaccugaagagacugagagaccugaaccaggccgugaacaaccugguggagcugaagagcacccagcagaagaacgugcugagagugggcacccugaacagcgacgaccugcugacccuggccgccgaccuggagaagcugaagagcaaggugaccagaaccgagagaccccugagcagcggcguguacaugggcaaccugagcagccagcagcuggaccagagaagagcccugcugaacaugaucggcaugaccggcggcaaccagggcacccaggccggcagagacggcguggugagagugugggacgugaagaacgccgagcugcugaacaaccaguucggcaccaugcccagccugacccuggccugccugaccaagcagggccaggccgaccugaacgacguggugcaggcccugaccgaccugggccugaucuacaccgccaaguaccccaacgccagcgaccuggacagacugacccagagccaccccauccugaacaugaucgacaccaagaagagcagccugaacaucagcggcuacaacuucagccugggcgccgccgugaaggccggcgccugcaugcuggacggcggcaacaugcuggagaccaucaaggugagcccccagagcauggacggcauccugaagagcauccugaaggugaagagagcccugggcauguucgugagcgacacccccggcgagagaaaccccuacgagaacauccuguacaagaucugccugagcggcgacggcuggcccuacaucgccagcagaaccagcaucgugggcagagccugggagaacaccgugguggaccuggaggccgacggcaaccccaagaagcugaacagcaacggcagcaacaagagccugcagagcgccggcuuccccgccggccugaccuacagccagcugaugacccugaaggacgccaugcugcagcuggaccccaacgccaagaccuggauggacaucgagggcagacccgaggaccccguggagguggcccuguaccagcccaacagcggcugcuacauccacuucuucagagagcccaccgaccugaagcaguucaagcaggacgccaaguacagccacggcaucgacgugaccgaccuguucgccgcccagcccggccugaccagcgccgugaucgaggcccugcccagaaacauggugaucaccugccagggcagcgaggacaucagaaagcugcuggagagccagggcagaaaggacaucaagcugaucgacaucgcccugagcaagaccgacagcagaaaguucgagaacgccgugugggaccaguacaaggaccugugccacaugcacaccggcguggugguggagaagaagaagagaggcggcaaggaggagaucaccccccacugcgcccugauggacugcaucauguucgacgccgccgugagcggcggccugaacacccuggugcugagagccgugcugcccagagacaugguguucagaaccagcacccccagaguggugcuguga

SEQ ID NO: 9050 - RNA, 1710 nt, Artificial Sequence
  derived and/or modified CDS sequence (opt4) from LASV(Soromba-R30;Clade V)__AHC95560__NP
augagcgccagcaaggaggugaagagcuuccuguggacccagagccugagaagagagcugagcggcuacugcagcaacaucaagcugcagguggugaaggacgcccaggcccugcugcacggccuggacuucagcgaggugagcaacgugcagagacugaugagaaagcagagaagagacgacggcgaccugaagagacugagagaccugaaccaggccgugaacaaccugguggagcugaagagcacccagcagaagaacgugcugagagugggcacccugaacagcgacgaccugcugacccuggccgccgaccuggagaagcugaagagcaaggugaccagaaccgagagaccccugagcagcggcguguacaugggcaaccugagcagccagcagcuggaccagagaagagcccugcugaacaugaucggcaugagcggcggcaaccagggcacccaggugggcagagacggcguggugagagugugggacgugaagaacgccgagcugcugaacaaccaguucggcaccaugcccagccugacccuggccugccugaccaagcagggccaggccgaccugaacgacguggugcaggcccugaccgaccugggccugaucuacaccgccaaguaccccaacgccagcgaccuggacagacugacccagagccaccccauccugaacaugaucgacaccaagaagagcagccugaacaucagcggcuacaacuucagccugggcgccgccgugaaggccggcgccugcaugcuggacggcggcaacaugcuggagaccaucaaggugagcccccagagcauggacggcauccugaagagcauccugaaggugaagagagcccugggcauguucgugagcgacacccccggcgagagaaaccccuacgagaacauccuguacaagaucugccugagcggcgacggcuggcccuacaucgccagcagaaccagcaucgugggcagagccugggagaacaccgugguggaccuggaggccgacggcaaccccaagaagcugaacagcaacggcagcaacaagagccugcagagcgccggcuuccccgccggccugaccuacagccagcugaugacccugaaggacgccaugcugcagcuggaccccaacgccaagaccuggauggacaucgagggcagacccgaggaccccguggagguggcccuguaccagcccaacagcggcugcuacauccacuucuucagagagcccaccgaccugaagcaguucaagcaggacgccaaguacagccacggcaucgacgugaccgaccuguucgccgcccagcccggccugaccagcgccgugaucgaggcccugcccagaaacauggugaucaccugccagggcagcgaggacaucagaaagcugcuggagagccagggcagaaaggacaucaagcugaucgacaucgcccugagcaagaccgacagcagaaaguucgagaacgccgugugggaccagcacaaggaccugugccacaugcacaccggcguggugguggagaagaagaagagaggcggcaaggaggagaucaccccccacugcgcccugauggacugcaucauguucgacgccgccgugagcggcggccugaacacccuggugcugagagccgugcugcccagagacaugguguucagaaccagcacccccaagguggugcuguga

SEQ ID NO: 9051 - RNA, 1710 nt, Artificial Sequence; identical to SEQ ID NO: 8807
  derived and/or modified CDS sequence (opt4) from LASV(Alzey;Clade VI)__SCA79106__NP

SEQ ID NO: 9052 - RNA, 1710 nt, Artificial Sequence
  derived and/or modified CDS sequence (opt4) from LASV(NIGERIA IKEJI;Clade II)__AMZ00372__NP
augagcgugagcaaggaggugaagagcuuccuguggacccagagccugagaagagagcugagcggcuacugcagcaacaucaagcugcagguggugaaggacgcccaggcccugcugcacggccuggacuucagcgaggugagcaacgugcagagacugaugagaaagcagaagagagacgacaacgaccugaagagacugagagaccugaaccaggccgugaacaaccugguggagcugaagagcgugcagcagaagagcauccugagagugggcacccugaccagcgacgaccugcugacccuggccgccgaccuggagaagcugaagagcaaggugaucagaaccgagagaccccugagcagcggcguguacaugggcaaccugagcagccagcagcuggagcagagaaaggcccugcugaccaugaucggcaugaccggcggcagccagagcgcccagcccggcagagacggcguggugagagugugggacgugaagaacagcgaccugcugaacaaccaguucggcaccaugcccagccugacccuggccugccugaccaagcagggccagguggaccugaacgacgccgugcuggcccugaccgaccugggccugaucuacaccgccaaguaccccaacaccagcgaccuggacagacugagccagagccaccccauccugaacaugguggacaccaagaagagcagccugaacaucagcggcuacaacuucagccugggcgccgccgugaaggccggcgccugcaugcuggacggcggcaacaugcuggagaccaucaaggugaccccccagaccauggacggcauccugaagagcauccugaaggugaagagagcccugggcauguucgugagcgacacccccggcgagagaaaccccuacgagaacauccuguacaagaucugccugagcggcgacggcuggcccuacaucgccagcagaaccagcaucgugggcagagccugggagaacaccaucguggaccuggagagcgacagcaagccccagaaggugggcgccaucggcagcaacaagagccugcagagcgccggcuuccccgccggccugaccuacagccagcugaugacccugaaggacagcaugaugcagcuggaccccagcgccaagaccuggaucgacaucgagggcagacccgaggaccccguggagaucgcccuguaccagcccaucagcggcugcuacauccacuucuucagagagcccaccgaccugaagcaguucaagcaggacgccaaguacagccacggcaucgacguggccgaccuguucagcgcccagcccggccugaccagcgccgugaucgaggcccugcccagaaacauggugcugaccugccagggcagcgacgacaucaagaagcugcuggacagccagggcagaagagacaucaagcugaucgacaucagccugaacaaggccgacagcagaagauucgagaacgccgugugggaccagugcaaggaccugugccacaugcacaccggcguggugguggagaagaagaagagaggcggcaaggaggagaucaccccccacugcgcccugauggacugcaucauguucgacgccgccgugagcggcggccugaacauccccacccugagagccgugcugcccagagacaugguguucagaaccagcagccccaagguggugcuguga

SEQ ID NO: 9053 - RNA, 1710 nt, Artificial Sequence
  derived and/or modified CDS sequence (opt5) from LASV(Josiah;Clade IV)__NP_694869__NP
augagcgccuccaaggagaucaaaucuuuccuguggacccagagccucagacgggaacuguccggcuacugcucuaacauuaagcugcaaguggucaaagacgcucaggcccugcuccacgggcuggauuuuagcgagguuuccaaugugcagcgccuuaugagaaaggaacggcgcgacgauaacgaccugaaaagacuccgggaucugaaucaggcggugaacaaucuggucgagcucaagucuacacaacaaaagagcauccugcgcgugggaacgcuuaccuccgacgaucugcucauucuggcugccgaccuugaaaaacuuaagagcaaaguuaucagaacagagcggccccucucugccggcguguauauggggaaccuguccagccagcagcuggaucagcgcagagcucuccugaauaugauuggaaugucuggcgggaaccagggagcccgggcuggccgcgacggcgucgugagaguuugggaugugaagaaugccgagcuucugaacaaucaguucgggaccaugccuucccucacacuggcgugucuuaccaaacagggacaagucgaccugaacgaugccgugcaggcucucacagaccugggccugaucuacaccgccaaguauccgaauacgagcgaccucgaucggcugacccagucucaucccauccuuaacaugauugacacaaagaaauccagccugaauaucuccggguacaacuuuucucucggagcugccgugaaggcgggcgccugcaugcuggaugggggaaacaugcuugaaaccauuaaagucagcccucaaacaauggacggcauccugaaguccauucucaaaguuaagaaagcucugggcauguucaucagcgauacccccggggagcgcaauccuuaugaaaacauucuguacaagaucugucucucuggagacggcuggcccuauaucgccuccagaacgagcauuacagggcgggcuugggagaauaccgugguggaucuggagucugacggaaagccucagaaagccgauagcaacaauuccucuaagagccuucaguccgccggcuuuacagcugggcugaccuacagccagcucaugacccugaaagacgcgaugcugcaacuugauccgaacgccaagacauggauggacaucgaaggaagacccgaggacccugucgaaauugcucucuaccagcccucuuccggcugcuauauccacuucuuucgcgagccuacggaucugaaacaguucaagcaggacgccaaguacagccauggcauugaugugaccgaccuguuugccacacaacccgggcucaccucugcuguuaucgaugcccugccgcggaauauggugaucacaugucagggauccgacgauauuagaaaacuucuggaaagccagggccgcaaggacaucaaacucauugauaucgcgcuguccaagaccgacucucggaaauaugagaacgcugucugggaucaguacaaggaccugugccacaugcauacgggggugguuguggagaagaaaaagagaggaggcaaagaagagauuacaccucacugugcccuuauggauugcaucauguucgacgccgcugucagcgggggccucaauaccuccgugcugcgcgccguccugccccgggacaugguguuuagaaccucuacaccucgcguugugcucuga

SEQ ID NO: 9054 - RNA, 1710 nt, Artificial Sequence
  derived and/or modified CDS sequence (opt5) from LASV(LP;Clade I)__AAF86702__NP
augagcaacuccaaggagaucaaaucuuuccuguggacccagagccucagacgggaacuguccggcuacugcucuaauauuaagcuccaaguggucaaagacgcccaggcucugcuccacgggcuggauuuuagcgagguuuccaacgugcagcgccuuaugagaaagcagaaacgggacgaugccgaccugaagcgccucagagaucugaaucaagcggugaacaaucuggucgaacucaagucuacacagcagaaaaacgugcugcggguuggaacgcuuagcuccgacgaucugaucacccucgcugccgaccuggagaaacuuaaaagcaaggugauucgcacagaaagaccccugucuuccggcgucuauauggggaaucucagcucucagcaacuggaucagcggcgcgcccugcucuccaugaucggaaugagcggcgggccucagggaaacagaaccggcggcgacggggugguucgggugugggaugucaaaaaugcugagcugcuuaacaaucaguucggaacaaugccgucucugacccucgccugucugacaaagcaaggccagguggaccuuaacgaugcugugcaggcccugaccgaccucgggcugauuuacacggcgaaguaucccaauuccagcgaccuggauaugcucacccaaucccauccuauccugggaauggucgacacaaagaagucuagccuuaacaucuccggcuacaauuuuagccugggggccgcuguuaaagccggagcuugcaugcucgauggcggcaacaugcuggagaccauuaaggugucuccccagacaauggacgggauccuuaaauccauucugaaggugaaacgcagccucggaauguucaucucugauaccccuggcgaaagaaaccccuaugagaauauucuguacaagaucugucugagcggggaaggauggccuuauauugccucccggacgucuaucacaggccgcgcgugggagaacacccucgucgaccuggagagcgauaauaagccgcccaaacuuaacuccgccgggagcaauaagucucugcaggcugccggacucaacgcuggccugacauacucccagcugaugacccuuaaagacugcaugcuccaacuggauccuagcucuaagaccuggaucgacauugaaggcagacccgaggauccuguggaaaucgcccuguuucagcccuccagcggguguuacauucacuucuuucgggagccgacagaccucaaacaguucaagcaggacgccaaguauucccauggaaucgauguuacggaccuguuuucuacccaaccuggccuuacaagcgcugugauugaagcgcugcccagaaauaugguccuuaccugccagggguccgaugacaucaaaaagcugcuggagucucagggacgccgggauaucaaacuuauugacaucagccucuccaaggccgauagcagaaaauucgagaacgcugugugggaccaguacaaggaucugugucacaugcauacaggcguuguggucgaaaagaaaaagcgcgggggcaaagaggaaauuaccccucacugcgcccugcucgacuguaucauguuugaugccgcuacgacaggaucucugaauauuaccacccuucgggccgugcugcccagagacauggucuuccgcacauccacccccaaggugguucucuga

SEQ ID NO: 9055 - RNA, 1710 nt, Artificial Sequence
  derived and/or modified CDS sequence (opt5) from LASV(803213;Clade II)__AAF86704__NP
augagcgccuccaaggaggugaaaucuuuccuguggacccagagccucagacgggaacuguccggcuacugcucuaacaucaaacuucaagucguuaaggacgcucaggcccugcuccacgggcuggauuuuagcgaggugaauaacgugcagcgccuuaugagaaagcagaaacgggacgauggagaccugaagcgccucagagaucugaaucaagcggucaacaaucugguggaacucaaguccacacagcagaaaucuauucugcggguuggcacgcuuaccagcgacgaucugcucacacuggcugccgaccuugagaagcugaaauccaaggugauccgcaccgaaagaccccucagcucuggggucuauaugggaaaccuguccacacagcaacuggagcagcggcgcgcccuccugaauaugauuggcauggugggaggagcucagggcacccagccuggcagagaugggguugugcgggucugggacgugaaaaacccggaucuucugaauaaccaauucggaacaaugcccagccucacccuggccugucuuacgaagcagggccagguggaccugaaugaugcuguccucgcccugaccgaccuggggcucaucuacacagcgaaguauccuaacucuuccgaccuggaucgccuuagccaaucucaucccauucugaauaugguugacaccaaaaaguccagccucaacaucuccggauacaauuuuucucugggcgccgcugugaaagccggggcuugcaugcuugauggaggcaacaugcuggagacaaucaaggugaccccucagacgauggacggcauucucaaaagcauccugaaggucaaaagaucccuggggauguucgugagcgauacacccggagaacggaacccuuaugagaauauucucuacaagaucugucugucuggcgacggguggccguauauugccucccgcaccagcaucguugggagagcgugggaaaacacaaccguggaucuugagucugacggcaagccccagaaagucgggaccgccggaagcaauaagucccugcagucugcuggcuuuccuacaggccucacguacagccaacugaugacccugaaagauuccaugaugcagcuugaccccagcgccaagacauggauugauaucgaggggcggccugaagaccccguggagaucgcucucuaccagccgaugucuggaugcuauauucacuucuuuagagaaccuaccgaccugaaacaguucaagcaagaugccaaguacucccauggcaucgacguugccgaucuguuucccgcucagccugggcucacaagcgcggugauugaggcccugccccgcaacaugguccuuaccugucagggaucugacgauaucaaaaagcugcucgacucccagggccggagagauauuaaacugaucgacaucagccuguccaagguggauucucgcaaauucgaaaaugcugucugggaccaaugcaaggaucuuugucacaugcauacgggggugguuguggagaagaaaaagcggggcggaaaagaggaaauuacaccccacugcgcccucauggacuguaucauguuugaugccgcugucagcggcgggcugaacauuccugugcugagagccguucucccgcgcgacaugguguuccggaccuccucucccaaggucgugcuguga

SEQ ID NO: 9056 - RNA, 1713 nt, Artificial Sequence
  derived and/or modified CDS sequence (opt5) from LASV(GA391;Clade III)__CAA36646__NP
augagcgccuccaaggaggugagaucuuuccuguggacccagagccuccggcgcgaacuguccggcuacugcucuaacaucaaacuucaagucguuaaggacgcucaggcccugcuccacgggcuggauuuuagcgagguguccaaugugcagagacuuaugcggaaacagaagcgcgacgauggagaccugaaaagacuccgggaucugaaccaagcggucaauaaccugguggaacucaagucuacacagcagaaaagcguucugcgcgugggcacgcuuuccagcgacgaucugcucauucuggcugccgaccuugagaaacugaagucuaaagucaccagaacagaacggccccucuccagcgggguguauaugggaaaucugucuucccagcaacuggaucagcgcagagcccuccugaacaugaucggcaugaccgggguuagcggaggcggcaagggggcuucugacggaauugugcgggucugggaugugaaaaaugccgagcuucugaacaaucaguucggcacaaugccuucccucacccuggcuugucuuacaaagcaggggcaaguggaccugaacgaugccguccaggcgcucaccgaccugggacugaucuacacggccaaguauccgaauagcuccgaccucgaucgccugucucagagccaucccauucuuaacaugaucgacaccaaaaaguccagccugaauaucucuggcuacaacuuuucccucggggcugccguuaaagcuggagccugcaugcuggauggcggcaauaugcuugagacaauuaaggugagcccucaaaccauggacgggauccugaaaucuauucucaaggugaaaaagagccugggaauguucgucuccgauacacccggcgaaagaaacccuuaugagaacauccuguacaagauuugucucucuggggacggauggcccuauaucgcgagccggaccuccauugugggccgcgccugggaaaauacgguuguggaucuggagcaggacaacaaaccucagaagaucgggaauggaggcagcaacaaaucucuucaguccgcuggcuuugccgcugggcugacauacagccaacucaugacccugaaggauuucaaaugcuuuaaucugaucccgaacgccaagacauggauggacauugagggaagacccgaagauccugucgagaucgcccuuuaccagcccucuuccggcuguuaugugcacuucuuucgggaaccuaccgaccucaagcaguucaaacaggacgcuaaguacagccaugggauugauguuaccgaccuguuugcggcccaacccggacugacauccgcugugaucgaggcccucccgagaaauauggucauuacgugccagggcucugaagauauccgcaaacugcuugagagccaggggcggagagacaucaagcugauugauaucacccucuccaaagccgacucucgcaaguucgagaacgcugugugggaucaguuuaaggaccugugucacaugcauacaggcgucgugguugaaaagaagaaacggggaggcaaggaggaaauuaccccucacugcgcccugauggauuguaucauguucgacgcggcugugagcgggggacuugaugccaaaguccucagagugguucugccccgcgacaugguguuccggacauccaccccuaaggucgugcuguga

SEQ ID NO: 9057 - RNA, 1710 nt, Artificial Sequence
  derived and/or modified CDS sequence (opt5) from LASV(AV;Clade V)__CCA30315__NP
augagcgccuccaaggaggugaaaucuuuccuguggacccagagccucagacgggaacuguccggcuacugcucuaacaucaaacuucaagucguuaaggacgcucaggcccugcuccacgggcuggauuuuagcgagguguccaaugugcagcgccuuaugagaaagcagcggcgcgacgauucugaccugaaaagacuccgggaucugaaccaagcggucaauaaccugguggaacucaagagcacacagcagaaguccguucugcgcgugggaacgcuuagcucugacgaucugcucacccuggcugccgaccuugagaaacugaaguccaaagucacaagaaccgaacggccccucagcucuggcguguauauggggaaucuguccagccagcaacuggaucagcgcagagcccuccugaaccuuauuggaaugacaaauggcucucaggggucccaggcuggacgggacggcguugugcgcgucugggaugugaagaacgccgagcugcucaauaaccaauucggcaccaugccuagccugacacuugcuugucugaccaaacagggacagguggaccucaaugaugucguucaagcccugacggaccuggggcucaucuacaccgcgaaguauccgaacacauccgaccuggauagacuuacccagucucaucccauucugaauaugaucgacacaaagaaaagcucccucaacauuagcggcuacaauuuuucucugggggccgcugugaaggccggagcuugcaugcuugauggcgggaacaugcuggagaccaucaaaguguccccucagagcauggacggaauccucaagucuauucugaaagucaagcgggcccugggcauguucgugagcgauacgcccggcgaacgcaacccuuaugagaauauccucuacaaaauuugucuguccggggacggauggcccuauaucgcgucuagaacaagcauuguuggccgggccugggaaaacaccguggucgaucuugagacagacgggaagccucagaagaucggauccggcaauagcaacaaaucucugcaauccgcuggguuuagcgccggacucaccuacucucagcugaugacccugaaggaugcuaugcuucagcucgacccgaaugccaaaacauggauggauauugagggcagacccgaagacccuguggagguugcccuguaccagcccaucuccggcugcuauauccacuucuuucgcgaaccuacggaccugaagcaauucaaacaggaugcuaaguacagccaugggauugacaucgcggaucucuuugccgcucagcccggacugaccuccgccgugauugaggcccuuccgcggaacauggucaucacaugucagggcucugaagacauuaagaaacugcucgagagccaagggagaaaggauaucaaacugaucgacauugcucuguccaagaucgauucucgcaaauucgagaaugccgugugggaccaguauaaggaucuuugccacaugcauaccggagucgugguugaaaagaaaaagcggggcgggaaagaggaaauuacaccucacugugcgcucauggacugcaucauguuugaugcugccgugagcggcggacugaacacccugguccucagagccgugcugccccgcgacaugguuuuccggacguccacaccuagagugguccuuuga

SEQ ID NO: 9058 - RNA, 1710 nt, Artificial Sequence
  derived and/or modified CDS sequence (opt5) from LASV(Togo/2016/7082;Clade VI)__AMR44578__NP
augagcaacuccaaggaggugaaaucuuuccuguggacccagagccucagacgggaacuguccggcuacugcucuaauaucaaacuucaagucguuaaagacgcccaggcucugcuccacgggcuggauuuuagcgagguguccaacgugcagcgccuuaugagaaagcagaaacgggacgauggagaccugaagcgccucagagaucugaaucaagccgucaacaaucugguggaacucaagucuguucagcagaaaagcauucugcgggugggcacacuuacguccgacgaucugcucacccuggcggcugaccuugagaagcugaaaagcaaggucacacgcaccgaaagaccccucucuuccgggguguauaugggaaaccugagcucucagcaacuggaucagcggcgcgcccuccuguccaugaucggcaugagcgggggaaaucagaacucucagccuaaaggcgacggcguugugagagucugggaugugaagaaugccgaccuucugaacaaucaauucgggacaaugccgucccucacccuggcuugucuuacaaagcagggacagguggaucugaacgacgccguccaagcucucaccgaccugggccugauuuacacggccaaauaucccaauagcuccgaucucgaccggcugucucagagccauccuauccuuaacaugauugauaccaagaaauccagccugaauaucucuggguacaacuuuucccucggagcggccaucaagacaggcgcuugcaugcuggacgggggaaacaugcuugagaccauuaaaguuacaccccagaccauggauggcauccucaagagcauucugaaagugaagcgcucucugggcauguucaucagcgacacgccuggggagagaaaucccuaugaaaacauucuguacaagaucugucucuccggagauggcuggccuuauauugccucucggacagcuaucaucgggcgcgccugggagaauaccguggucgaccuggaaagcgauuccaaaccgcagaagauuggaagcaacggcucuaauaaaucccuucaaagcgcgggguuugcccccggacugacauacucucagcucaugacccugaaggacuccaugcugcagcuugauccuaacgcuaaaaccuggaucgacauugagggcagacccgaggacccuguggaaguugcccucuuccagcccaucagcggcugcuacauucacuuuuuccgggagccgacagaucugaagcaauuuaagcaggacgcuaaauauucccaugggaucgaugugacggaccuguucgccgcccagccuggacucaccucugcugucaucgaagcgcugcccagaaauauggugcuuacaugucagggcagcgaugacauuaagaaacugcucgauucccaagggcgccgggacaucaagcugauugauguuucucugaacaaaaucgacagcagaaaguuugagaaugccgugugggaucaguacaaggaccuuugccacaugcauaccggagucguggucgaaaagaagaaaaagggcgggaaagaggagauuacaccucacugugcucuccuggauugcaucauguucgacgccgccguguccggcggacugaacgcuaccguucuccgcgccgugcugccccgggacauggucuuuagaacgagcucucccaaggugguucuuuga

SEQ ID NO: 9059 - RNA, 1710 nt, Artificial Sequence
  derived and/or modified CDS sequence (opt5) from LASV(KAK-428;Clade n.d. (VII))__ANH09741__NP
augagcaacuccaaggaggugaaaucuuuccuguggacccagagccucagacgggaacuguccggcuacugcacaaauaucaaacuucaagucguuaaggacgcccaggcucugcuccacgggcuggauuuuucugaggugagcaacgugcagcgccuuaugagaaagcagaaacgggacgauaaugaccugaagcgccucagagaucugaaccaagccgucaauaaccugguggaacucaaguccguucagcagaaaucugugcugaaggucggaacgcuuaauagcgacgaucugcucacccuggcggcugaccuugagaaacugaaguccaaagugguucggacagaacgcccccucagcucuggcguguauauggggaaccuguccagccagcaacuggaucagagacgggcccuccugaauaugauuggaauggccggcgggucucagggaaaccagccuucccgcgacggcgucgugagagugugggaugucaagaaugcugaccuucugaacaaucaauucggcaccaugccgagccucacacuggccugucuuaccaagcaggggcagguugaucugaacgacguggugcucgcucugacagaccugggacucaucuacaccgccaaauaucccaauucuuccgaucuggaccggcuuagccaaaaccauccuguccugaacaugauugaugugaauaaguccucucucaacaucagcggcuacaauuuuucccugggggcggccguuaaagcuggagccugcaugcuugacggcgggaacaugcuggagacgauuaagaucagcccccagaccguggauggaauccucaaaucuauucugaaggucaaacgcgcucugggcauguucguguccgacacaccuggcgagagaaaucccuaugaaaacauccucuacaagguuugucugagcgggaauggauggccuuauauugccucucggaccagcaucgugggccgcgcgugggagaacacagucguggaucuugaauccaauaagaaccagccgaaagucgggaauaacggaucuaauaagaugcugcagagcuccggcuuugccaccgggcucacguacagccaacugaugacacugagagacucuaugcuucagcucgaucccaccgcuaaaacauggauugacaucgagggacggccugaggaucccguggaacuggcccuguuccagccuuccagcggcugcuacauucacuuuuucagagagcccaccgaccucaagcaguuuaaacaagacgcuaaguauucucauggcaucgauguuaacgaccuguucuccgcccagccggggcuuaccagcgccgugcuggaagcucucccucgcaauaugguccugacaugucagggauccgaugacauccggaagcugcuugauucucaggacagaaaagauauuaagcucaucgacauuagccuguccaaagcggaugcccgcaaguuugagaacgacgugugggaucaauucaaagaccugugccacaugcauacgggcaucguuguggaaaagaagaaaaagggagggaaacaggagaugacaccccacugugcucuccuggauugcauuauguuugacgccgccgucucuggcgggcuuaacgugccuacccugcgggcugugcuccccaccgacaugguuuucagaacaaucaccacgaaggucgugcuguga

SEQ ID NO: 9060 - RNA, 1710 nt, Artificial Sequence; identical to SEQ ID NO: 9054
  derived and/or modified CDS sequence (opt5) from LASV(Pinneo-NIG-1969;Clade I)__AIT17837__NP

SEQ ID NO: 9061 - RNA, 1710 nt, Artificial Sequence
  derived and/or modified CDS sequence (opt5) from LASV(ISTH0009-NIG-2011;Clade II)__AIT17405__NP
augagcguguccaaggaggucaaaucuuuccuguggacccagagccucagacgggaacuguccggcuacugcucuaacaucaaacuucaaguugugaaggacgcccaggcucugcuccacgggcuggauuuuagcgagguguccaauguccagcgccuuaugagaaagcagaaacgggacgauucugaccugaagcgccucagagaucugaaccaagccgugaauaaccugguugaacucaagagcacacagcagaaauccauucugcgggugggaacgcuuaccagcgacgaucugcucacacuggcggcugaccuugagaagcugaaaucuaaggucauccgcaccgaaagaccccucuccagcggcguguauauggggaaucugucuacacagcaacuggagcagcggcgcgcccuccugaacaugauuggaaugguuggcggggcccagggaacccagccuggcagagauggcgugguccgggugugggacgugaaaaauccggaucuucugaacaaucaauucgggacaaugcccucccucacccuggcuugucuuacgaagcagggacaggucgaccugaacgaugccguucucgcucugaccgaccugggccucaucuacacagccaaguauccuaauagcucugaccuggaucgccuuucccaaagccaucccauucugaacaugguggacaucaaaaaguccucucucaauaucagcggguacaacuuuucccugggagcggccgugaaagcuggcgccugcaugcuugaugggggaaauaugcuggagaccauuaaggucacaccucagaccauggacggcauccucaaaagcauucugaaggugaaaagaucucugggcauguucguuuccgauacgcccggggaacggaacccuuaugagaacauccucuacaagauuugucugagcggagacggcuggccguauaucgcuucucgcacaagcauuguggggagagccugggaaaauaccacagucgaucuugaguccgacggaaagccccagaaagugggcucugcggggagcaacaagucccugcagagcgccggauuuccuaccggccucaccuacucucaacugaugacacugaaagauuccaugaugcagcuugaccccagcgcuaagacguggaucgauaucgagggccggccugaagaccccguugagauugcccucuaccagccgaugucugggugcuauauccacuucuuuagagaaccuaccgaccugaaacaguucaagcaagaugcuaaguacucccauggaauugacguggccgaucuguuucccgcccagccuggccucacaagcgcugucaucgaggcgcugccccgcaauauggugcuuaccugucagggguccgacgauauuaaacggcugcucgacucucagggaagacgcgauaucaagcugaucgacauugcccugagcaaagcugauucccggagauucgaaaacgccgucugggaccaaugcaaggaucuuugucacaugcauacaggcgugguuguggagaaaaagaagcgcgggggcaaagaggaaaucacgccccacugcgcccucauggacuguauuauguaugaugcugccgucucuggaggccugaauaucccugugcugcgggcgguucucccgagagacaugguguuucgcaccagcucccccaaggucgugcuguga

SEQ ID NO: 9062 - RNA, 1710 nt, Artificial Sequence
  derived and/or modified CDS sequence (opt5) from LASV(ISTH0012-NIG-2011;Clade II)__AIT17409__NP
augagcgccuccaaggaggugaaaucuuuccuguggacccagagccucagacgggaacuguccggcuacugcucuaacaucaaacuucaagucguuaaggacgcucaggcccugcuccacgggcuggauuuuagcgagguguccaaugugcagcgccuuaugagaaagcagaaacgggacgauggagaccugaagcgccucagagaucugaaccaagcggucaauaaccugguggaacucaagucuacccagcagaaaagcauucugcggguuggcacgcuuaccuccgacgaucugcucacacuggcugccgaccuugagaagcugaaaagcaaggugauccgcaccgaaagaccccucucuuccggggucuauaugggaaaucugagcacacagcaacuggagcagcggcgcgcccuccugaacaugauuggcaugguugggggagcucagggcacccagccuggcagagaugggguggugcgggucugggacgugaaaaauccggaucuucugaacaaucaauucggaacaaugcccucucucacccuggccugucuuacgaagcagggccagguggaccugaacgaugcuguccucgcccugaccgaccuggggcucaucuacacagcgaaguauccuaauuccagcgaccuggaucgccuuucucaaucccaucccauucugaacaugguugacaccaaaaagagcucccucaauaucucuggauacaacuuuagccugggcgccgcugugaaagccggggcuugcaugcuugauggaggcaauaugcuggagacaaucaaggugaccccucagacgauggacggcauucucaaauccauccugaaggucaaaaagagccuggggauguucgugucugauacacccggagaaagaaacccuuaugagaacauucucuacaagaucugucuguccggcgacggguggccguauauugccagccggaccucuaucguuggacgcgcgugggaaaauacaaccguggaucuugagagcgacggcaaaccccagaaggucgggaccgccggauccaacaaaucucugcagagcgcuggcuuuccuacaggccucacguacucccaacugaugacccugaaggauagcaugaugcagcuugaccccucugccaaaacauggauugauaucgaggggagaccugaagaccccguggagaucgcucucuaccagccgauguccggaugcuauauucacuucuuucgggaaccuaccgaccugaagcaguucaagcaagaugccaaauacagccauggcaucgacguuacagaucuguuuucugcccagcccgggcucaccuccgcugugauugaggcgcugccuagaaauaugguccuuacgugucagggaagcgacgauaucaagcgccugcucgacucccagggccggagagauauuaaacugaucgacaucgcccugaacaaggcugauucucgccgguucgaaaaugccgugugggaccaaugcaaagaucuuugucacaugcauacaggggucgugguugagaagaagaaaagaggcggaaaggaggaaauuacaccccacugcgcccucauggacuguaucauguaugaugcugccgugagcggcgggcugaacauucccguccugcgcgcggugcucccucgggacaugguuuuuagaaccuccucuccgaaagugguccuguga

SEQ ID NO: 9063 - RNA, 1710 nt, Artificial Sequence
  derived and/or modified CDS sequence (opt5) from LASV(ISTH0047-NIG-2011;Clade II)__AIT17413__NP
augagcgccuccaaggaggugaaaucuuuccuguggacccagagccucagacgggaacuguccggcuacugcucuagcaucaaacuucaagucguuaaggacgcucaggcccugcuccacgggcuggauuuuuccgaggugucuaacgugcagcgccuuaugagaaagcagaaacgggacgauagcgaccugaagcgccucagagaucugaaucaagcggucaacaaucugguggaacucaaguccacacagcagaaaagcauucugcggguuggaacgcuuaccucugacgaucugcucacacuggcugccgaccuugagaagcugaaauccaaggugauccgcaccgaaagaccccucagcucuggcgucuauauggggaaccuguccacacagcaacuggagcagcggcgcgcccuccugaauaugauuggaauggugggcggggcucagggaacccagccuggcagagauggcguugugcgggucugggacgugaaaaacccggaucuucugaauaaccaauucgggacaaugcccagccucacccuggccugucuuacgaagcagggacagguggaccugaaugaugcuguccucgcccugaccgaccugggccucaucuacacagcgaaguauccuaacucuuccgaccuggaucgccuuagccaaucccaucccauucugaauaugguugacaccaaaaagucuagccucaacaucuccggguacaauuuuagccugggagccgcugugaaagccggcgcuugcaugcuugaugggggaaacaugcuggagacaaucaaggugaccccucagacgauggacggcauucucaaaucuauccugaaggucaaaagaucccugggcauguucgugagcgaugcccccggggaacggaauccuuaugagaacauucucuacaagaucugucugucuggagacggcuggccguauauugcgagccgcacauccaucguugggagagccugggaaaacaccacaguggaucuugagucugacggaaagccccagaaaaugggcaccgcugggagcaauaagucccugcagagcgccggauuuccuaccggccucacauacucucaacugaugacgcugaaagauuccaugaugcagcuugaccccagcgcuaagaccuggauugauaucgagggccggccugaagaccccgucgagaucgcccucuaccagccgaugucugggugcuauauucacuucuuuagagaaccuacagaccugaaacaguucaagcaagaugccaaguacucccauggaaucgacguggcugaucuguuucccgcgcagccuggccucaccagcgccguuauugaggcucugccccgcaacauggugcuuacaugucagggguccgacgauaucaaaaagcugcucgacucucagggacggagagauauuaaacugaucgacaucgcccugagcaaggccgauucccgccgguucgaaaaugcugucugggaccaaugcaaagaucuuugucacaugcauaccggcguggucguggagaagaagaaaagagggggcaaggaggaaauuacgccccacugcgcccucauggacuguaucauguaugaugcggcuguuucuggaggccugaacauuccugugcugcgcgccguccucccgcgggacaugguguuuagaacaagcucccccaaaguugugcuguga

SEQ ID NO: 9064 - RNA, 1710 nt, Artificial Sequence
  derived and/or modified CDS sequence (opt5) from LASV(ISTH0230-NIG-2011;Clade II)__AIT17421__NP
augagcgccuccaaggaggugaaaucuuuccuguggacccagagccucagacgggaacuguccggcuacugcucuaacaucaaacuucaagucguuaaggacgcucaggcccugcuccacgggcuggauuuuagcgagguguccaaugugcagcgccuuaugagaaagcagaaacgggacgauucugaccugaagcgccucagagaucugaaccaagcggucaauaaccugguggaacucaagagcacacagcagaaauccauucugcggguuggaacgcuuaccagcgacgaucugcucacacuggcugccgaccuugagaagcugaaaucuaaggugauccgcaccgaaagaccccucuccagcggcgucuauauggggaaucugucuacacagcaacuggagcagcggcgcgcccuccugaacaugauuggaaugguguccggcgcucaggggacccagccuggaagagauggcguugugcgggucugggacgugaaaaauccggaucuucugaacaaucaauucggcacaaugcccagccucacccuggccugucuuacgaagcagggacagguggaccugaacgaugcuguccucgcccugaccgaccuggggcucaucuacacagcgaaguauccuaauucuuccgaccuggaucgccuuagccaaucccaucccauucugaacaugguugacaucaaaaagucuagccucaauaucuccggcuacaacuuuagccugggggccgcugugaaagccggagcuugcaugcuugauggcgggaauaugcuggagaccauuaaggugacaccucagaccauggacggaauccucaaaucuauucugaaggucaaaagaucccugggcauguucgugagcgauacgcccggcgaacggaacccuuaugagaacauccucuacaagauuugucugucuggggacggauggccguauaucgccagccgcacauccauuguuggcagagcgugggaaaauaccacaguggaucuugagucugacgggaagccccagaaaaugggaagcgccggcuccaacaagagccugcagucugcuggguuuccuaccggacucaccuacucccaacugaugacacugaaagauagcaugaugcagcuugaccccucugccaagacguggaucgauaucgagggccggccugaagaccccgucgagauugcucucuaccagccgauguccggcugcuauauccacuucuuuagagaaccuaccgaccugaaacaguucaagcaagaugccaaguacagccaugggauugacguggccgaucuguuucccgcucagccuggacucacauccgcgguuaucgaggcccugccccgcaauauggugcuuaccugucagggcucugacgauauuaaacggcugcucgacagccaggggagacgcgauaucaagcugaucgacauugcucuguccaaagccgauucucggagauucgaaaacgccgucugggaccaaugcaaggaucuuugucacaugcauacaggaguggucguggagaaaaagaagcgcggcgggaaagaggaaaucacgccccacugcgcucucauggacuguauuauguaugaugccgcgguuagcggcggacugaauaucccugugcugcgggcuguccucccgagagacaugguguuucgcaccuccagccccaagguugugcuguga

SEQ ID NO: 9065 - RNA, 1710 nt, Artificial Sequence
  derived and/or modified CDS sequence (opt5) from LASV(ISTH0531-NIG-2011;Clade II)__AIT17425__NP
augagcgccuccaaggaggugaaaucuuuccuguggacccagagccucagacgggaacuguccggcuacugcucuagcaucaaacuucaagucguuaaggacgcucaggcccugcuccacgggcuggauuuuuccgaggugucuaacgugcagcgccuuaugagaaagcagaaacgggacgauagcgaccugaagcgccucagagaucugaaucaagcggucaacaaucugguggaacucaaguccacacagcagaaaagcauucugcggguuggaacgcuuaccucugacgaucugcucacacuggcugccgaccuugagaagcugaaauccaaggugauccgcaccgaaagaccccucagcucuggcgucuauauggggaaccuguccacacagcaacuggagcagcggcgcgcccuccugaauaugauuggaauggugggcggggcucagggaacccagccuggcagagauggcguugugcgggucugggacgugaaaaacccggaucuucugaauaaccaauucgggacaaugcccagccucacccuggccugucuuacgaagcagggacagguggaccugaaugaugcuguccucgcccugaccgaccugggccucaucuacacagcgaaguauccuaacucuuccgaccuggaucgccuuagccaaucccaucccauucugaauaugguugacaccaaaaagucuagccucaacaucuccggguacaauuuuagccugggagccgcugugaaagccggcgcuugcaugcuugaugggggaaacaugcuggagacaaucaaggugaccccucagacgauggacggcauucucaaaucuauccugaaggucaaaaagucccugggcauguucgugagcgauacacccggggaaagaaauccuuaugagaacauucucuacaagaucugucugucuggagacggcuggccguauauugccagccggaccuccaucguugggcgcgcgugggaaaacacaauuguggaucuugagucugacggaaaaccccagaaggucggcaccgccgggagcaauaaaucccugcagagcgcuggauuuccuaccggccucacauacucucaacugaugacgcugaaggauuccaugaugcagcuugaccccagcgccaaaaccuggaucgauaucgagggcagaccugaagaccccguggagauugcucucuaccagccgaugucugggugcuauauccacuucuuucgggaaccuacagaccugaagcaguucaagcaagaugccaaauacucccauggaauugacguugccgaucuguuucccgcucagccuggccucaccagcgcggugaucgaggcccugcccagaaacaugguccuuacaugucagggguccgacgauauuaagcgccugcucgacucucagggacggagagauaucaaacugaucgacauugcucugagcaaggccgauucccgccgguucgaaaaugccgugugggaccaaugcaaagaucuuugucacaugcauaccggcgucgugguugagaagaagaaaagagggggcaaggaggaaaucacgccccacugcgcucucauggacuguauuauguaugaugccgcggugucuggaggccugaacaucccuguccugcgcgcugugcucccgcgggacaugguuuuuagaacaagcucccccaaagugguccuguga

SEQ ID NO: 9066 - RNA, 1710 nt, Artificial Sequence
  derived and/or modified CDS sequence (opt5) from LASV(ISTH0595-NIG-2011;Clade II)__AIT17429__NP
augagcgccuccaaggaggugaaaucuuuccuguggacccagagccucagacgggaacuguccggcuacugcucuaacaucaaacuucaagucguuaaggacgcucaggcccugcuccacgggcuggauuuuagcgagguguccaaugugcagcgccuuaugagaaagcagaaacgggacgauucugaccugaagcgccucagagaucugaaccaagcggucaauaaccugguggaacucaagagcacacagcagaaauccauucugcggguuggaacgcuuaccagcgacgaucugcucacacuggcugccgaccuugagaagcugaaaucuaaggugauccgcaccgaaagaccccucuccagcggcgucuauauggggaaucugucugcccagcaacuggagcagcggcgcgcucuccugaacaugauuggaauggugggcggggcccagggaacacagccuggcagagauggcguugugcgggucugggacgugaaaaauccggaucuucugaacaaucaauucgggaccaugcccucccucacacuggcuugucuuaccaagcagggacagguggaccugaacgaugccguccucgcgcugacggaccugggccucaucuacaccgccaaguauccuaauagcucugaccuggaucgccuuucccaaagccaucccauucugaacaugguugacaccaaaaaguccucucucaauaucagcggguacaacuuuucccugggagcugccgugaaagcuggcgccugcaugcuugaugggggaaauaugcuggagaccaucaaggugacaccucagaccauggacggcauucucaaaagcauccugaaggucaaaagaucucugggcauguucguguccgaugcgcccggggaacggaacccuuaugagaacauucucuacaagaucugucugagcggagacggcuggccguauauugccucucgcacgagcaucguugggagagcuugggaaaauacaaccguggaucuugaguccgacggaaagccccagaaagucggcacagccgggucuaacaagagccugcaguccgcuggauuuccuaccggccucaccuacagccaacugaugacacugaaagauucuaugaugcagcuugaccccuccgccaagacguggauugauaucgagggccggccugaagaccccguggagaucgcccucuaccagccgaugagcgggugcuauauucacuucuuuagagaaccuaccgaccugaaacaguucaagcaagaugcuaaguacucucauggaaucgacguugcggaucuguuucccgcccagccuggccucacauccgcugugauugaggcccugccccgcaauaugguccuuaccugucaggggagcgacgauaucaaacggcugcucgacucccagggaagacgcgauauuaagcugaucgacaucgcccugucuaaagcugauagccggagauucgaaaacgccgugugggaccaaugcaaggaucuuugucacaugcauacaggcgucgugguugagaaaaagaagcgcgggggcaaagaggaaauuacaccccacugcgcgcucauggacuguaucauguaugaugcugccguguccggaggccugaauauuccuguccugcgggccgugcucccgagagacaugguuuuucgcacgucuagccccaaggugguccuguga

SEQ ID NO: 9067 - RNA, 1710 nt, Artificial Sequence
  derived and/or modified CDS sequence (opt5) from LASV(ISTH0964-NIG-2011;Clade II)__AIT17431__NP
augagcgccuccaaggaggugaaaucuuuccuguggacccagagccucagacgggaacuguccggcuacugcucuaacaucaaacuucaagucguuaaggacgcucaggcccugcuccacgggcuggauuuuagcgagguguccaaugugcagcgccuuaugagaaagcagaaacgggacgauucugaccugaagcgccucagagaucugaaccaagcggucaauaaccugguggaacucaagagcacacagcagaaauccauucugcggguuggaacgcuuaccagcgacgaucugcucacacuggcugccgaccuugagaagcugaaaucuaaggugauccgcaccgaaagaccccucuccagcggcgucuauauggggaaucugucuacacagcaacuggagcagcggcgcgcccuccugaacaugauuggaauggugggcggggcucagggaacccagccuggcagagauggcguugugcgggucugggacgugaaaaauccggaucuucugaacaaucaauucgggacaaugcccucccucacccuggccugucuuacgaagcagggacagguggaccugaacgaugcuguccucgcccugaccgaccugggccucaucuacacagcgaaguauccuaauagcucugaccuggaucgccuuucccaaagccaucccauucugaacaugguugacaccaaaaaguccucucucaauaucagcggguuuaacuucucccugggagccgcugugaaagccggcgcuugcaugcuugaugggggaaauaugcuggagacaaucaaggugaccccucagacgauggacggcauucucaaaagcauccugaaggucaaaaagucucugggcauguuuguguccgauacacccggggaaagaaacccuuacgagaacauucucuauaagaucugucugagcggagacggcuggccguacauugccucucggaccagcaucguugggcgcgcgugggaaaauacaaccguggaucuugaguccgacggaaaaccccagaaggucggcaccgccgggucuaacaaaagccugcaguccgcuggauucccuacaggccucacguauagccaacugaugacccugaaggauucuaugaugcagcuugaccccuccgccaaaacauggauugauaucgagggcagaccugaagaccccguggagaucgcucucuaccagccgaugagcgggugcuacauucacuuuuuccgggaaccuaccgaccugaagcaguuuaagcaagaugccaaauauucucauggaaucgacguugccgaucuguuccccgcucagccuggccucacauccgcggugauugaggcccugcccagaaauaugguccuuaccugucaggggagcgacgauaucaagcgccugcucgacucccagggacggagagauauuaaacugaucgacaucgcucugucuaaggccgauagccgccgguuugaaaacgccgugugggaccaaugcaaagaucuuugucacaugcauacgggcgucgugguugagaagaagaaaagagggggcaaggaggaaauuacaccccacugcgcucucauggacuguaucauguacgaugccgcgguguccggaggccugaauauuccuguccugcgcgcugugcucccgcgggacaugguuuucagaaccgccucucccaaagugguccuguga

SEQ ID NO: 9068 - RNA, 1710 nt, Artificial Sequence
  derived and/or modified CDS sequence (opt5) from LASV(ISTH1038-NIG-2011;Clade II)__AIT17439__NP
augagcgccuccaaggaggugaaaucuuuccuguggacccagagccucagacgggaacuguccggcuacugcucuagcaucaaacuucaagucguuaaggacgcucaggcccugcuccacgggcuggauuuuuccgaggugucuaacgugcagcgccuuaugagaaagcagaaacgggacgauagcgaccugaagcgccucagagaucugaaucaagcggucaacaaucugguggaacucaaguccacacagcagaaaagcauucugcggguuggaacgcuuaccucugacgaucugcucacacuggcugccgaccuugagaagcugaaauccaaggugauccgcaccgaaagaccccucagcucuggcgucuauauggggaaccuguccacacagcaacuggagcagcggcgcgcccuccugaauaugauuggaauggugggcggggcucagggaacccagccuggcagagauggcguugugcgggucugggacgugaaaaacccggaucuucugaauaaccaauucgggacaaugcccagccucacccuggccugucuuacgaagcagggacagguggaccugaaugaugcuguccucgcccugaccgaccugggccucaucuacacagcgaaguauccuaacucuuccgaccuggaucgccuuagccaaucccaucccauucugaauaugguugacaccaaaaagucuagccucaacaucuccggguuuaauuucagccugggagccgcugugaaagccggcgcuugcaugcuugaugggggaaacaugcuggagacaaucaaggugaccccucagacgauggacggcauucucaaaucuauccugaaggucaaaagaucccugggcauguuugugagcgauacacccggggaacggaauccuuacgagaacauucucuauaagaucugucugucuggagacggcuggccguacauugccagccgcaccuccaucguugggagagcgugggaaaacacaaccguggaucuugagucugacggaaagccccagaaaaugggcaccgccgggagcaauaagucccugcagagcgcuggauucccuacaggccucacguauucucaacugaugacccugaaagauuccaugaugcagcuugaccccagcgccaagacauggauugauaucgagggccggccugaagaccccgucgagaucgcucucuaccagccggugucugggugcuacauucacuuuuucagagaaccuaccgaccugaaacaguuuaagcaagaugccaaguauucccauggaaucgacguugccgaucuguucagcgcucagcccggccucacauccgcggugauugaggcccugccucgcaacaugguccuuaccugucaggggucugacgauaucaaacggcugcucgacagccagggaagacgcgauauuaagcugaucgacaucgcucuguccaaagccgauucucggagauuugaaaaugccgugugggaccaaugcaaggaucuuugucacaugcauacgggcgucgugguugagaaaaagaagcgcgggggcaaagaggaaauuacaccccacugcgcucucauggacuguaucauguacgaugccgcggugagcggaggccugaacauucccgucuuccgggcugugcugccuagagacaugguuuuucgcaccuccagcccgaaggugguccucuga

SEQ ID NO: 9069 - RNA, 1710 nt, Artificial Sequence
  derived and/or modified CDS sequence (opt5) from LASV(ISTH1048-NIG-2011;Clade II)__AIT17443__NP
augagcgccuccaaggaggugaaaucuuuccuguggacccagagccucagacgggaacuguccggcuacugcucuagcaucaaacuucaagucguuaaggacgcucaggcccugcuccacgggcuggauuuuuccgaggugucuaacgugcagcgccuuaugagaaagcagaaacgggacgauagcgaccugaagcgccucagagaucugaaucaagcggucaacaaucugguggaacucaaguccacacagcagaaaagcauucugcggguuggaacgcuuaccucugacgaucugcucacacuggcugccgaccuugagaagcugaaauccaaggugauccgcaccgaaagaccccucagcucuggcgucuauauggggaaccuguccacacagcaacuggagcagcggcgcgcccuccugaauaugauuggaauggugggcggggcucagggaacccagccuggcagagauggcguugugcgggucugggacgugaaaaacccggaucuucugaauaaccaauucgggacaaugcccagccucacccuggccugucuuacgaagcagggacagguggaccugaaugaugcuguccucgcccugaccgaccugggccucaucuacacagcgaaguauccuaacucuuccgaccuggaucgccuuagccaaucccaucccauucugaauaugguugacaccaaaaagucuagccucaacaucuccggguacaauuuuagccugggagccgcugugaaagccggcgcuugcaugcuugaugggggaaacaugcuggagacaaucaaggugaccccucagacgauggacggcauucucaaaucuauccugaaggucaaaagaucccugggcauguucgugagcgaugcccccggggaacggaauccuuaugagaacauucucuacaagaucugucugucuggagacggcuggccguauauugcgagccgcacauccaucguugggagagccugggaaaacaccacaguggaucuugagucugacggaaagccccagaaagucggcaccgcugggagcaauaagucccugcagagcgccggauuuccuaccggccucacauacucucaacugaugacgcugaaagauuccaugaugcagcuugaccccagcgcuaagaccuggauugauaucgagggccggccugaagaccccguggagaucgcccucuaccagccgaugucugggugcuauauucacuucuuuagagaaccuacagaccugaaacaguucaagcaagaugccaaguacucccauggaaucgacguugcugaucuguuucccgcgcagccuggccucaccagcgccgugauugaggcucugccccgcaacaugguccuuacaugucagggguccgacgauaucaaaaagcugcucgacucucagggacggagagauauuaaacugaucgacaucgcccugagcaaggccgauucccgccgguucgaaaaugcugugugggaccaaugcaaagaucuuugucacaugcauaccggcgucgugguugagaagaagaaaagagggggcaaggaggaaauuacgccccacugcgcccucauggacuguaucauguaugaugcggcugugucuggaggccugaacauuccuguccugcgcgccgugcucccgcgggacaugguuuuuagaacaagcucccccaaagugguccuguga

SEQ ID NO: 9070 - RNA, 1710 nt, Artificial Sequence
  derived and/or modified CDS sequence (opt5) from LASV(ISTH1058-NIG-2011;Clade II)__AIT17447__NP
augagcgccuccaaggaggugaaaucuuuccuguggacccagagccucagacgggaacuguccggcuacugcucuaacaucaaacuucaagucguuaaggacgcucaggcccugcuccacgggcuggauuuuagcgagguguccaaugugcagcgccuuaugagaaagcagaaacgggacgauucugaccugaagcgccucagagaucugaaccaagcggucaauaaccugguggaacucaagagcacacagcagaaauccauucugcggguuggaacgcuuaccagcgacgaucugcucacacuggcugccgaccuugagaagcugaaaucuaaggugauccgcaccgaaagaccccucuccagcggcgucuauauggggaaucugucuacacagcaacuggagcagcggcgcgcccuccugaacaugauuggaauggugggcggggcucagggaacccagccuggcagagauggcguugugcgggucugggacgugaaaaauccggaucuucugaacaaucaauucgggacaaugcccucccucacccuggccugucuuacgaagcagggacagguggaccugaacgaugcuguccucgcccugaccgaccugggccucaucuacacagcgaaguauccuaauagcucugaccuggaucgccuuucccaaagccaucccauucugaacaugguugacaccaaaaaguccucucucaauaucagcggguacaacuuuucccugggagccgcugugaaagccggcgcuugcaugcuugaugggggaaauaugcuggagacaaucaaggugaccccucagacgauggacggcauucucaaaagcauccugaaggucaaaaagucucugggcauguucguguccgauacacccggggaaagaaacccuuaugagaacauucucuacaagaucugucugagcggagacggcuggccguauauugccucucggaccagcaucguugggcgcgcgugggaaaauacaaccguggaucuugaguccgacggaaaaccccagaaggucggcaccacagggucuaacaaaagccugcaguccgccggauuuccuacgggccucaccuacagccaacugaugacacugaaggauucuaugaugcagcuugaccccuccgcuaaaaccuggauugauaucgagggcagaccugaagaccccguggagaucgcccucuaccagccgaugagcgggugcuauauucacuucuuucgggaaccuacagaccugaagcaguucaagcaagaugcuaaauacucucauggaaucgacguuaccgaucuguuucccgcccagccuggccucacguccgccgugauugaggcucugcccagaaauaugguccuuacaugucaggggagcgacgauaucaagcgccugcucgacucccagggacggagagauauuaaacugaucgacaucgcgcugucuaaggccgauagccgccgguucgaaaacgcugugugggaccaaugcaaagaucuuugucacaugcauaccggcgucgugguugagaagaagaaaagagggggcaaggaggaaauuacaccccacugcgcccucauggacuguaucauguaugaugccgcuguguccggaggccugaauauuccuguccugcgcgccgugcucccgcgggacaugguuuuuagaaccucuagccccaaagugguccuguga

SEQ ID NO: 9071 - RNA, 1710 nt, Artificial Sequence
  derived and/or modified CDS sequence (opt5) from LASV(ISTH1064-NIG-2011;Clade II)__AIT17451__NP
augagcgccuccaaggaggugaaaucuuuccuguggacccagagccucagacgggaacuguccggcuacugcucuaacaucaaacuucaagucguuaaggacgcucaggcccugcuccacgggcuggauuuuagcgagguguccaaugugcagcgccuuaugagaaagcagaaacgggacgauucugaccugaagcgccucagagaucugaaccaagcggucaauaaccugguggaacucaagagcacccagcagaaauccauucugcggguuggaacgcuuaccagcgacgaucugcucacacuggcugccgaccuugagaagcugaaaucuaaggugauccgcaccgaaagaccccucuccagcggcgucuauauggggaaucugucuacacagcaacuggagcagcggcgcgcccuccugaacaugauuggaauggugggcggggcucagggaacccagccuggcagagauggcguugugcgggucugggacgugaaaaauccggaucuucugaacaaucaauucgggacaaugcccucccucacccuggccugucuuacgaagcagggacagguggaccugaacgaugcuguccucgcccugaccgaccugggccucaucuacacagcgaaguuuccuaauagcucugaccuggaucgccuuucccaaagccaucccauucugaacaugguugacaccaaaaaguccucucucaauaucagcggguauaacuucucccugggagccgcugugaaagccggcgcuugcaugcuugaugggggaaauaugcuggagacaaucaaggugaccccucagacgauggacggcauucucaaaagcauccugaaggucaaaaagucucugggcauguuuguguccgauacacccggggaaagaaacccuuacgagaacauucucuauaagaucugucugagcggagacggcuggccguacauugccucucggaccagcaucguugggcgcgcgugggaaaauacaaccguggaucuugaguccgacggaaaaccccagaaggucggcaccacagggucuaacaaaagccugcaguccgccggauucccuacgggccucaccuauagccaacugaugacacugaaggauucuaugaugcagcuugaccccuccgcuaaaaccuggauugauaucgagggcagaccugaagaccccguggagaucgcccucuaccagccgaugagcgggugcuacauucacuuuuuccgggaaccuacagaccugaagcaguuuaagcaagaugcuaaauauucucauggaaucgacguugccgaucuguuccccgcccagccuggccucaccuccgcugugauugaggcgcugcccagaaauaugguccuuacgugucaggggagcgacgauaucaagcgccugcucgacucccagggacggagagauauuaaacugaucgacaucgcccugucuaaggcugauagccgccgguuugaaaacgccgugugggaccaaugcaaagaucuuugucacaugcauacaggcgucgugguugagaagaagaaaagagggggcaaggaggaaauuacaccccacugcgcccucauggacuguaucauguacgaugcugccguguccggaggccugaauauuccuguccugcgcgcggugcucccgcgggacaugguuuucagaaccucuagccccaaagugguccuguga

SEQ ID NO: 9072 - RNA, 1710 nt, Artificial Sequence
  derived and/or modified CDS sequence (opt5) from LASV(ISTH1069-NIG-2011;Clade II)__AIT17455__NP
augagcgccuccaaggaggugaaaucuuuccuguggacccagagccucagacgggaacuguccggcuacugcucuagcaucaaacuucaagucguuaaggacgcucaggcccugcuccacgggcuggauuuuuccgaggugucuaacgugcagcgccuuaugagaaagcagaaacgggacgauagcgaccugaagcgccucagagaucugaaucaagcggucaacaaucugguggaacucaaguccacacagcagaaaagcguucugcgggugggaacgcuuaccucugacgaucugcucacacuggcugccgaccuugagaagcugaaauccaaggucauucgcaccgaaagaccccucagcucuggcguguauauggggaaccuguccacacagcaacuggagcagcggcgcgcccuccugagcaugaucggaaugguuggcggggcucagggaacccagccuggcagagauggcgugguccgggugugggacgugaaaaauccggaucuucugaacaaucaauucgggacaaugcccucucucacccuggccugucuuacgaagcagggacaggucgaccugaacgaugcuguucucgcccugaccgaccugggccucauuuacacagcgaaguauccuaauuccagcgaccuggaucgccuuucccaaucucaucccauccugaacaugguggacaccaaaaagagcucccucaauauuagcggguacaacuuuucucugggagccgcugugaaagccggcgcuugcaugcuugaugggggaaauaugcuggagacaaucaaggucaccccucagacgauggacggcauccucaaauccauucugaaggugaaaagaagccugggcauguucguuucugauacacccggggaacggaacccuuaugagaauauccucuacaagauuugucugagcggagacggcuggccguauaucgccucccgcaccucuauuguggggagagcgugggaaaacacaaccgucgaucuugagagcgacggaaagccccagaaagugggcaccgccggguccaacaagagccugcagucugcuggauuuccuacaggccucacguacucccaacugaugacccugaaagauagcaugaugcagcuugaccccucugccaagacauggaucgauauugagggccggccugaagaccccguugagaucgcucucuaccagccgauguccgggugcuauauccacuucuuuagagaaccuaccgaccugaaacaguucaagcaagaugccaaguacagccauggaauugacguggccgaucuguuucccgcucagccuggccucacauccgcggucaucgaggcccugccccgcaauauggugcuuaccugucaggggucugacgauauuaaacggcugcucgacagccagggaagacgcgauaucaagcugauugacaucgcucuguccaaagccgauucucggagauucgaaaacgccgucugggaccaaugcaaggaucuuugucacaugcauacgggcgugguuguggagaaaaagaagcgcgggggcaaagaggaaaucacaccccacugcgcucucauggacuguauuauguaugaugccgcggucagcggaggccugaauaucccugugcugcgggcuguucucccgagagacaugguguuucgcaccuccagccccaaggucgugcuguga

SEQ ID NO: 9073 - RNA, 1710 nt, Artificial Sequence
  derived and/or modified CDS sequence (opt5) from LASV(ISTH1096-NIG-2012;Clade II)__AIT17459__NP
augagcgccuccaaggaggugaaaucuuuccuguggacccagagccucagacgggaacuguccggcuacugcucuagcaucaaacuucaagucguuaaggacgcucaggcccugcuccacgggcuggauuuuuccgaggugucuaacgugcagcgccuuaugagaaagcagaaacgggacgauagcgaccugaagcgccucagagaucugaaucaagcggucaacaaucugguggaacucaaguccacacagcagaaaagcauucugcggguuggaacgcuuaccucugacgaucugcucacacuggcugccgaccuugagaagcugaaauccaaggugauccgcaccgaaagaccccucagcucuggcgucuauauggggaaccuguccacacagcaacuggagcagcggcgcgcccuccugaauaugauuggaauggugggcggggcucagggaacccagccuggcagagauggcguugugcgggucugggacgugaaaaacccggaucuucugaauaaccaauucgggacaaugcccagccucacccuggccugucuuacgaagcagggacagguggaccugaaugaugcuguccucgcccugaccgaccugggccucaucuacacagcgaaguauccuaacucuuccgaccuggaucgccuuagccaaucccaucccauucugaauaugguugacaccaaaaagucuagccucaacaucuccggguacaauuuuagccugggagccgcugugaaagccggcgcuugcaugcuugaugggggaaacaugcuggagacaaucaaggugaccccucagacgauggacggcauucucaaaucuauccugaaggucaaaagaucccugggcauguucgugagcgauacacccggggaacggaauccuuaugagaacauucucuacaagaucugucugucuggagacggcuggccguauauugccagccgcaccuccaucguugggagagcgugggaaaacacaaccguggaucuugagucugacggaaagccccagaaaaugggcaccgccgggagcaauaagucccugcagagcgcuggauuuccuacaggccucacguacucucaacugaugacccugaaagauuccaugaugcagcuugaccccagcgccaagacauggauugauaucgagggccggccugaagaccccgucgagaucgcucucuaccagccggugucugggugcuauauucacuucuuuagagaaccuaccgaccugaaacaguucaagcaagaugccaaguacucccauggaaucgacguugccgaucuguuucccgcucagccuggccucacaagcgcggugauugaggcccugccccgcaacaugguccuuaccugucagggguccgacgauaucaaacggcugcucgacucucagggaagacgcgauauuaagcugaucgacaucgcucugagcaaagccgauucccggagauucgaaaaugccgugugggaccaaugcaaggaucuuugucacaugcauacgggcgucgugguugagaaaaagaagcgcgggggcaaagaggaaauuacaccccacugcgcucucauggacuguaucauguaugaugccgcggugucuggaggccugaacauuccuguccugcgggcugugcucccgagagacaugguuuuucgcaccagcucccccaaggugguccuguga

SEQ ID NO: 9074 - RNA, 1710 nt, Artificial Sequence
  derived and/or modified CDS sequence (opt5) from LASV(ISTH1107-NIG-2012;Clade II)__AIT17463__NP
augagcgccuccaaggaggugaaaucuuuccuguggacccagagccucagacgggaacuguccggcuacugcucuagcaucaaacuucaagucguuaaggacgcucaggcccugcuccacgggcuggauuuuuccgaggugucuaacgugcagcgccuuaugagaaagcauaaacgggacgauagcgaccugaagcgccucagagaucugaaucaggcggucaacaaucugguggaacucaaguccacacaacagaaaagcauucugcggguuggaacgcuuaccucugacgaucugcucacacuggcugccgaccuugagaagcugaaauccaaggugauccgcaccgaaagaccccucagcucuggcgucuauauggggaaccuguccacacagcagcuggagcaacggcgcgcccuccugaauaugauuggaauggugggcggggcucagagcacccagccuggaagagauggcguugugcgggucugggacgugaaaaacccggaucuucugaauaaccaguucggcacaaugcccucucucacccuggccugucuuacgaagcaaggacagguggaccugaaugaugcuguccucgcccugaccgaccugggacucaucuacacagcgaaguauccuaacuccagcgaccuggaucgccuuucccagucucaccccauucugaccaugguugacaccaaaaagagcucccucaauaucagcggcuuuaacuucucucugggggccgcugugaaagccggagcuugcaugcuugauggcgggaauaugcuggagaccaucaaggugacgccucaaacaauggacgggauucucaaauccauccugaaggucaaaaagagccugggcauguuugugucugauacccccggcgaaagaaacccuuacgagaauauucucuauaagaucugucugagcggggacggauggccguacauugccucccggacaucuaucguuggccgcgcgugggaaaacaccauuguggaucuugagaccgacgggaaaccccagaaggucggaacagccggcagcuccagaagccugcagucugcuggguucccuacgggacucaccuauucccagcugaugacacugaaagauagcaugaugcaacuugaccccucugccaagaccuggaucgauaucgagggccggccugaagaccccguggagauugcucucuaccagccgauguccggcugcuacauccacuuuuucagagaaccuacagaccugaaacaguuuaagcaggaugccaaguauagccaugggauugacguugccgaucuguuccccgcucaaccuggacucaccuccgcggugaucgaggcccugccccgcaacaugguccuuacgugucagggcucugacgauauuaaaaagcugcucgacagccaggggcggagagauaucaaacugaucgacauugcucuguccaaggccgauucucgccgguuugaaaaugccgugugggaccagugcaaagaucuuugucauaugcacacaggagucgugguugagaagaagaaaagaggcgggaaggaggaaaucacaccccacugcgcucucauggacuguauuauguacgaugccgcggugagcggcggacugaacaucccuguccugcgcgcugugcucccgcgggacaugguuuucagaaccuccagccccaaagugguccuguga

SEQ ID NO: 9075 - RNA, 1710 nt, Artificial Sequence
  derived and/or modified CDS sequence (opt5) from LASV(ISTH1111-NIG-2011;Clade II)__AIT17467__NP
augagcgccuccaaggaggugaaaucuuuccuguggacccagagccucagacgggaacuguccggcuacugcucuagcaucaaacuucaagucguuaaggacgcucaggcccugcuccacgggcuggauuuuuccgaggugucuaacgugcagcgccuuaugagaaagcagaaacgggacgauagcgaccugaagcgccucagagaucugaaucaagcggucaacaaucugguggaacucaaguccacacagcagaaaagcauucugcggguuggaacgcuuaccucugacgaucugcucacacuggcugccgaccuugagaagcugaaauccaaggugauccgcaccgaaagaccccucagcucuggcgucuauauggggaaccuguccacacagcaacuggagcagcggcgcgcccuccugaauaugauuggaauggugggcgggacccagggaacacagccuggcagagauggcguugugcgggucugggacgugaaaaacccggaucuucugaauaaccaauucgggaccaugcccagccucacgcuggcuugucuuaccaagcagggacagguggaccugaaugaugccguccucgcucugacagaccugggccucaucuacaccgccaaguauccuaacucuuccgaccuggaucgccuuagccaaucccaucccauucugaauaugguugacaccaaaaagucuagccucaacaucuccggguacaauuuuagccugggagcggccgugaaagcuggcgccugcaugcuugaugggggaaacaugcuggagaccaucaaggugacgccucagacaauggacggcauucucaaaucuauccugaaggucaaaaagucccugggcauguucgugagcgauacccccggggaaagaaauccuuaugagaacauucucuacaagaucugucugucuggagacggcuggccguauauugcuagccggacauccaucguugggcgcgccugggaaaacaccaccguggaucuugagucugacggaaaaccccagaaggucggcacagcggggagcaauaaaucccugcagagcgccggauuuccuacgggccucaccuacucucaacugaugacacugaaggauuccaugaugcagcuugaccccagcgcuaaaaccuggauugauaucgagggcagaccugaagaccccguggagaucgcccucuaccagccgaugucugggugcuauauucacuucuuucgggaaccuacagaccugaagcaguucaagcaagaugcuaaauacucccauggaaucgacguugccgaucuguuucccgcccagccuggccucaccagcgcugugauugaggcgcugcccagaaacaugguccuuacgugucagggguccgacgauaucaagcgccugcucgacucucagggacggagagauauuaaacugaucgacaucagccuguccaaggccgauucucgccgguucgaaaaugcugugugggaccaaugcaaagaucuuugucacaugcauacaggcgucgugguugagaagaagaaaagagggggcaaggaggaaauuacaccccacugcgcccucauggacuguaucauguaugaugccgcugugagcggaggccugaacauuccuguccugcgcgccgugcucccgcgggacaugguuuuuagaaccuccagccccaaagugguccuguga

SEQ ID NO: 9076 - RNA, 1710 nt, Artificial Sequence
  derived and/or modified CDS sequence (opt5) from LASV(ISTH1121-NIG-2012;Clade II)__AIT17471__NP
augagcgccuccaaggaggugaaaucuuuccuguggacccagagccucagacgggaacuguccggcuacugcucuagcaucaaacuucaagucguuaaggacgcucaggcccugcuccacgggcuggauuuuuccgaggugucuaacgugcagcgccuuaugagaaagcagaaacgggacgauagcgaccugaagcgccucagagaucugaaucaagcggucaacaaucugguggaacucaaguccacccagcagaaaagcauucugcggguuggaacgcuuaccucugacgaucugcucacacuggcugccgaccuugagaagcugaaauccaaggugauccgcaccgaaagaccccucagcucuggcgucuauauggggaaccuguccacacagcaacuggagcagcggcgcgcccuccugaauaugauuggaauggugggcggggcucagggaacccagccuggcagagauggcguugugcgggucugggacgugaaaaacccggaucuucugaauaaccaauucgggacaaugcccagccucacccuggccugucuuacgaagcagggacagguggaccugaaugaugcuguccucgcccugaccgaccugggccucaucuacacagcgaaguauccuaacucuuccgaccuggaucgccuuagccaaucccaucccauucugaauaugguugacaccaaaaagucuagccucaacaucuccggguacaauuuuagccugggagccgcugugaaagccggcgcuugcaugcuugaugggggaaacaugcuggagacaaucaaggugaccccucagacgauggacggcauucucaaaucuauccugaaggucaaaagaucccugggcauguucgugagcgauacacccggggaacggaauccuuaugagaacauucucuacaagaucugucugucuggagacggcuggccguauauugccagccgcaccuccaucguugggagagcgugggaaaacacaaccguggaucuugagucugacggaaagccccagaaaaugggcaccacagggagcaauaagucccugcagagcgccggauuuccuacgggccucaccuacucucaacugaugacacugaaagauuccaugaugcagcuugaccccagcgcuaagaccuggauugauaucgagggccggccugaagaccccgucgagaucgcccucuaccagccgaugucugggugcuauauucacuucuuuagagaaccuacagaccugaaacaguucaagcaagaugcuaaguacucccauggaaucgacguggccgaucuguuucccgcccagccuggccucaccagcgcuguuauugaggcgcugccccgcaacauggugcuuacgugucagggguccgacgauaucaaaaagcugcucgacucucagggacggagagauauuaaacugaucgacaucgcccugagcaaggcugauucccgcaaauucgaaaaugucgugugggaccaaugcaaggaucuuugucacaugcauacaggcgucgugguugagaagaaaaagagagggggcaaagaggaaauuacaccccacugcgcccucauggacuguaucauguaugaugccgcugugucuggaggccugaacauuccuguccugcgggccgugcucccgcgcgacaugguuuuucggaccagcucccccaaggugguccuguga

SEQ ID NO: 9077 - RNA, 1710 nt, Artificial Sequence
  derived and/or modified CDS sequence (opt5) from LASV(ISTH1129-NIG-2012;Clade II)__AIT17475__NP
augagcgccuccaaggaggugaaaucuuuccuguggacccagagccucagacgggaacuguccggcuacugcucuagcaucaaacuucaagucguuaaggacgcucaggcccugcuccacgggcuggauuuuuccgaggugucuaacgugcagcgccuuaugagaaagcagaaacgggacgauagcgaccugaagcgccucagagaucugaaucaagcggucaacaaucugguggaacucaaguccacccagcagaaaagcguucugcgggugggaacgcuuaccucugacgaucugcucacacuggcugccgaccuugagaagcugaaauccaaggucauucgcaccgaaagaccccucagcucuggcguguauauggggaaccuguccgcccagcaacuggagcagcggcgcgcucuccugagcaugaucggaaugguuggcggggcccagggaacacagccuggcagagauggcgugguccgggugugggacgugaaaaauccggaucuucugaacaaucaauucgggaccaugcccucucucacacuggcuugucuuaccaagcagggacaggucgaccugaacgauacgguucucgcccugaccgaccugggccucauuuacacagcgaaguauccuaauuccagcgaccuggaucgccuuucccaaucucaucccauccugaacaugguggacaccaaaaagagcucccucaauauuagcggguacaacuuuucucugggagccgcugugaaagccggcgcuugcaugcuugaugggggaaauaugcuggagacaaucaaggucaccccucagacgauggacggcauccucaaauccauucugaaggugaaaagaagccugggcauguucguuucugauacacccggggaacggaacccuuaugagaauauccucuacaagauuugucugagcggagacggcuggccguauaucgccucccgcaccucuauuguggggagagcgugggaaaacacaaccgucgaucuugagagcgacggaaagccccagaaagugggcaccgccggguccaacaagagccugcagucugcuggauuuccuacaggccucacguacucccaacugaugacccugaaagauagcaugaugcagcuugaccccucugccaagacauggaucgauauugagggccggccugaagaccccguugagaucgcucucuaccagccgaucuccgggugcuauauucacuucuuuagagaaccuaccgaccugaaacaguucaagcaagaugccaaguacagccauggaaucgacgugacagaucuguuucccgcccagccuggccucaccuccgcugucauugaggcgcugccccgcaauauggugcuuacgugucaggggucugacgauaucaaacggcugcucgacagccagggaagacgcgauauuaagaucaucgacauugcccuguccaaagcugauucucggagauucgaaaacgccgucugggaccaaugcaaggaucugugucacaugcauacaggcgugguuguggagaaaaagaagcgcgggggcaaagaggaaaucacaccccacugcgcccuuauggacuguauuauguaugaugcugccgucagcggaggccucaauaucccugugcugcgggcgguucugccgagagacaugguguuucgcaccuccagccccaaggucgugcucuga

SEQ ID NO: 9078 - RNA, 1710 nt, Artificial Sequence
  derived and/or modified CDS sequence (opt5) from LASV(ISTH1137-NIG-2011;Clade II)__AIT17479__NP
augagcgccuccaaggaggugaaaucuuuccuguggacccagagccucagacgggaacuguccggcuacugcucuaacaucaaacuucaagucguuaaggacgcucaggcccugcuccacgggcuggauuuuagcgagguguccaaugugcagcgccuuaugagaaagcagaaacgggacgauucugaccugaagcgccucagagaucugaaccaagcggucaauaaccugguggaacucaagagcacacagcagaaauccguucugcgggugggaacgcuuaccagcgacgaucugcucacacuggcugccgaccuugagaagcugaaaucuaaggucauucgcaccgaaagaccccucuccagcggcguguauauggggaaucugucuacacagcaacuggagcagcggcgcgcccuccugaacaugaucggaaugguuggcggggcucagggaacccagccuggcagagauggcgugguccgggugugggacgugaaaaauccggaucuucugaacaaucaauucgggacaaugcccucccucacccuggccugucuuacgaagcagggacaggucgaccugaacgaugcuguucucgcccugaccgaccugggccucauuuacacagcgaaguauccuaauagcucugaccuggaucgccuuucccaaagccaucccauccugaacaugguggacaccaaaaaguccucucucaauauuagcggguacaacuuuucccugggagccgcugugaaagccggcgcuugcaugcuugaugggggaaauaugcuggagacaaucaaggucaccccucagacgauggacggcauccucaaaagcauucugaaggugaaaagaucucugggcauguucguuuccgauacacccggggaacggaacccuuaugagaacauccucuacaagauuugucugagcggagacggcuggccguauaucgccucucgcaccagcauuguggggagagcgugggaaaauacaaccgucgaucuugaguccgacggaaagccccagaaagugggcaccgccgggucuaacaagagccugcaguccgcuggauuuccuacaggccucacguacagccaacugaugacccugaaagauucuaugaugcagcuugaccccuccgccaagacauggaucgauauugagggccggccugaagaccccguugagaucgcucucuaccagccgaugagcgggugcuauauccacuucuuuagagaaccuaccgaccugaaacaguucaagcaagaugccaaguacucucauggaauugacguggccgaucuguuucccgcucagccuggccucacauccgcggucaucgaggcccugccccgcaauauggugcuuaccugucaggggagcgacgauauuaaaaagcugcucgacucccagggacggaaagauaucaagcugauugacaucgcucugucuaaagucgauagcagacgcuucgaaaacgccgugugggaccaaugcaaggaucuuugucacaugcauacgggcguuguggucgagaagaaaaagagagggggcaaagaggaaaucacaccccacugcgcccucauggacuguauuauguaugaugcugccguguccggaggccugaauaucccuguucugcgggcggugcucccgcgcgacauggucuuucggaccucuagccccaagguggugcuguga

SEQ ID NO: 9079 - RNA, 1710 nt, Artificial Sequence
  derived and/or modified CDS sequence (opt5) from LASV(ISTH2010-NIG-2012;Clade II)__AIT17483__NP
augagcgccuccaaggaggugaaaucuuuccuguggacccagagccucagacgggaacuguccggcuacugcucuaacaucaaacuucaagucguuaaggacgcucaggcccugcuccacgggcuggauuuuagcgagguguccaaugugcagcgccuuaugagaaagcagaaacgggacgauucugaccugaagcgccucagagaucugaaccaagcggucaauaaccugguggaacucaagagcacacagcagaaauccauucugcggguuggaacgcuuaccagcgacgaucugcucacacuggcugccgaccuugagaagcugaaaucuaaggugauccgcaccgaaagaccccucuccagcggcgucuauauggggaaucugucuacacagcaacuggagcagcggcgcgcccuccugaaccuuauuggaauggugggcggggcucagggaacccagccuggcagagauggcguugugcgggucugggacgugaaaaauccggaucugcucaacaaucaauucgggacaaugcccucccugacccuugccugucugacgaagcagggacagguggaccucaacgaugcuguccuggcccugaccgaccucggccugaucuacacagcgaaguauccuaauagcucugaccuugaucgccugucccaaagccaucccauucucaacaugguugacaccaaaaaguccucucugaauaucagcggguuuaacuucucccuuggagccgcugugaaagccggcgcuugcaugcuggaugggggaaauaugcucgagacaaucaaggugaccccucagacgauggacggcauucugaaaagcauccugaaggucaaaaagucucucggcauguuuguguccgauacacccggggaaagaaacccuuacgagaacauucuguauaagaucugucuuagcggagacggcuggccguacauugccucucggaccagcaucguugggcgcgcgugggaaaauacaaccguggaucuggaguccgacggaaaaccccacaaggucggcaccgccgggucuaacaaaagccuccaguccgcuggauucccuacaggccugacguauagccagcugaugacccuuaaggauucuaugaugcaacucgaccccuccgccaaaacauggauugauaucgagggcagaccugaagaccccguggagaucgcucuguaccagccgaugagcgggugcuacauucacuuuuuccgggaaccuaccgaccugaagcaguuuaagcaggaugccaaauauucucauggaaucgacguugccgaucucuuccccgcucaaccuggccugacauccgcggugauugaggcccuucccagaaauaugguccugaccugucaggggagcgacgauaucaagcgccuccuggacucccagggacggagagauauuaaacugaucgacaucgcucuuucuaaggccgauagccgccgguuugaaaacgccgugugggaccagugcaaagaucucugucauaugcacacgggcgucgugguugagaagaagaaaagagggggcaaggaggaaauuacaccccacugcgcucugauggacuguaucauguacgaugccgcgguguccggaggccugaauauuccuguccuccgcgcugugcugccgcgggacaugguuuucagaaccucuagccccaaagugguccuuuga

SEQ ID NO: 9080 - RNA, 1710 nt, Artificial Sequence
  derived and/or modified CDS sequence (opt5) from LASV(ISTH2020-NIG-2012;Clade II)__AIT17491__NP
augagcgccuccaaggaggugaaaucuuuccuguggacccagagccucagacgggaacuguccggcuacugcucuaacaucaaacuucaagucguuaaggacgcucaggcccugcuccacgggcuggauuuuagcgagguguccaaugugcagcgccuuaugagaaagcagaaacgggacgauggagaccugaagcgccucagagaucugaaccaagcggucaauaaccugguggaacucaagucuacacagcagaaaagcguucugcgggugggcacgcuuaccuccgacgaucugcucacacuggcugccgaccuugagaagcugaaaagcaaggucauucgcaccgaaagaccccucucuuccgggguguauaugggaaaucugagcacacagcaacuggagcagcggcgcgcccuccugucuaugaucggcaugguugggggagcuagaggcacccagccuggccgggauggggugguccgcgugugggacgugaaaaacccggaucuucugaauaaccaguucggaacaaugcccucccucacccuggccugucuuacgaagcaaggccaggucgaccugaaugauguugugcucgcucugaccgaccuggggcucauuuacacagccaaguauccuaacagcucugaccuggauagacuuucccagagccaucccauccugaauaugguggacaccaaaaaguccucucucaacauuagcggauacaauuuuucccugggcgcggccgucaaagcuggggccugcaugcuugauggaggcaacaugcuggagacaaucaaggugaccccucaaacgauggacggcauccucaaaagcauucugaagguuaaaaagucucuggggauguucguguccgauacacccggagaacggaauccuuaugagaacauccucuacaagauuugucugagcggcgacggguggccguauaucgcuucucgcaccagcauugucggcagagccugggaaaacacaaccguggaucuugaguccgacggaaaaccccagaagguuggggcggccggaucuaauaaaagccugcaguccgcuggcuuuccuaccggccucacauacagccagcugaugacgcugaaggauucuaugaugcaacuugaccccuccgccaaaaccuggaucgauauugaggggcggccugaagaccccguggagaucgcucucuaccagccgaugagcggaugcuauauccacuucuuuagagaaccuacagaccugaagcaguucaagcaggaugccaaauacucucauggcauugacgucaccgaucuguuuuccgcccaacccgggcucacaagcgcugugaucgaggcgcugccucgcaacaugguccuuaccugucagggauccgacgauauuaagcggcugcucgacucucagggcagacgcgauaucaaacugauugacaucgcccugagcaaggcugauucccggagauucgaaaaugccgugugggaccagugcaaagaucuuugucacaugcauacggggguuguggucgagaagaagaaacgcggcggaaaggaggaaaucacaccccacugcgcccucauggacuguauuauguaugaugcugccgugucuggcgggcugaacauccccguucugcgggcggugcucccuagagacauggucuuucgcaccagcuccccgaaaguggugcuguga

SEQ ID NO: 9081 - RNA, 1710 nt, Artificial Sequence
  derived and/or modified CDS sequence (opt5) from LASV(ISTH2025-NIG-2012;Clade II)__AIT17495__NP
augagcgccuccaaggaggugaaaucuuuccuguggacccagagccucagacgggaacuguccggcuacugcucuaacaucaaacuucaagucguuaaggacgcucaggcccugcuccacgggcuggauuuuagcgagguguccaaugugcagcgccuuaugagaaagcagaaacgggacgauucugaccugaagcgccucagagaucugaaccaagcggucaauaaccugguggaacucaagagcacacagcagaaauccauucugcggguuggaacgcuuaccagcgacgaucugcucacacuggcugccgaccuugagaagcugaaaucuaaggugauccgcaccgaaagaccccucuccagcggcgucuauauggggaaucugucuacacagcaacuggagcagcggcgcgcccuccugaacaugauuggaauggugggcggggcucaguccgcccagccuggaagagauggcguugugcgggucugggacgugaaaaauccggaucuucugaacaaucaauucggcaccaugcccagccucacacuggcuugucuuaccaagcagggacagguggaccugaacgaugccguccucgcgcugacggaccugggacucaucuacaccgccaaguauccuaauucuuccgaccuggaucgccuuagccaaucccaucccauucugaacaugguugacaccaaaaagucuagccucaauaucuccggcuuuaacuucagccugggggcugccgugaaagcuggagccugcaugcuugauggcgggaauaugcuggagaccaucaaggugacaccucagaccauggacgggauucucaaaucuauccugaaggucaaaagaucccugggcauguuugugagcgaugcgcccggcgaacggaacccuuacgagaacauucucuauaagaucugucugucuggggacggauggccguacauugccagccgcacguccaucguuggcagagcuugggaaaauacaaccguggaucuugagucugacgggaagccccagaaagucggaacagccggcagcaacaagucccugcagagcgcuggguucccuaccggacucaccuauucucaacugaugacacugaaagauuccaugaugcagcuugaccccagcgccaagacguggauugauaucgagggccggccugaagaccccguggagaucgcccucuaccagccgaugucuggcugcuacauucacuuuuucagagaaccuaccgaccugaaacaguuuaagcaagaugcuaaguauucccaugggaucgacguugcggaucuguuccccgcccagccuggacucacaagcgcugugauugaggcccugccccgcaauaugguccuuaccugucagggcuccgacgauaucaaaaagcugcucgacucucaggggcggagagauauuaaacugaucgacaucgcccugagcaaggcugauucccgccgguuugaaaacgccgugugggaccaaugcaaagaucuuugucacaugcauacaggagucgugguugagaagaagaaaagaggcgggaaggaggaaauuacaccccacugcgcgcucauggacuguaucauguacgaugcugccgugucuggcggacugaauauuccuguccugcgcgccgugcucccgcgggacaugguuuucagaacgagcucccccaaagugguccuguga

SEQ ID NO: 9082 - RNA, 1710 nt, Artificial Sequence
  derived and/or modified CDS sequence (opt5) from LASV(ISTH2031-NIG-2012;Clade II)__AIT17499__NP
augagcgccuccaaggaggugaaaucuuuccuguggacccagagccucagacgggaacuguccggcuacugcucuagcaucaaacuucaagucguuaaggacgcucaggcccugcuccacgggcuggauuuuuccgaggugucuaacgugcagcgccuuaugagaaagcagaaacgggacgauagcgaccugaagcgccucagagaucugaaucaagcggucaacaaucugguggaacucaaguccacacagcagaaaagcauucugcggguuggaacgcuuaccucugacgaucugcucacacuggcugccgaccuugagaagcugaaauccaaggugauccgcaccgaaagaccccucagcucuggcgucuauauggggaaccuguccacacagcaacuggagcagcggcgcgcccuccugaauauuaucggaauggugggcggggcucagggaacccagccuggcagagauggcguugugcgggucugggacgugaaaaacccggaucuucugaauaaccaauucgggacaaugcccagccucacccuggccugucuuacgaagcagggacagguggaccugaaugaugcuguccucgcccugaccgaccugggccucauuuacacagcgaaguauccuaacucuuccgaccuggaucgccuuagccaaucccaucccauccugaauaugguugacaccaaaaagucuagccucaacaucuccggguacaauuuuagccugggagccgcugugaaagccggcgcuugcaugcuugaugggggaaacaugcuggagacaauuaaggugaccccucagacgauggacggcauccucaaaucuauucugaaggucaaaagaucccugggcauguucgugagcgauacacccggggaacggaauccuuaugagaacauccucuacaagauuugucugucuggagacggcuggccguauaucgccagccgcaccuccauuguugggagagcgugggaaaacacaaccguggaucuugagucugacggaaagccccagaaagucggcgccgcugggagcaauaagucccugcagagcgccggauuuccuaccggccucacauacucucaacugaugacgcugaaagauuccaugaugcagcuugaccccagcgcuaagaccuggaucgauaucgagggccggccugaagaccccguggagauugcccucuaccagccgaugucugggugcuauauccacuucuuuagagaaccuacagaccugaaacaguucaagcaagaugccaaguacucccauggaauugacguugcugaucuguuucccgcgcagccuggccucaccagcgccgugaucgaggcucugccccgcaacaugguccuuacaugucagggguccgacgaugugaaacggcugcucgacucucagggaagacgcgauauuaagcugaucgacaucgcccugagcaaagccgauucccggagauucgaaaaugcugucugggaccaaugcaaggaucuuugucacaugcauaccggcgugguuguggagaaaaagaagcgcgggggcaaagaggaaauuacgccccacugcgcccucauggacuguaucauguaugaugcggcugucucuggaggccugaacauuccugugcugcgggccguucucccgagagacaugguguuucgcacaagcucccccaaggucgugcuguga

SEQ ID NO: 9083 - RNA, 1710 nt, Artificial Sequence
  derived and/or modified CDS sequence (opt5) from LASV(ISTH2037-NIG-2012;Clade II)__AIT17503__NP
augagcuccucuaaggaggugaaauccuuccuguggacccagagccucagacgggaacugucuggcuacugcagcuccaucaaacuucaagucguuaaggacgcccaggcucugcuccacgggcuggauuuuucugaggugagcaacgugcagcgccuuaugagaaagcagaaacgggacgauuccgaccugaagcgccucagagaucugaaucaagccgucaacaaucugguggaacucaagagcacacagcagaaaucuauucugcggguuggaacgcuuaccuccgacgaucugcucacacuggcggcugaccuugagaagcugaaaagcaaggugauccgcaccgaaagaccccucucuuccggcgucuauauggggaaccugagcgcccagcaacuggagcagcggcgcgcccuccugaauaugauuggaauggugggcggggcucagggaacacagccuggcagagauggcguugugcgggucugggacgugaaaaacccggaucuucugaauaaccaauucgggaccaugcccucucucacacuggccugucuuaccaagcagggacagguggaccugaaugaugcuguccucgcccugacggaccugggccucaucuacaccgcgaaguauccuaacuccagcgaccuggaucgccuuucccaaucucaucccauucugaauaugguugacaccaaaaagagcucccucaacaucagcggguacaauuuuucucugggagccgcugugaaagccggcgcuugcaugcuugaugggggaaacaugcuggagacaaucaaggugacaccucagaccauggacggcauucucaaauccauccugaaggucaaaaagagccugggcauguucgugucugauacgcccggggaaagaaauccuuaugagaacauucucuacaagaucugucugagcggagacggcuggccguauauugccucccggacaucuaucguugggcgcgcgugggaaaacaccacaguggaucuugagagcgacggaaaaccccagaaggucggcaccgccggguccaauaaaagccugcagucugcuggauuuccuaccggccucacauacucccaacugaugacgcugaaggauagcaugaugcagcuugaccccucugccaaaaccuggauugauaucgagggcagaccugaagaccccguggagaucgcucucuaccagccgauguccgggugcuauauucacuucuuucgggaaccuacagaccugaagcaguucaagcaagaugccaaauacagccauggaaucgacguugccgaucuguuucccgcucagccuggccucaccuccgcggugauugaggcccugcccagaaacaugguccuuacaugucaggggucugacgauaucaagcgccugcucgacagccagggacggagagauauuaaacugaucgacaucgcucuguccaaggccgauucucgccgguucgaaaaugccgugugggaccaaugcaaagaucuuugucacaugcauaccggcgucgugguugagaagaagaaaagagggggcaaggaggaaauuacgccccacugcgcucucauggacuguaucauguaugaugccgcggugagcggaggccugaacauuccuguccugcgcgcugugcucccgcgggacaugguuuuuagaacauccagccccaaagugguccuguga

SEQ ID NO: 9084 - RNA, 1710 nt, Artificial Sequence
  derived and/or modified CDS sequence (opt5) from LASV(ISTH2042-NIG-2012;Clade II)__AIT17507__NP
augagcgccuccaaggaggugaaaucuuuccuguggacccagagccucagacgggaacuguccggcuacugcucuaacaucaaacuucaagucguuaaggacgcucaggcccugcuccacgggcuggauuuuagcgagguguccaaugugcagcgccuuaugagaaagcagaaacgggacgauucugaccugaagcgccucagagaucugaaccaagcggucaauaaccugguggaacucaagagcacacagcagaaauccauucugcggguuggaacgcuuaccagcgacgaucugcucacacuggcugccgaccuugagaagcugaaaucuaaggugauccgcaccgaaagaccccucuccagcggcgucuauauggggaaucugucuacacagcaacuggagcagcggcgcgcccuccugaaccuuauuggaauggugggcggggcucagggaacccagccuggcagagauggcguugugcgggucugggacgugaaaaauccggaucugcucaacaaucaauucgggacaaugcccucccugacccuugccugucugacgaagcagggacagguggaccucaacgaugcuguccuggcccugaccgaccucggccugaucuacacagcgaaguauccuaauagcucugaccuugaucgccugucccaaagccaucccauucucaacaugguugacaccaaaaaguccucucugaauaucagcggguuuaacuucucccuuggagccgcugugaaagccggcgcuugcaugcuggaugggggaaauaugcucgagacaaucaaggugaccccucagacgauugacggcauccugaaaagcauucugaaggucaaaaagucucucggcauguuuguguccgauacacccggggaaagaaacccuuacgagaacauccuguauaagauuugucuuagcggagacggcuggccguacaucgccucucggaccagcauuguugggcgcgcgugggaaaauacaaccguggaucuggaguccgacggaaaaccccacaaggucggcaccgccgggucuaacaaaagccuccaguccgcuggauucccuacaggccugacguauagccagcugaugacccuuaaggauucuaugaugcaacucgaccccuccgccaaaacauggaucgauaucgagggcagaccugaagaccccguggagauugcucuguaccagccgaugagcgggugcuacauccacuuuuuccgggaaccuaccgaccugaagcaguuuaagcaggaugccaaauauucucauggaauugacguugccgaucucuuccccgcucaaccuggccugacauccgcggugaucgaggcccuucccagaaauaugguccugaccugucaggggagcgacgauauuaagcgccuccuggacucccagggacggagagauaucaaacugaucgacauugcucuuucuaagguggauagccgccgguuugaaaacgccgucugggaccagugcaaagaucucugucauaugcacacgggcgugguuguggagaagaagaaaagagggggcaaggaggaaaucacaccccacugcgcccugauggacuguauuauguacgaugcugccgucuccggaggccugaauaucccugugcuccgcgcgguucugccgcgggacaugguguucagaaccucuagccccaaagucgugcuuuga

SEQ ID NO: 9085 - RNA, 1710 nt, Artificial Sequence
  derived and/or modified CDS sequence (opt5) from LASV(ISTH2046-NIG-2012;Clade II)__AIT17511__NP
augagcgccuccaaggaggugaaaucuuuccuguggacccagagccucagacgggaacuguccggcuacugcucuaacaucaaacuucaagucguuaaggacgcucaggcccugcuccacgggcuggauuuuagcgagguguccaaugugcagcgccuuaugagaaagcagaaacgggacgauggagaccugaagcgccucagagaucugaaccaagcggucaauaaccugguggaacucaagucuacccagcagaaaagcauucugcggguuggcacgcuuaccuccgacgaucugcucacacuggcugccgaccuugagaagcugaaaagcaaggugauccgcaccgaaagaccccucucuuccggggucuauaugggaaaucugagcacacagcaacuggagcagcggcgcgcccuccugaacaugauuggcaugguugggggagcucagggcacccagccuggcagagaugggguggugcgggucugggacgugaaaaauccggaucuucugaacaaucaauucggaacaaugcccucucucacccuggccugucuuacgaagcagggccagguggaccugaacgaugcuguccucgcccugaccgaccuggggcucaucuacacagcgaaguauccuaauuccagcgaccuggaucgccuuucucaaucccaucccauucugaacaugguugacaccaaaaagagcucccucaauaucucuggauacaacuuuagccugggcgccgcugugaaagccggggcuugcaugcuugauggaggcaauaugcuggagacaaucaaggugaccccucagacgauugacggcauccucaaauccauucugaaggucaaaaagagccuggggauguucgugucugauacacccggagaaagaaacccuuaugagaacauccucuacaagauuugucuguccggcgacggguggccguauaucgccagccggaccucuauuguuggacgcgcgugggaaaauacaaccguggaucuugagagcgacggcaaaccccagaaggucgggaccgccggauccaacaaaucucugcagagcgcuggcuuuccuacaggccucacguacucccaacugaugacccugaaggauagcaugaugcagcuugaccccucugccaaaacauggaucgauaucgaggggagaccugaagaccccguggagauugcucucuaccagccgauguccggaugcuauauccacuucuuucgggaaccuaccgaccugaagcaguucaagcaagaugccaaauacagccauggcauugacguuacagaucuguuuucugcccagcccgggcucaccuccgcugugaucgaggcgcugccuagaaauaugguccuuacgugucagggaagcgacgauauuaagcgccugcucgacucccagggccggagagauaucaaacugaucgacauugcccugucuaaggcugauagccgccgguucgaaaacgccgugugggaccaaugcaaagaucuuugucacaugcauacaggggucgugguugagaagaagaaaagaggcggaaaggaggaaaucacaccccacugcgcccucauggacuguauuauguaugaugcugccguguccggcgggcugaauauccccguccugcgcgcggugcucccucgggacaugguuuuuagaaccucuagcccgaaagugguccuguga

SEQ ID NO: 9086 - RNA, 1710 nt, Artificial Sequence
  derived and/or modified CDS sequence (opt5) from LASV(ISTH2050-NIG-2012;Clade II)__AIT17515__NP
augagcgccuccaaggaggugaaaucuuuccuguggacccagagccucagacgggaacuguccggcuacugcucuagcaucaaacuucaagucguuaaggacgcucaggcccugcuccacgggcuggauuuuuccgaggugucuaacgugcagcgccuuaugagaaagcagaaacgggacgauagcgaccugaagcgccucagagaucugaaucaagcggucaacaaucugguggaacucaaguccacacagcagaaaagcauucugcggguuggaacgcuuaccucugacgaucugcucacacuggcugccgaccuugagaagcugaaauccaaggugauccgcaccgaaagaccccucagcucuggcgucuauauggggaaccuguccacacagcaacuggagcagcggcgcgcccuccugaauaugauuggaauggugggcggggcucagggaacccagccuggcagagauggcguugugcgggucugggacgugaaaaacccggaucuucugaauaaccaauucgggacaaugcccagccucacccuggccugucuuacgaagcagggacagguggaccugaaugaugcuguccucgcccugaccgaccugggccucaucuacacagcgaaguauccuaacucuuccgaccuggaucgccuuagccaaucccaucccauucugaauaugguugacaccaaaaagucuagccucaacaucuccggguacaauuuuagccugggagccgcugugaaagccggcgcuugcaugcuugaugggggaaacaugcuggagacaaucaaggugaccccucagacgauggacggcauucucaaaucuauccugaaggucaaaagaucccugggcauguucgugagcgauacacccggggaacggaauccuuaugagaacauucucuacaagaucugucugucuggagacggcuggccguauauugccagccgcaccuccaucguugggagagcgugggaaaacacaaccguggaucuugagucugacggaaagccccagaaagucggcgccgcugggagcuccaagagccugcagucugccggauuuccuaccggccucacauacucccaacugaugacgcugaaagauagcaugaugcagcuugaccccucugcuaagaccuggauugauaucgagggccggccugaagaccccguggagaucgcccucuaccagccgguuuccgggugcuauauucacuucuuuagagaaccuacagaccugaaacaguucaagcaagaugccaaguacagccauggaaucgacguggcugaucuguuucccgcgcagccuggccucaccuccgccgucauugaggcucugccccgcaauauggugcuuacaugucaggggucugacgauaucaaacggcugcucgacagccagggaagacgcgauauuaagcugaucgacaucgcccuguccaaagccgauucucggagauucgaaaacgcugucugggaccaaugcaaggaucuuugucacaugcauaccggcgugguuguggagaaaaagaagcgcgggggcaaagaggaaauuacgccccacugcgcccucauggacuguaucauguaugaugcggcugucagcggaggccugaauauuccugugcugcgggccguucucccgagagacaugguguuucgcacauccagccccaaggucgugcuguga

SEQ ID NO: 9087 - RNA, 1710 nt, Artificial Sequence
  derived and/or modified CDS sequence (opt5) from LASV(ISTH2057-NIG-2012;Clade II)__AIT17519__NP
augagcgccuccaaggaggugaaaucuuuccuguggacccagagccucagacgggaacuguccggcuacugcucuaacaucaaacuucaagucguuaaagacgcucaggcccugcuccacgggcuggauuuuagcgagguguccaaugugcagcgccuuaugagaaagcagaaacgggacgauucugaccugaagcgccucagagaucugaaccaagcggucaauaaccugguggaacucaagagcacacagcagaaauccauucugcggguuggaacgcuuaccagcgacgaucugcucacacuggcugccgaccuugagaagcugaaaucuaaggugauccgcaccgaaagaccccucuccagcggcgucuauauggggaaucugucugcccagcaacuggagcagcggcgcgcucuccugaacaugauuggaauggugggcggggcccagggaacacagccuggcagagauggcguugugcgggucugggacgugaaaaauccggaucuucugaacaaucaauucgggaccaugcccucccucacacuggcuugucuuaccaagcagggacagguggaccugaacgaugccguccucgcgcugacggaccugggccucaucuacaccgccaaguauccuaauagcucugaccuggaucgccuuucccaaagccaucccauucugaacaugguugacacaaagaaguccucucucaauaucagcggguuuaacuucucccugggagcugccgugaaagcuggcgccugcaugcuugaugggggaaauaugcuggagaccaucaaggugacaccucagaccauggacggcauucucaaaagcauccugaaggucaaaagaucucugggcauguuuguguccgauacgcccggggaacggaacccuuacgagaacauucucuauaagaucugucugagcggagacggcuggccguacauugcgucucgcacaagcaucguugggagagccugggaaaauaccacaguggaucuugaguccgacggaaagccccagaaagucggcaccgcugggucuaacaagagccugcaguccgccggauucccuaccggccucacauauagccaacugaugacgcugaaagauucuaugaugcagcuugaccccuccgcuaagaccuggauugauaucgagggccggccugaagaccccguggagaucgcccucuaccagccgaugagcgggugcuacauucacuuuuucagagaaccuacagaccugaaacaguuuaagcaagaugccaaguauucucauggaaucgacguugcugaucuguuccccgcgcagccuggccucaccuccgccgugauugaggcucugccccgcaauaugguccuuacaugucaggggagcgacgauaucaaacggcugcucgacucccagggaagacgcgauauuaagcugaucgacaucgcccugucuaaagccgauagccggagauuugaaaacgcugugugggaccaaugcaaggaucuuugucacaugcauaccggcgucgugguugagaaaaagaagcgcgggggcaaagaggaaauuacgccccacugcgcccucauggacuguaucauguacgaugcggcuguguccggaggccugaauauuccuguccugcgggccgugcucccgagagacaugguuuuccgcacaucuagccccaaggugguccuguga

SEQ ID NO: 9088 - RNA, 1710 nt, Artificial Sequence
  derived and/or modified CDS sequence (opt5) from LASV(ISTH2064-NIG-2012;Clade II)__AIT17525__NP
augagcgccuccaaggaggugaaaucuuuccuguggacccagagccucagacgggaacuguccggcuacugcucuagcaucaaacuucaagucguuaaggacgcucaggcccugcuccacgggcuggauuuuuccgaggugucuaacgugcagcgccuuaugagaaagcagcggcgcgacgauagcgaccugaaaagacuccgggaucugaaucaagcggucaacaaucugguggaacucaaguccacccagcaaaagagcauucugcgcguuggaacgcuuaccucugacgaucugcucacacuggcugccgaccuugagaaacugaaguccaaagugaucagaaccgaacggccccucagcucuggcgucuauauggggaaccuguccacacagcagcuggagcagcgcagagcccuccugaauaugauuggaauggugggcggggcucagggaacccagccuggccgggauggcguugugcgcgucugggacgugaagaacccggaucuucugaauaaccaauucgggacaaugcccagccucacccuggccugucuuacgaaacagggacagguggaccugaaugaugcuguccucgcccugaccgaccugggccucaucuacacagcgaaguauccuaacucuuccgaccuggauagacuuagccaaucccaucccauucugaauaugguugacaccaagaaaucuagccucaacaucuccggguacaauuuuagccugggagccgcugugaaggccggcgcuugcaugcuugaugggggaaacaugcuggagacaaucaaagugaccccucagacggucgacggcauucucaagucuauccugaaagugaagcggucccugggcauguucguuagcgauacacccggggaacgcaauccuuaugagaacauucucuacaaaaucugucugucuggagacggcuggccguauauugccagcagaaccuccaucguggggcgggcgugggaaaacacaaccgucgaucuugagucugacggaaagccccagaaggugggcaccgccgggagcaauaaaucccugcagagcgcuggauuuccuacaggccucacguacucucaacugaugacccugaaggauuccaugaugcagcuugaccccagcgccaaaacauggauugauaucgagggcagaccugaagaccccguugagaucgcucucuaccagccgaugucugggugcuauauucacuucuuucgcgaaccuaccgaccugaagcaguucaaacaagaugccaaguacucccauggaaucgacguggccgaucuguuucccacacagccuggccucaccagcgcugucauugaggcgcugccccggaacauggugcuuacgugucagggguccgacgauaucaagagacugcucgacucucagggacgccgggauauuaaacugaucgacaucgcccugagcaaggcugauuccagaaaauucgaaaaugccgucugggaccaaugcaaggaucuuugucacaugcauacaggcgugguuguggagaaaaagaagcgcgggggcaaagaggaaauuacaccccacugcgcccucauggacuguaucauguaugaugcugccgucucuggaggccugaacauuccugugcugcgggcgguucucccgagagacaugguguuucgcaccagcucccccaaggucgugcuguga

SEQ ID NO: 9089 - RNA, 1710 nt, Artificial Sequence
  derived and/or modified CDS sequence (opt5) from LASV(ISTH2065-NIG-2012;Clade II)__AIT17529__NP
augagcgccuccaaggaggugaaaucuuuccuguggacccagagccucagacgggaacuguccggcuacugcucuaacaucaaacuucaagucguuaaggacgcucaggcccugcuccacgggcuggauuuuagcgaggugaauaacgugcagcgccuuaugagaaagcagaaacgggacgauuccgaccugaagcgccucagagaucugaaucaagcggucaacaaucugguggaacucaagucuacacagcagaaaagcauucugcggguuggaacgcuuaccuccgacgaucugcucacacuggcugccgaccuugagaagcugaaaagcaaggugauccgcaccgaaagaccccucucuuccggcgucuauauggggaaccugagcacacagcaacuggagcagcggcgcgcccuccugaauaugauuggaauggcuggcgggacccagggaacacagccuggcagagauggcgugguucgggugugggacgucaaaaacccggaucuucugaauaaccaauucgggaccaugcccucucucacgcuggccugucuuaccaagcagggacagguggaccugaaugaugcugugcucgcccugacagaccugggccucaucuacaccgcgaaguauccuaacuccagcgaccuggaucgccuuucucaaucccaucccauucugaauauggucgacaccaaaaagagcucccucaacaucucuggguacaauuuuagccugggagccgcuguuaaagccggcgcuugcaugcuugaugggggaaacaugcuggagaccaucaaggugacgccucagacaauggacggcauucucaaauccauccugaaggugaaaagaagccugggcauguucgucucugauacccccggggaacggaacccuuaugagaauauucucuacaagaucugucuguccggagacggcuggccguauauugccagccgcacaucuaucguggggagagcgugggaaaacaccaccguugaucuugagagcgacggaaagccccagaaagugggcacagccggguccaauaagucucugcagagcgcuggauuuccuacgggccucaccuacucccaacugaugacacugaaagauagcaugaugcagcuugaccccucugccaagaccuggauugauaucgagggccggccugaagaccccgucgagaucgcucucuaccagccgauguccgggugcuauauucacuucuuuagagaaccuacagaccugaaacaguucaagcaagaugccaaguacagccauggaaucgacguggccgaucuguuucccgcucagccuggccucaccucugcgguuauugaggcccugccccgcaacauggugcuuacgugucagggguccgacgauaucaaaaagcugcucgacagccagggacggagagauauuaaacugaucgacaucucccugucuaagauugauagccgcaaauucgaaaaugcugucugggaccaaugcaaggaucuuugucacaugcauacaggcguggucguggagaagaaaaagagagggggcaaagaggaaaucacaccccacugcgcccucauggacuguauuauguuugaugccgcuguuuccggaggccugaacaucccugugcugcgggccguccucccgcgcgacaugguguuccggaccucuagccccaagguugugcuguga

SEQ ID NO: 9090 - RNA, 1710 nt, Artificial Sequence
  derived and/or modified CDS sequence (opt5) from LASV(ISTH2094-NIG-2012;Clade II)__AIT17539__NP
augagcgccuccaaggaggugaaaucuuuccuguggacccagagccucagacgggaacuguccggcuacugcucuaacaucaaacuucaagucguuaaggacgcucaggcccugcuccacgggcuggauuuuagcgagguguccaaugugcagcgccuuaugagaaagcagaaacgggacgauggagaccugaagcgccucagagaucugaaccaagcggucaauaaccugguggaacucaagucuacacagcagaaaagcguucugcgggugggcacgcuuaccuccgacgaucugcucauucuggcugccgaccuugagaagcugaaaagcaaggucauccgcacagaaagaccccucucuuccgggguguauaugggaaaucugagcacccagcaacuggagcagcggaaagcccuccugucuaugauuggcaugguugggggagcucagggcacacagccuggccgcgaugggguggucagagugugggacgugaagaacccggaucuucugaauaaccaauucggaaccaugcccucccucacacuggccugucuuaccaagcagggccaggucgaccugaaugaugcuguucucgcccugacggaccuggggcucaucuacaccgcgaaauauccuaacagcucugaccuggaucggcuuucccaaagccaucccauucugaauaugguggacacaaagaaauccucucucaacaucagcggauacaauuuuucccugggcgccgcugugaaggccggggcuugcaugcuugauggaggcaacaugcuggagaccaucaaagucacaccucagaccauggacggcauucucaagagcauccugaaagugaagcgcucucuggggauguucguuuccgauacgcccggagaaagaaauccuuaugagaacauucucuacaagaucugucugagcggcgacggguggccguauauugccucucggacaagcaucgugggacgcgcgugggaaaacaccacagucgaucuugaguccgacggcaaaccccagaagguggggucugccggaagcaauaaaucccugcagagcgcuggcuuuccuaccggccucaccuacucucaacugaugacacugaaggauuccaugaugcagcuugaccccagcgccaaaacguggauugauaucgaggggagaccugaagaccccguugagaucgcucucuaccagccgaugucuggaugcuauauucacuucuuucgggaaccuaccgaccugaagcaguucaagcaagaugccaaauacucccauggcaucgacgugacagaucuguuuagcgcccagcccgggcucaccuccgcugucauugaggcgcugccuagaaacauggugcuuacaugucagggaucugacgauaucaagaaacugcucgacagccagggccgccgggauauuaagcugaucgacaucucccuggggaaagccgauucuagacgcuucgaaaaugcugucugggaccaaugcaaggaucuuugucacaugcauaccggcgugguuguggagaagaaaaagcggggaggcaaagaggaaauuacgccccacugcgcccucauggacuguaucauguuugaugccgcugucagcgggggacugaacauucccauccugagagccgugcucccucgcgacaugguuuuccggacauccagcccgaaggugguccuguga

SEQ ID NO: 9091 - RNA, 1710 nt, Artificial Sequence
  derived and/or modified CDS sequence (opt5) from LASV(ISTH2129-NIG-2012;Clade II)__AIT17545__NP
augagcgccuccaaggaggugaaaucuuuccuguggacccagagccucagacgggaacuguccggcuacugcucuaacaucaaacuucaagucguuaaggacgcucaggcccugcuccacgggcuggauuuuagcgagguguccaaugugcagcgccuuaugagaaagcagaaacgggacgauucugaccugaagcgccucagagaucugaaccaagcggucaauaaccugguggaacucaagagcacacagcagaaauccguucugcgggugggaacgcuuaccagcgacgaucugcucacacuggcugccgaccuugagaagcugaaaucuaaggucauucgcaccgaaagaccccucuccagcggcguguauauggggaaucugucuacacagcaacuggagcagcggcgcgcccuccugaacaugaucggaaugguuggcggggcucagggaacccagccuggcagagauggcgugguccgggugugggacgugaaaaauccggaucuucugaacaaucaauucgggacaaugcccucccucacccuggccugucuuacgaagcagggacaggucgaccugaacgaugcuguucucgcccugaccgaccugggccucauuuacacagcgaaguauccuaauagcucugaccuggaucgccuuucccaaagccaucccauccugaacaugguggacaccaaaaaguccucucucaauauuagcggguacaacuuuucccugggagccgcugugaaagccggcgcuugcaugcuugaugggggaaauaugcuggagacaaucaaggucaccccucagacgauggacggcauccucaaaagcauucugaaggugaaaaagucucugggcauguucguuuccgauacacccggggaaagaaacccuuaugagaacauccucuacaagauuugucugagcggagacggcuggccguauaucgccucucggaccagcauuguggggcgcgcgugggaaaauacaaccgucgaucuugaguccgacggaaaaccccagaaggugggcaucgccgggucuaacaaaagccugcaguccgcuggauuuccuaccggccucacauacagccaacugaugacgcugaaggauucuaugaugcagcuugaccccuccgccaaaaccuggauugauaucgagggcagaccugaagaccccguugagaucgcucucuaccagccgaugagcgggugcuauauucacuucuuucgggaaccuacagaccugaagcaguucaagcaagaugccaaauacucucauggaaucgacguggccgaucuguuuuccgcucagcccggccucaccagcgcggucauugaggcccugccuagaaauauggugcuuacaugucagggguccgacgauaucaagcgccugcucgacucucagggacggagagauauuaaacugaucgacaucgcucugagcaaggccgauucccgcaaauucgaaaacgccgucugggaccaaugcaaggaucuuugucacaugcauaccggcgugguuguggagaagaaaaagagagggggcaaagaggaaauuacgccccacugcgcucucauggacuguaucauguaugaugccgcggucucuggaggccuggacauucccgugcugcgggcuguucucccucgcgacaugguguuucggacaagcuccccgaaggucgugcuguga

SEQ ID NO: 9092 - RNA, 1710 nt, Artificial Sequence
  derived and/or modified CDS sequence (opt5) from LASV(ISTH2217-NIG-2012;Clade II)__AIT17549__NP
augagcgccuccaaggaggugaaaucuuuccuguggacccagagccucagacgggaacuguccggcuacugcucuaacaucaaacuucaagucguuaaggacgcucaggcccugcuccacgggcuggauuuuagcgagguguccaaugugcagcgccuuaugagaaagcagaaacgggacgauucugaccugaagcgccucagagaucugaaccaagcggucaauaaccugguggaacucaagagcacacagcagaaauccauucugcggguuggaacgcuuaccagcgacgaucugcucacacuggcugccgaccuugagaagcugaaaucuaaggugauccgcaccgaaagaccccucuccagcggcgucuauauggggaaucugucuacacagcaacuggagcagcggcgcgcccuccugaacaugauuggaauggugggcggggcucagggaacccagccuggcagagauggcguugugcgggucugggacgugaaaaauccggaucuucugaacaaucaauucgggacaaugcccucccucacccuggccugucuuacgaagcagggacagguggaccugaacgaugucguucucgcucugaccgaccugggccucaucuacacagccaaguauccuaauagcucugaccuggaucgccuuucccaaagccaucccauucugaacaugguggacaccaaaaaguccucucucaauaucagcggguacaacuuuucccugggagcggccgugaaagcuggcgccugcaugcuugaugggggaaauaugcuggagacaaucaaggucaccccucagacgauggacggcauucucaaaagcauccugaaggugaaaaagucucugggcauguucguuuccgauacacccggggaaagaaacccuuaugagaacauucucuacaagaucugucugagcggagacggcuggccguauauugcuucucggaccagcaucguggggcgcgccugggaaaauacaaccgucgaucuugaguccgacggaaaaccccagaaggugggcaccguugggucuaacaaaagccugcaguccgcgggauuuccuacaggccucacguacagccaacugaugacccugaaggauucuaugaugcagcuugaccccuccgccaaaacauggauugauaucgagggcagaccugaagaccccguggagaucgcucucuaccagccgaugagcgggugcuauauucacuucuuucgggaaccuaccgaccugaagcaguucaagcaagaugccaaauacucucauggaaucgacgucgcugaucuguuucccgcccagccuggccucacauccgccgugauugaggcucugcccagaaauaugguccuuaccugucaggggagcgacgauaucaagaaacugcucgacucccagggacgccgggauauuaagcugaucgacaucgcgcugucuaaagccgauagcagaaaguucgaaaacgcugugugggaccaaugcaaggaucuuugucacaugcauacgggcguuguggucgagaaaaagaaacgcgggggcaaggaggaaauuacaccccacugcgcccucauggacuguaucauguaugaugccgcuguguccggaggccugaauauuccuguucugcgggccgugcucccgagagacauggucuuucgcaccucuagccccaaaguggugcuguga

SEQ ID NO: 9093 - RNA, 1710 nt, Artificial Sequence
  derived and/or modified CDS sequence (opt5) from LASV(ISTH2271-NIG-2012;Clade II)__AIT17553__NP
augagcgccuccaaggaggugaaaucuuuccuguggacccagagccucagacgggaacuguccggcuacugcucuagcaucaaacuucaagucguuaaggacgcucaggcccugcuccacgggcuggauuuuuccgaggugucuaacgugcagcgccuuaugagaaagcagaaacgggacgauagcgaccugaagcgccucagagaucugaaucaagcggucaacaaucugguggaacucaaguccacacagcagaaaagcauucugcggguuggaacgcuuaccucugacgaucugcucacacuggcugccgaccuugagaagcugaaauccaaggugauccgcaccgaaagaccccucagcucuggcgucuauauggggaaccuguccacacagcaacuggagcagcggcgcgcccuccugaauaugauuggaauggugggcggggcucagggaacccagccuggcagagauggcguugugcgggucugggacgugaaaaacccggaucuucugaauaaccaauucgggacaaugcccagccucacccuggccugucuuacgaagcagggacagguggaccugaaugaugcuguccucgcccugaccgaccugggccucaucuacacagcgaaguauccuaacucuuccgaccuggaucgccuuagccaaucccaucccauucugaauaugguugacaccaaaaagucuagccucaacaucuccggguacaauuuuagccugggagccgcugugaaagccggcgcuugcaugcuugaugggggaaacaugcuggagacaaucaaggugaccccucagacgauggacggcauucucaaaucuauccugaaggucaaaagaucccugggcauguucgugagcgauacacccggggaacggaauccuuaugagaacauucucuacaagaucugucugucuggagacggcuggccguauauugccagccgcaccuccaucguugggagagcgugggaaaacacaaccguggaucuugagucugacggaaagccccagaaaaugggcaccgccgggagcaauaagucccugcagagcgcuggauuuccuacaggccucacguacucucaacugaugacccugaaagauuccaugaugcagcuugaccccagcgccaagacauggauugauaucgagggccggccugaagaccccgucgagaucgcucucuaccagccgaugucugggugcuauauucacuucuuuagagaaccuaccgaccugaaacaguucaagcaagaugccaaguacucccauggaaucgacguggccgaucuguuucccgcucagccuggccucacaagcgcgguuauugaggcccugccccgcaacauggugcuuaccugucagggguccgacgauaucaaaaagcugcucgacucucagggacggagagauauuaaacugaucgacaucgcucugagcaaggccgauucccgccgguucgaaaaugccgucugggaccaaugcaaagaucuuugucacaugcauacgggcguggucguggagaagaagaaaagagggggcaaggaggaaauuacaccccacugcgcucucauggacuguaucauguaugaugccgcgguuucuggaggccugaacauuccugugcugcgcgcuguccucccgcgggacaugguguuuagaaccagcucccccaaaguugugcuguga

SEQ ID NO: 9094 - RNA, 1710 nt, Artificial Sequence
  derived and/or modified CDS sequence (opt5) from LASV(ISTH2312-NIG-2012;Clade II)__AIT17561__NP
augagcgccuccaaggaggugaaaucuuuccuguggacccagagccucagacgggaacuguccggcuacugcucuaacaucaaacuucaagucguuaaggacgcucaggcccugcuccacgggcuggauuuuagcgagguguccaaugugcagcgccuuaugagaaagcagaaacgggacgauucugaccugaagcgccucagagaucugaaccaagcggucaauaaccugguggaacucaagagcacacagcagaaauccauucugcggguuggaacgcuuaccagcgacgaucugcucacacuggcugccgaccuugagaagcugaaaucuaaggugauccgcaccgaaagaccccucuccagcggcgucuauauggggaaucugucuacacagcaacuggagcagcggcgcgcccuccugaacaugauuggaauggugggcggggcucagggaacccagccuggcagagauggcguugugcgggucugggacgugaaaaauccggaucuucugaacaaucaauucgggacaaugcccucccucacccuggccugucuuacgaagcagggacagguggaccugaacgaugcuguccucgcccugaccgaccugggccucaucuacacagcgaaguauccuaauagcucugaccuggaucgccuuucccaaagccaucccauucugaacaugguugacaccaaaaaguccucucucaauaucagcggguacaacuuuucccugggagccgcugugaaagccggcgcuugcaugcuugaugggggaaauaugcuggagacaaucaaggugaccccucagacgauugacggcauccucaaaagcauucugaaggucaaaaagucucugggcauguucguguccgauacacccggggaaagaaacccuuaugagaacauccucuacaagauuugucugagcggagacggcuggccguauaucgccucucggaccagcauuguugggcgcgcgugggaaaauacaaccguggaucuugaguccgacggaaaaccccagaaggucggcaccguggggucuaacaaaagccugcaguccgccggauuuccuacaggccucacguacagccaacugaugacccugaaggauucuaugaugcagcuugaccccuccgcuaaaacauggaucgauaucgagggcagaccugaagaccccguugagauugcccucuaccagccgaugagcgggugcuauauccacuucuuucgggaaccuaccgaccugaagcaguucaagcaagaugcuaaauacucucauggaauugacguggccgaucuguuucccgcccagccuggccucacauccgcugucaucgaggcgcugcccagaaauauggugcuuaccugucaggggagcgacgauauuaagcgccugcucgacucccagggacggagagauaucaaacugaucgacauugcccugucuaaggcugauagccgccgguucgaaaacgccgucugggaccaaugcaaagaucuuugucacaugcauacgggcgugguuguggagaagaagagacgcgggggcaaagaggaaaucacaccccacugcgcccucauggacuguauuauguaugaugcugccgucuccggaggccugaauaucccugugcugcgggcgguucucccgagagacaugguguuucgcaccucuagccccaaggucgugcuguga

SEQ ID NO: 9095 - RNA, 1710 nt, Artificial Sequence
  derived and/or modified CDS sequence (opt5) from LASV(ISTH2316-NIG-2012;Clade II)__AIT17565__NP
augagcgccuccaaggagaucaaaucuuuccuguggacccagagccucagacgggaacuguccggcuacugcucuagcauuaaacuucaaguggucaaggacgcucaggcccugcuccacgggcuggauuuuuccgagguuucuaacgugcagcgccuuaugagaaagcagaaacgggacgauagcgaccugaagcgccucagagaucugaaucaagcggugaacaaucuggucgaacucaaguccacacagcagaaaagcauccugcgggugggaacgcuuaccucugacgaucugcucacacuggcugccgaccuugagaagcugaaauccaagguuauucgcaccgaaagaccccucagcucuggcguguauauggggaaccuguccacacagcaacuggagcagcggcgcgcccuccugaauaugaucggaauggucggcggggcucagggaacccagccuggcagagauggcgugguucgggugugggacgucaaaaacccggaucuucugaauaaccaauucgggacaaugcccagccucacccuggccugucuuacgaagcagggacagguggaccugaaugaugcugugcucgcccugaccgaccugggccucauuuacacagcgaaguauccuaacucuuccgaccuggaucgccuuagccaaucccaucccauccugaauauggucgacaccaaaaagucuagccucaacaucuccggguacaauuuuagccugggagccgcuguuaaagccggcgcuugcaugcuugaugggggaaacaugcuggagacaauuaaggugaccccucagacgauggacggcauccucaaaucuauucugaaggugaaaagaucccugggcauguucgucagcgaugcccccggggaacggaauccuuaugagaacauccucuacaagauuugucugucuggagacggcuggccguauaucgcgagccgcacauccauuguggggagagccugggaaaacaccacaguugaucuugagucugacggaaagccccagaaagugggcaccgcugggagcaauaagucccugcagagcgccggauuuccuaccggccucacauacucucaacugaugacgcugaaagauuccaugaugcagcuugaccccagcgcuaagaccuggaucgauaucgagggccggccugaagaccccgucgagauugcccucuaccagccgaugucugggugcuauauccacuucuuuagagaaccuacagaccugaaacaguucaagcaagaugccaaguacucccauggaauugacguggcugaucuguuucccgcgcagccuggccucaccagcgccguuaucgaggcucugccccgcaacauggugcuuacaugucagggguccgacgauauuaaacggcugcucgacucucagggaagacgcgauaucaagcugaucgacauugcccugagcaaagccgauucccggaaguucgaaaaugcugucugggaccaaugcaaagaucuuugucacaugcauaccggcguggucguggagaagaagaaaagagggggcaaggaggaaaucacgccccacugcgcccucauggacuguauuauguaugaugcggcuguuucuggaggccugaacaucccugugcugcgcgccguccucccgcgggacaugguguuuagaacaagcucccccaaaguugugcuguga

SEQ ID NO: 9096 - RNA, 1710 nt, Artificial Sequence
  derived and/or modified CDS sequence (opt5) from LASV(ISTH2334-NIG-2012;Clade II)__AIT17569__NP
augagcgccuccaaggaggugaaaucuuuccuguggacccagagccucagacgggaacuguccggcuacugcucuaacaucaaacuucaagucguuaaggacgcucaggcccugcuccacgggcuggauuuuagcgagguguccaaugugcagcgccuuaugagaaagcagaaacgggacgauucugaccugaagcgccucagagaucugaaccaagcggucaauaaccugguggaacucaagagcacccagcagaaauccauucugcggguuggaacgcuuaccagcgacgaucugcucacacuggcugccgaccuugagaagcugaaaucuaaggugauccgcaccgaaagaccccucuccagcggcgucuauauggggaaucugucuacacagcaacuggagcagcggcgcgcccuccugaacaugauuggaauggugggcggggcucagggaacccagccuggcagagauggcguugugcgggucugggacgugaaaaauccggaucuucugaacaaucaauucgggacaaugcccucccucacccuggccugucuuacgaagcagggacagguggaccugaacgaugcuguccucgcccugaccgaccugggccucaucuacacagcgaaguuuccuaauagcucugaccuggaucgccuuucccaaagccaucccauucugaacaugguugacaccaaaaaguccucucucaauaucagcggguauaacuucucccugggagccgcugugaaagccggcgcuugcaugcuugaugggggaaauaugcuggagacaaucaaggugaccccucagacgauggacggcauucucaaaagcauccugaaggucaaaaagucucugggcauguuuguguccgauacacccggggaaagaaacccuuacgagaacauucucuauaagaucugucugagcggagacggcuggccguacauugccucucggaccagcaucguugggcgcgcgugggaaaauacaaccguggaucuugaguccgacggaaaaccccagaaggucggcaccacagggucuaacaaaagccugcaguccgccggauucccuacgggccucaccuauagccaacugaugacacugaaggauucuaugaugcagcuugaccccuccgcuaaaaccuggauugauaucgagggcagaccugaagaccccguggagaucgcccucuaccagccgaugagcgggugcuacauucacuuuuuccgggaaccuacagaccugaagcaguuuaagcaagaugcuaaauauucucauggaaucgacguugccgaucuguuccccgcccagccuggccucaccuccgcugugauugaggcgcugcccagaaauaugguccuuacgugucaggggagcgacgauaucaagcgccugcucgacucccagggacggagagauauuaaacugaucgacaucgcccugucuaaggcugauagccgccgguuugaaaacgccgugugggaccaaugcaaagaucuuugucacaugcauacaggcgucgugguugagaagaagaaaagagggggcaaggaggaaauuacaccccacugcgcccucauggacuguaucauguacgaugcugccguguccggaggccugaaucugccuguccuccgcgcggugcugccgcgggacaugguuuucagaaccucuagccccaaagugguccuuuga

SEQ ID NO: 9097 - RNA, 1710 nt, Artificial Sequence
  derived and/or modified CDS sequence (opt5) from LASV(ISTH2358-NIG-2012;Clade II)__AIT17573__NP
augagcgccuccaaggaggugaaaucuuuccuguggacccagagccucagacgggaacuguccggcuacugcucuaacaucaaacuucaagucguuaaggacgcucaggcccugcuccacgggcuggauuuuagcgagguguccaaugugcagcgccuuaugagaaagcagaaacgggacgauucugaccugaagcgccucagagaucugaaccaagcggucaauaaccugguggaacucaagagcacacagcagaaauccauucugcggguuggaacgcuuaccagcgacgaucugcucacacuggcugccgaccuugagaagcugaaaucuaaggugauccgcaccgaaagaccccucuccagcggcgucuauauggggaaucugucuacacagcaacuggagcagcggcgcgcccuccugaacaugauuggaauggugggcggggcucagggaacccagccuggcagagauggcguugugcgggucugggacgugaaaaauccggaucuucugaacaaucaauucgggacaaugcccucccucacccuggccugucuuacgaagcagggacagguggaccugaacgaugcuguccucgcccugaccgaccugggccucaucuacacagcgaaguauccuaauagcucugaccuggaucgccuuucccaaagccaucccauucugaacaugguugacaccaaaaaguccucucucaauaucagcggguacaacuuuucccugggagccgcugugaaagccggcgcuugcaugcuugaugggggaaauaugcuggagacaaucaaggugaccccucagacgauggacggcauucucaaaagcauccugaaggucaaaaagucucugggcauguucguguccgauacacccggggaaagaaacccuuaugagaacauucucuacaagaucugucugagcggagacggcuggccguauauugccucucggaccagcaucguugggcgcgcgugggaaaauacaaccguggaucuugaguccgacggaaaaccccagaaggucggcaccgccgggucuaacaaaagccugcaguccgcuggauuuccuacaggccucacguacagccaacugaugacccugaaggauucuaugaugcagcuugaccccuccgccaaaacauggauugauaucgagggcagaccugaagaccccguggagaucgcucucuaccagccgaugagcgggugcuauauucacuucuuucgggaaccuaccgaccugaagcaguucaagcaagaugccaaauacucucauggaaucgacauugccgaucuguuucccgcucagccuggccucacauccgcgguuaucgaggcccugcccagaaauauggugcuuaccugucaggggagcgacgauauuaagcgccugcucgacucccagggacggagagauaucaaacugaucgacauugcucugucuaaggccgauagccgccgguucgaaaacgccgucugggaccaaugcaaagaucuuugucacaugcauacgggcguggucguggagaagaagaaaagagggggcaaggaggaaaucacaccccacugcgcucucauggacuguauuauguaugaugccgcgguuuccggaggccugaauaucccugugcugcgcgcuguccucccgcgggacaugguguuuagaaccucuagccccaaaguugugcuguga

SEQ ID NO: 9098 - RNA, 1710 nt, Artificial Sequence
  derived and/or modified CDS sequence (opt5) from LASV(ISTH2376-NIG-2012;Clade II)__AIT17577__NP
augagcgccuccaaggaggugaaaucuuuccuguggacccagagccucagacgggaacuguccggcuacugcucuagcaucaaacuucaagucguuaaggacgcucaggcccugcuccacgggcuggauuuuuccgaggugucuaacgugcagcgccuuaugagaaagcagaaacgggacgauagcgaccugaagcgccucagagaucugaaucaagcggucaacaaucugguggaacucaaguccacacagcagaaaagcauucugcggguuggaacgcuuaccucugacgaucugcucacacuggcugccgaccuugagaagcugaaauccaaggugauccgcaccgaaagaccccucagcucuggcgucuauauggggaaccuguccacacagcaacuggagcagcggcgcgcccuccugaauaugauuggaauggugggcggggcucagggaacccagccuggcagagauggcguugugcgggucugggacgugaaaaacccggaucuucugaauaaccaauucgggacaaugcccagccucacccuggccugucuuacgaagcagggacagguggaccugaaugaugcuguccucgcccugaccgaccugggccucaucuacacagcgaaguauccuaacucuuccgaccuggaucgccuuagccaaucccaucccauucugaauaugguugacaccaaaaagucuagccucaacaucuccggguacaauuuuagccugggagccgcugugaaagccggcgcuugcaugcuugaugggggaaacaugcuggagacaaucaaggugaccccucagacgauggacggcauucucaaaucuauccugaaggucaaaagaucccugggcauguucgugagcgauacacccggggaacggaauccuuaugagaacauucucuacaagaucugucugucuggagacggcuggccguauauugccagccgcaccuccaucgcggggagagccugggaaaacacaaccguugaucuugagucugacggaaagccccagaaagugggcgcugccgggagcaauaagucccugcagagcgcuggauuuccuaccggccucacauacucucaacugaugacgcugaaagauuccaugaugcagcuugaccccagcgccaagaccuggauugauaucgagggccggccugaagaccccgucgagaucgcccucuaccagccgaugucugggugcuauauucacuucuuuagagaaccuacagaccugaaacaguucaagcaagaugcuaaguacucccauggaaucgacguggcggaucuguuucccgcccagccuggccucaccagcgcuguuauugaggcccugccccgcaacauggugcuuacaugucagggguccgacgauaucaaacggcugcucgacucucagggaagacgcgauauuaagcugaucgacaucgcccugagcaaagcugauucccggagauucgaaaaugccgucugggaccaaugccgcgaucuuugucacaugcauaccggcguggucguggagaagaaaaagagagggggcaaggaggaaauuacgccccacugcgcgcucauggacuguaucauguaugaugcugccguuucuggaggccugaacauuccugugcugcgggccguccucccgcgcgacaugguguuucggacaagcucccccaaaguugugcuguga

SEQ ID NO: 9099 - RNA, 1710 nt, Artificial Sequence
  derived and/or modified CDS sequence (opt5) from LASV(Lassa virus/H.sapiens-wt/NGA/2015/ISTH_0543;Clade II)__AVO03640__NP
augagcgccuccaaggaggugaaaucuuuccuguggacccagagccucagacgggaacuguccggcuacugcucuaacaucaaacuucaagucguuaaggacgcucaggcccugcuccacgggcuggauuuuagcgagguguccaaugugcagcgccuuaugagaaagcagaaacgggacgauucugaccugaagcgccucagagaucugaaccaagcggucaauaaccugguggaacucaagagcacacagcagaaauccauucugcggguuggaacgcuuaccagcgacgaucugcucacacuggcugccgaccuugagaagcugaaaucuaaggugauccgcaccgaaagaccccucuccagcggcgucuauauggggaaucugucuacacagcaacuggagcagcggcgcgcccuccugaacaugauuggaauggugggcggggcucagggaacccagccuggcagagauggcguugugcgggucugggacgugaaaaauccggaucuucugaacaaucaauucgggacaaugcccucccucacccuggccugucuuacgaagcagggacagguggaccugaacgaugcuguccucgcccugaccgaccugggccucaucuacacagcgaaguauccuaauagcucugaccuggaucgccuuucccaaagccaucccauucugaacaugguugacaccaaaaaguccucucucaauaucagcggguacaacuuuucccugggagccgcugugaaagccggcgcuugcaugcuugaugggggaaauaugcuggagacaaucaaggugaccccucagacgauggacggcauucucaaaagcauccugaaggucaaaaagucucugggcauguucguguccgauacacccggggaaagaaacccuuaugagaacauucucuacaagaucugucugagcggagacggcuggccguauauugccucucggaccagcaucguugggcgcgcgugggaaaauacaaccguggaucuugaguccgacggaaaaccccagaaggucggcucugccgggagcaacaaaucccugcagagcgcuggauuuccuaccggccucacauacucucaacugaugacgcugaaggauuccaugaugcagcuugaccccagcgccaaaaccuggauugauaucgagggcagaccugaagaccccguggagaucgcucucuaccagccgaugucugggugcuauauucacuucuuucgggaaccuacagaccugaagcaguucaagcaagaugccaaauacucccauggaaucgacguugccgaucuguuucccgcucagccuggccucaccagcgcggugauugaggcccugcccagaaauaugguccuuacaugucagggguccgacgauaucaagcgccugcucgacucucagggacggaaagauauuaagcugaucgacaucgcucugagcaaagccgauuccagacgcuucgaaaacgccgugugggaccaaugcaaggaucuuugucacaugcauaccggcgucgugguugagaagaaaaagagagggggcaaagaggaaauuacgccccacugcgcucucauggacuguaucauguaugaugccgcggugucuggaggccugaauauuccuguccugcgggcugugcucccgcgcgacaugguuuuucggacaagcucccccaaggugguccuguga

SEQ ID NO: 9100 - RNA, 1710 nt, Artificial Sequence
  derived and/or modified CDS sequence (opt5) from LASV(Lassa virus/H.sapiens-wt/NGA/2015/ISTH_0547;Clade II)__AVO03584__NP
augagcgccuccaaggaggugaaaucuuuccuguggacccagagccucagacgggaacuguccggcuacugcucuagcaucaaacuucaagucguuaaggacgcucaggcccugcuccacgggcuggauuuuuccgaggugucuaacgugcagcgccuuaugagaaagcagaaacgggacgauagcgaccugaagcgccucagagaucugaaucaagcggucaacaaucugguggaacucaaguccacacagcagaaaagcauucugcggguuggaacgcuuaccucugacgaucugcucacacuggcugccgaccuugagaagcugaaauccaaggugauccgcaccgaaagaccccucagcucuggcgucuauauggggaaccuguccacacagcaacuggagcagcggcgcgcccuccugaauaugauuggaauggugggcggggcucagggaacccagccuggcagagauggcguugugcgggucugggacgugaaaaacccggaucuucugaauaaccaauucgggacaaugcccagccucacccuggccugucuuacgaagcagggacagguggaccugaaugaugcuguccucgcccugaccgaccugggccucaucuacacagcgaaguauccuaacucuuccgaccuggaucgccuuagccaaucccaucccauucugaauaugguugacaccaaaaagucuagccucaacaucuccggguacaauuuuagccugggagccgcugugaaagccggcgcuugcaugcuugaugggggaaacaugcuggagacaaucaaggugaccccucagacgauggacggcauucucaaaucuauccugaaggucaaaagaucccugggcauguucgugagcgauacacccggggaacggaauccuuaugagaacauucucuacaagaucugucugucuggagacggcuggccguauauugccagccgcaccuccaucguugggagagcgugggaaaacacaaccguggaucuugagucugacggaaagccccagaaagucggcguggccgggagcaauaagucccugcagagcgcuggauuuccuaccggccucacauacucucaacugaugacgcugaaagauuccaugaugcagcuugaccccagcgccaagaccuggauugauaucgagggccggccugaagaccccguugagaucgcucucuaccagccgaugucugggugcuauauucacuucuuuagagaaccuacagaccugaaacaguucaagcaagaugccaaguacucccauggaaucgacguggccgaucuguuucccgcucagccuggccucaccagcgcggucauugaggcccugccccgcaacauggugcuuacaugucagggguccgacgauaucaaacggcugcucgacucucagggaagacgcgauauuaagcugaucgacaucgcucugagcaaagccgauucccggagauucgaaaaugccgucugggaccaaugcaaggaucuuugucacaugcauaccggcgugguuguggagaaaaagaagcgcgggggcaaagaggaaauuacgccccacugcgcucucauggacuguaucauguaugaugccgcggucucuggaggccugaacauuccugugcugcgggcuguucucccgagagacaugguguuucgcacaagcucccccaaggucgugcuguga

SEQ ID NO: 9101 - RNA, 1710 nt, Artificial Sequence
  derived and/or modified CDS sequence (opt5) from LASV(Lassa virus/H.sapiens-wt/NGA/2015/ISTH_0574;Clade II)__AVO03658__NP
augagcgccuccaaggaggugaaaucuuuccuguggacccagagccucagacgggaacuguccggcuacugcucuaacaucaaacuucaagucguuaaggacgcucaggcccugcuccacgggcuggauuuuagcgagguguccaaugugcagcgccuuaugagaaagcagaaacgggacgauucugaccugaagcgccucagagaucugaaccaagcggucaauaaccugguggaacucaagagcacacagcagaaauccauucugcggguuggaacgcuuaccagcgacgaucugcucacacuggcugccgaccuugagaagcugaaaucuaaggugauccgcaccgaaagaccccucuccagcggcgucuauauggggaaucugucuacacagcaacuggagcagcggcgcgcccuccugaacaugauuggaauggugggcgggacccagggaacacagccuggcagagauggcguugugcgggucugggacgugaaaaauccggaucuucugaacaaucaauucgggaccaugcccucccucacgcuggcuugucuuaccaagcagggacagguggaccugaacgaugccguccucgcucugacagaccugggccucaucuacaccgccaaguauccuaauagcucugaccuggaucgccuuucccaaagccaucccauucugaacaugguugacaccaaaaaguccucucucaauaucagcggguacaacuuuucccugggagcggccgugaaagcuggcgccugcaugcuugaugggggaaauaugcuggagaccaucaaggugacgccucagacaauggacggcauucucaaaagcauccugaaggucaaaaagucucugggcauguucguguccgauacccccggggaaagaaacccuuaugagaacauucucuacaagaucugucugagcggagacggcuggccguauauugcuucucggacaagcaucguugggcgcgccugggaaaauaccaccguggaucuugaguccgagggaaaaccccagaaggucggcacagcggggucuaacaaaagccugcaguccgccggauuuccuacgggccucaccuacagccaacugaugacacugaaggacucuaugaugcagcuugaucccuccgcuaaaaccuggauugacaucgaaggcagaccugaggaucccguggaaaucgcccucuaccagccgaugagcgggugcuauauucacuucuuucgggagccuacagaccugaagcaguucaagcaagacgcuaaauacucucauggaaucgauguugccgaccuguuucccgcccagccuggccucaccuccgcugugauugaagcgcugcccagaaauaugguccuuacgugucaggggagcgaugacaucaagcgccugcucgauucccagggacggagagacauuaaacugaucgauaucucucugagcaaggccgacucccgccgguucgagaacgcugugugggaucaaugcaaagaccuuugucacaugcauacaggcgucgugguugagaagaagaaaagagggggcaaggaagagauuacaccccacugcgcccucauggauuguaucauguaugacgccgcugugucuggaggccugaauauuccuguccugcgcgccgugcucccgcgggauaugguuuuuagaaccagcucccccaaagugguccuguga

SEQ ID NO: 9102 - RNA, 1710 nt, Artificial Sequence
  derived and/or modified CDS sequence (opt5) from LASV(Lassa virus/H.sapiens-wt/NGA/2015/ISTH_0682;Clade II)__AVO03626__NP
augagcgccuccaaggaggugaaaucuuuccuguggacccagagccucagacgggaacuguccggcuacugcucuagcaucaaacuucaagucguuaaggacgcucaggcccugcuccacgggcuggauuuuuccgaggugucuaacgugcagcgccuuaugagaaagcagaaacgggacgauagcgaccugaagcgccucagagaucugaaucaagcggucaacaaucugguggaacucaaguccacacagcagaaaagcguucugcgggugggaacgcuuaccucugacgaucugcucacacuggcugccgaccuugagaagcugaaauccaaggucauucgcaccgaaagaccccucagcucuggcguguauauggggaaccuguccacacagcaacuggagcagcggcgcgcccuccugagcaugaucggaaugguuggcgggacccagggaacacagccuggcagagauggcgugguccgggugugggacgugaaaaauccggaucuucugaacaaucaauucgggaccaugcccucucucacgcuggcuugucuuaccaagcagggacaggucgaccugaacgaugccguucucgcucugacagaccugggccucauuuacaccgccaaguauccuaauuccagcgaccuggaucgccuuucccaaucucaucccauccugaacaugguggacaccaaaaagagcucccucaauauuagcggguacaacuuuucucugggagcggccgugaaagcuggcgccugcaugcuugaugggggaaauaugcuggagaccaucaaggucacgccucagacaauggacggcauccucaaauccauucugaaggugaaaaagagccugggcauguucguuucugauacccccggggaaagaaacccuuaugagaauauccucuacaagauuugucugagcggagacggcuggccguauaucgcuucccggacaucuauuguggggcgcgccugggaaaacaccaccgucgaucuugagagcaacggaaaaccccagaaggugggcacagcgggguccaauaaaagccugcagucugccggauuuccuacgggccucaccuacucccaacugaugacacugaaggacagcaugaugcagcuugaucccucugcuaaaaccuggaucgacauugagggcagaccugaagaucccguugagaucgcccucuaccagccgauguccgggugcuauauccacuucuuucgggaaccuacagaccugaagcaguucaagcaagacgcuaaauacagccauggaauugauguggccgaccuguuucccgcccagccuggccucaccuccgcugucaucgaggcgcugcccagaaacauggugcuuacgugucaggggucugaugacauuaagcgccugcucgauagccagggacggagagacaucaaacugauugauaucucccugucuaaggccgacagccgcaaauucgaaaaugcugucugggaucaaugcaaggaccuuugucacaugcauacaggcgugguuguggagaagaaaaagagagggggcaaagaggaaaucacaccccacugcgcccucauggauuguauuauguaugacgccgcugucuccggaggccugaacaucccugugcugcgggccguucucccgcgcgauaugguguuucggaccagcucucccaaggucgugcuguga

SEQ ID NO: 9103 - RNA, 1710 nt, Artificial Sequence
  derived and/or modified CDS sequence (opt5) from LASV(Lassa virus/H.sapiens-wt/NGA/2015/ISTH_0687;Clade II)__AVO03582__NP
augagcgccuccaaggaggugaaaucuuuccuguggacccagagccucagacgggaacuguccggcuacugcucuagcaucaaacuucaagucguuaaggacgcucaggcccugcuccacgggcuggauuuuuccgaggugucuaacgugcagcgccuuaugagaaagcagaaacgggacgauagcgaccugaagcgccucagagaucugaaucaagcggucaacaaucugguggaacucaaguccacacagcagaaaagcauucugcggguuggaacgcuuaccucugacgaucugcucacacuggcugccgaccuugagaagcugaaauccaaggugauccgcaccgaaagaccccucagcucuggcgucuauauggggaaccuguccacacagcaacuggagcagcggcgcgcccuccugaauaugauuggaauggugggcggggcucagagcacccagccuggaagagauggcguugugcgggucugggacgugaaaaacccggaucuucugaauaaccaauucggcacaaugcccucucucacccuggccugucuuacgaagcagggacagguggaccugaaugaugcuguccucgcccugaccgaccugggacucaucuacacagcgaaguauccuaacuccagcgaccuggaucgccuuucccaaucucaucccauucugaauaugguugacaccaaaaagagcucccucaacaucagcggcuacaauuuuucucugggggccgcugugaaagccggagcuugcaugcuugauggcgggaacaugcuggagacaaucaaggugaccccucagacgauggacgggauucucaaauccauccugaaggucaaaagaagccugggcauguucgugucugauacacccggcgaacggaauccuuaugagaacauucucuacaagaucugucugagcggggacggauggccguauauugccucccgcaccucuaucguuggcagagcgugggaaaacacaaccguggaucuugagagcgacgggaagccccagaaagucggagccaccggcuccaauaagagccugcagucugcuggguuuccuacaggacucacguacucccaacugaugacccugaaagauagcaugaugcagcuugaccccucugccaagacauggauugauaucgagggccggccugaagaccccguggagaucgcucucuaccagccgauuuccggcugcuauauccacuucuuuagagaaccuaccgaccugaaacaguucaagcaagaugccaaguacagccaugggauugacguugccgaucuguuucccgcucagccuggacucacauccgcggugaucgaggcccugccccgcaacaugguccuuaccugucagggcucugacgauauuaaacggcugcucgacagccaggggagacgcgauaucaagcugaucgacauugcucuguccaaagccgauucucggagauucgaaaaugccgugugggaccaaugcaaggaucuuugucacaugcauacgggagucgugguugagaaaaagaagcgcggcgggaaagaggaaaucacaccccacugcgcucucauggacuguauuauguaugaugccgcggugagcggcggacugaacaucccuguccugcgggcugugcucccgagagacaugguuuuucgcaccuccagccccaaggugguccuguga

SEQ ID NO: 9104 - RNA, 1710 nt, Artificial Sequence
  derived and/or modified CDS sequence (opt5) from LASV(Lassa virus/H.sapiens-wt/NGA/2015/ISTH_0736;Clade II)__AVO03574__NP
augagcgccuccaaggaggugaaaucuuuccuguggacccagagccucagacgggaacuguccggcuacugcucuaacaucaaacuucaagucguuaaggacgcucaggcccugcuccacgggcuggauuuuagcgagguguccaaugugcagcgccuuaugagaaagcagaaacgggacgauucugaccugaagcgccucagagaucugaaccaagcggucaauaaccugguggaacucaagagcacacagcagaaauccguucugcgggugggaacgcuuaccagcgacgaucugcucacacuggcugccgaccuugagaagcugaaaucuaaggucauucgcaccgaaagaccccucuccagcggcguguauauggggaaucugucuacacagcaacuggagcaucggcgcgcccuccugaacaugaucggaaugguuggcggggcucagggaacccagccuggcagagauggcgugguccgggugugggacgugaaaaauccggaucuucugaacaaucaguucgggacaaugcccucccucacccuggccugucuuacgaagcaaggacaggucgaccugaacgaugcuguucucgcccugaccgaccugggccucauuuacacagcgaaguauccuaauagcucugaccuggaucgccuuucccagagccaccccauccugaacaugguggacaccaaaaaguccucucucaauauuagcggguacaacuuuucccugggagccgcugugaaagccggcgcuugcaugcuugaugggggaaauaugcuggagacaaucaaggucaccccucaaacgauggacggcauccucaaaagcauucugaaggugaaaagaucucugggcauguucguuuccgauacacccggggaacggaacccuuaugagaacauccucuacaagauuugucugagcggagacggcuggccguauaucgccucucgcaccagcauuguggggagagcgugggaaaauacaaccgucgaucuugaguccgacggaaagccccagaaagugggcaccgccgggucuaacaagagccugcaguccgcuggauuuccuacaggccucacguacagccagcugaugacccugaaagauucuaugaugcaacuugaccccuccgccaagacauggaucgauauugagggccggccugaagaccccguugagaucgcucucuaccagccgaucagcgggugcuauauucauuucuuuagagaaccuaccgaccugaaacaguucaagcaggaugccaaguacucucacggaaucgacguggccgaucuguuucccgcucaaccuggccucacauccgcggucauugaggcccugccccgcaauauggugcuuaccugucaggggagcgacgauaucaaacggcugcucgacucccagggaagacgcgauauuaagcugaucgacaucgcucugucuaaagccgauagccggagauucgaaaacgccgucugggaccagugcaaggaucuuugucauaugcacacgggcgugguuguggagaaaaagaagcgcgggggcaaagaggaaauuacaccccacugcgcucucauggacuguaucauguaugaugccgcggucuccggaggccugaauauuccugugcugcgggcuguucucccgagagacaugguguuucgcaccucuagccccaaggucgugcuguga

SEQ ID NO: 9105 - RNA, 1710 nt, Artificial Sequence
  derived and/or modified CDS sequence (opt5) from LASV(Lassa virus/H.sapiens-wt/NGA/2015/ISTH_0789;Clade II)__AVO03552__NP
augagcgccuccaaggaggugaaaucuuuccuguggacccagagccucagacgggaacuguccggcuacugcucuaacaucaaacuucaagucguuaaggacgcucaggcccugcuccacgggcuggauuuuagcgagguguccaaugugcagcgccuuaugagaaagcagaaacgggacgauggagaccugaagcgccucagagaucugaaccaagcggucaauaaccugguggaacucaagucuacacagcagaaaagcguucugcgggugggcacgcuuuccagcgacgaucugcucauucuggcugccgaccuugagaagcugaaaucuaaggucauccgcaccgaaagaccccucuccagcgggguguauaugggaaaucugucuucccagcaacuggaucagcggcgcgcccuccugaacaugauuggcaugacagggggaggccagggcgcuaaugccgggagagacggaaucguucgggugugggaugucaaaaacgcugagcuucugaauaaccaguucggcaccaugccuagccucacacuggccugucuuaccaagcaaggacagguggaccugaaugaugcggugcaggcccucacagaccuggggcugauuuacaccgcuaaguauccgaacucuuccgaccucgaucgccugagccaaucccaucccauccuuaauaugaucgacacgaaaaagucuagccugaacauuuccggcuacaauuuuagccucggggccgcugucaaagccggagcgugcaugcuggauggcggcaacaugcuugagaccaucaagguuucuccucagacaauggacgggauucugaaauccauccucaaggugaaaagaagccugggaauguucgugucugaugcccccggcgaacggaacccuuaugagaauauucuguacaagaucugucucagcggggacggauggcccuauauugcuucccgcaccucuaucaucggcagagccugggaaaacacagucguggaucuggagagcgacaauaagccucagaaacuugggaacuccggaagcaaucggucucugcaguccgcuggcuacccggccggccucaccuacagccaacugaugacgcugaaggauucuaugcuucagcucgaccccaacgccaaaacauggauggauguugaggggagaccugacgaccccguggaaauugcucuguaucagccuuccagcggaugcuacauccacuuuuuccgcgagcccaccgaucugaagcaguuuaaacaagacgcgaaguauucccauggcauugaugucggggaccucuucgccgcucagccgggacugacaucugccgugaucgaagcccuuccucggaauaugguuauuaccugucagggcagcgaggauaucaagaaacugcucgaaucccaggggagaaaggacaucaaacugguggauauuucuaugagcaagcuggacucccgcaaauuugagaacgcugucugggaucaauacaaggaccuuugccacaugcauaccggcaucguggucgagaagaaaaagcggggaggcaaagaagagauuacaccccacugugcccucauggauugcaucauguucgacgcggcugugguugggggacuggaugccaagauucugagagccgugcucccucgcgacauggucuuucggacgagcacccccaaagugguucuguga

SEQ ID NO: 9106 - RNA, 1710 nt, Artificial Sequence
  derived and/or modified CDS sequence (opt5) from LASV(Lassa virus/H.sapiens-wt/NGA/2015/ISTH_0821;Clade II)__AVO03642__NP
augagcgccuccaaggaggugaaaucuuuccuguggacccagagccucagacgggaacuguccggcuacugcucuaacaucaaacuucaagucguuaaggacgcucaggcccugcuccacgggcuggauuuuagcgagguguccaaugugcagcgccuuaugagaaagcagaaacgggacgauucugaccugaagcgccucagagaucugaaccaagcggucaauaaccugguggaacucaagagcacacagcagaaauccauucugcggguuggaacgcuuaccagcgacgaucugcucacacuggcugccgaccuugagaagcugaaaucuaaggugauccgcaccgaaagaccccucuccagcggcgucuauauggggaaucugucuacacagcaacuggagcagcggcgcgcccuccugaacaugauuggaauggugggcggggcucagggaacccagccuggcagagauggcguugugcgggucugggacgugaaaaauccggaucuucugaacaaucaauucgggacaaugcccucccucacccuggccugucuuacgaagcagggacagguggaccugaacgaugcuguccucgcccugaccgaccugggccucaucuacacagcgaaguauccuaauagcucugaccuggaucgccuuucccaaagccaucccauucugaacaugguugacaccaaaaaguccucucucaauaucagcggguacaacuuuucccugggagccgcugugaaagccggcgcuugcaugcuugaugggggaaauaugcuggagacaaucaaggugaccccucagacgauggacggcauucucaaaagcauccugaaggucaaaagaucucugggcauguucguguccgauacacccggggaacggaacccuuaugagaacauucucuacaagaucugucugagcggagacggcuggccguauauugccucucgcaccagcaucguugggagagcgugggaaaauacaaccguggaucuugaguccgacggaaagccccagaaagucggcauugccgggucuaacaagagccugcaguccgcuggauuuccuaccggccucacauacagccaacugaugacgcugaaagauucuaugaugcagcuugaccccuccgccaagaccuggaucgauaucgagggccggccugaagaccccguggagauugcucucuaccagccgaugagcgggugcuauauccacuucuuuagagaaccuacagaccugaaacaguucaagcaagaugccaaguacucucauggaauugacguugccgaucuguuucccgcucagccuggccucaccuccgcggugaucgaggcccugccccgcaauaugguccuuacaugucaggggagcgacgauauuaaaaagcugcucgacucccagggacggaaagauaucaagcugaucgacauugcucugucuaaaguggauagcagacgcuucgaaaacgccgucugggaccaaugcaaggaucuuugucacaugcauaccggcgugguuguggagaagaaaaagagagggggcaaagaggaaaucacgccccacugcgcccucauggacuguauuauguaugaugcugccgucuccggaggccugaauaucccugugcugcgggcgguucucccgcgcgacaugguguuucggacaucuagccccaaggucgugcuguga

SEQ ID NO: 9107 - RNA, 1710 nt, Artificial Sequence
  derived and/or modified CDS sequence (opt5) from LASV(Lassa virus/H.sapiens-wt/NGA/2015/ISTH_0831;Clade II)__AVO03546__NP
augagcgccuccaaggaggugaaaucuuuccuguggacccagagccucagacgggaacuggcuggcuacugcuccaacaucaaacuucaagucguuaaggacgcccaggcgcugcuccacgggcuggauuuuucugaggugagcaaugugcagcgccuuaugagaaagcagaaacgggacgauuccgaccugaagcgccucagagaucugaaccaagcugucaauaaccugguggaacucaagucuacacagcagaaaagcauucugcggguuggaacgcuuuccagcgacgaucugcucacccuggccgccgaccuugagaagcugaaaucuaaggugauccgcacagaaagaccccucuccagcggcgucuauauggggaaucugucuacccagcaacuggaucagcggcgcgcucuccugaacaugauuggaauggugggcgggucccagggaacaagcgccggcagagacggcaucguucgggugugggauguccgcaauccugagcuucugaacaaucaguucgggaccaugccgucucucacacuggcuugucuuaccaaacaaggacagguggaccugaacgaugccgugcaggcgcucacggaccugggccugauuuacaccgccaaguaucccaauuccagcgaccucgauagacugucccaaucucauccuauccuuaacaugaucgacacaaagaaaagcuccauuaauaucagcggguacaacuuuucucugggagcugccgucaaggcuggcgccugcaugcucgaugggggaaauaugcuggagaccauuaaaguuagcccccaguccauggacggcauccuuaagucuauucugaaagugaagcggagccucggcauguucguguccgauacaccuggggaacgcaaccccuaugagaacauccuguacaaaauuugucugucuggagacggcuggccuuauaucgcgagcagaaccuccaucacggggcgggccugggaaaauacagucguggaucucgagagcgacaacaagccgaagaaacccggaaauaacgagucuaauagaucccugcagagcgcuggcuuuccugccgggcuuaccuacucucagcugaugacacucaaggauuccaugcugcaacuggaccccaacgcuaaaaccuggauggauauugaaggacgcccugacgaccccguugagaucgcccuuuaccagccgaauagcggcugcuauauucacuucuuucgggaaccuaccgaucucaagcaguucaaacaggacgccaaguacucccauggcaucgauauuucugaccuguuugcugcgcaacccgggcugacaagcgccgugaucgaggcucucccuagaaacauggucaucacgugucagggauccgaagauauuaagaaacugcuugagucucagggccgcaaggacauccggcugguggauauuagccucuccaaagccgacagcagaaaguucgagaaugccguuugggaucaguauaaagaccugugccacaugcauaccgggaucguggucgaaaagaagaaaaagggaggcaaagaggaaauuacaccccacugugcucugauggauugcaucauguuugacgccgcggugaugaacgggcuugaugcucgcguccuccgggccgugcugcccagagacaugguuuuccgcaccucuacaccucgggugguccuguga

SEQ ID NO: 9108 - RNA, 1710 nt, Artificial Sequence
  derived and/or modified CDS sequence (opt5) from LASV(Lassa virus/H.sapiens-wt/NGA/2016/ISTH_0009;Clade II)__AVO03572__NP
augagcgccuccaaggaggugaaaucuuuccuguggacccagagccucagacgggaacuguccggcuacugcucuaacaucaaacuucaagucguuaaggacgcucaggcccugcuccacgggcuggauuuuagcgagguguccaaugugcagcgccuuaugagaaagcagaaacgggacgauucugaccugaagcgccucagagaucugaaccaagcggucaauaaccugguggaacucaagagcacacagcagaaauccauucugcggguuggaacgcuuaccagcgacgaucugcucacacuggcugccgaccuugagaagcugaaaucuaaggugauccgcaccgaaagaccccucuccagcggcgucuauauggggaaucugucuacacagcaacuggagcagcggcgcgcccuccugaacaugauuggaauggugggcggggcucagggaacccagccuggcagagauggcguugugcgggucugggacgugaaaaauccggaucuucugaacaaucaauucgggacaaugcccucccucacccuggccugucuuacgaagcagggacagguggaccugaacgaugcuguccucgcccugaccgaccugggccucaucuacacagcgaaguauccuaauagcucugaccuggaucgccuuucccaaagccaucccauucugaacaugguugacaccaaaaaguccucucucaauaucagcggguacaacuuuucccugggagccgcugugaaagccggcgcuugcaugcuugaugggggaaauaugcuggagacaaucaaggugaccccucagacgauggacggcauucucaaaagcauccugaaggucaaaaagucucugggcauguucguguccgauacacccggggaaagaaacccuuaugagaacauucucuacaagaucugucugagcggagacggcuggccguauauugccucucggaccagcaucguugggcgcgcgugggaaaauacaaccguggaucuugaguccgacggaaaaccccagaaggucggcucugccgggagcaacaaaucccugcagagcgcuggauuuccuaccggccucacauacucucaacugaugacgcugaaggauuccaugaugcagcuugaccccagcgccaaaaccuggauugauaucgagggcagaccugaagaccccguggagaucgcucucuaccagccgaugucugggugcuauauucacuucuuucgggaaccuacagaccugaagcaguucaagcaagaugccaaauacucccauggaaucgacguugccgaucuguuucccgcucagccuggccucaccagcgcggugauugaggcccugcccagaaauaugguccuuacaugucagggguccgacgauaucaagcgccugcucgacucucagggacggagagauauuaaacugaucgacaucgcucugagcaaggccgauucccgccgguucgaaaacgccgugugggaccaaugcaaagaucuuugucacaugcauaccggcgucgugguugagaagaagaaaagagggggcaaggaggaaauuacgccccacugcgcucucauggacuguaucauguaugaugccgcggugucuggaggccugaauauuccuguccugcgcgcugugcucccgcgggacaugguuuuuagaacaagcucccccaaagugguccuguga

SEQ ID NO: 9109 - RNA, 1710 nt, Artificial Sequence
  derived and/or modified CDS sequence (opt5) from LASV(Lassa virus/H.sapiens-wt/NGA/2016/ISTH_0017;Clade II)__AVO03568__NP
augagcgccuccaaggaggugaaaucuuuccuguggacccagagccucagacgggaacuguccggcuacugcucuagcaucaaacuucaagucguuaaggacgcucaggcccugcuccacgggcuggauuuuuccgaggugucuaacgugcagcgccuuaugagaaagcagaaacgggacgauagcgaccugaagcgccucagagaucugaaucaagcggucaacaaucugguggaacucaaguccacacagcagaaaagcauucugcggguuggaacgcuuaccucugacgaucugcucacacuggcugccgaccuugagaagcugaaauccaaggugauccgcaccgaaagaccccucagcucuggcgucuauauggggaaccuguccacacagcaacuggagcagcggcgcgcccuccugaauaugauuggaauggcuggcggggcccagggaacccagccuggcagagauggcgugguucgggugugggacgucaaaaacccggaucuucugaauaaccaauucgggacaaugcccagccucacccuggcuugucuuacgaagcagggacagguggaccugaaugaugccgugcucgcgcugaccgaccugggccucaucuacacagccaaguauccuaacucuuccgaccuggaucgccuuagccaaucccaucccauucugaauauggucgacaccaaaaagucuagccucaacaucuccggguacaauuuuagccugggagcugccguuaaagcuggcgccugcaugcuugaugggggaaacaugcuggagacaaucaaggugaccccucagacgauggacggcauucucaaaucuauccugaaggugaaaagaucccugggcauguucgucagcgaugcgcccggggaacggaauccuuaugagaacauucucuacaagaucugucugucuggagacggcuggccguauauugccagccgcacauccaucguggggagagcuugggaaaacaccacaguugaucuugagucugacggaaagccccagaaagugggcgccaccgggagcaauaagucccugcagagcgcuggauuuccuaccggccucacauacucucaacugaugacgcugaaagauuccaugaugcagcuugaccccagcgccaagaccuggauugauaucgagggccggccugaagaccccgucgagguggcccucuaccagccgguuucugggugcuauauccacuucuuuagagaaccuacagaccugaaacaguucaagcaagaugcuaaguacucccauggaauugacguggcggaucuguuucccgcccagccuggccucaccagcgcugucaucgaggcccugccccgcaacauggugcuuacaugucagggguccgacgauauuaaaaagcugcucgacucucagggacggaaagauaucaagcugauugacaucgcccugagcaaagcugauuccagacgcuucgaaaaugccgucugggaccaaugcaaggaucuuugucacaugcauaccggcgugguuguggagaagaaaaagagagggggcaaagaggaaaucacgccccacugcgcgcucauggacuguauuauguaugaugcugccgucucuggaggccugaacaucccugugcugcgggccguucucccgcgcgacaugguguuucggacaagcucccccaaggucgugcuguga

SEQ ID NO: 9110 - RNA, 1710 nt, Artificial Sequence
  derived and/or modified CDS sequence (opt5) from LASV(Lassa virus/H.sapiens-wt/NGA/2016/ISTH_0035;Clade II)__AVO03620__NP
augagcgccuccaaggaggugaaaucuuuccuguggacccagagccucagacgggaacuguccggcuacugcucuagcaucaaacuucaagucguuaaggacgcucaggcccugcuccacgggcuggauuuuuccgaggugucuaacgugcagcgccuuaugagaaagcagaaacgggacgauagcgaccugaagcgccucagagaucugaaucaagcggucaacaaucugguggaacucaaguccacacagcagaaaagcauucugcggguuggaacgcuuaccucugacgaucugcucacacuggcugccgaccuugagaagcugaaauccaaggugauccgcaccgaaagaccccucagcucuggcgucuauauggggaaccuguccagccagcaacuggagcagcggcgcgcccuccugaauaugauuggaauggugggcggggcucagggaacacagccuggcagagauggcguugugcgggucugggacgugaaaaacccggaucuucugaauaaccaauucgggaccaugcccucucucacacuggccugucuuaccaagcagggacagguggaccugaaugaugcuguccucgcccugacggaccugggccucaucuacaccgcgaaguauccuaacuccagcgaccuggaucgccuuucccaaucucaucccauucugaauaugguugacaccaaaaagagcucccucaacaucagcggguacaauuuuucucugggagccgcugugaaagccggcgcuugcaugcuugaugggggaaacaugcuggagaccaucaaggugacaccucagaccauggacggcauucucaaauccauccugaaggucaaaagaagccugggcauguucgugucugauacgcccggggaacggaauccuuaugagaacauucucuacaagaucugucugagcggagacggcuggccguauauugccucccgcacaucuaucguugggagagcgugggaaaacaccacaguggaucuugagagcgacggaaagccccagaaagucggcuccgccgggagcaauaagucucugcaguccgcuggauuuccuaccggccucaccuacagccaacugaugacacugaaagauucuaugaugcagcuugaccccuccgccaagacguggauugauaucgagggccggccugaagaccccguggagaucgcucucuaccagccgauuagcgggugcuauauccacuucuuuagagaaccuaccgaccugaaacaguucaagcaagaugccaaguacucccauggaauugacguugccgaucuguuucccgcucagccuggccucacaucugcggugaucgaggcccugccccgcaacaugguccuuaccugucaggggagcgacgauauuaaacggcugcucgacucccagggaagacgcgauaucaagcugaucgacauugcucugucuaaagccgauagccggagauucgaaaaugccgugugggaccaaugcaaggaucuuugucacaugcauacaggcgucgugguugagaaaaagaagcgcgggggcaaagaggaaaucacaccccacugcgcucucauggacuguauuauguaugaugccgcgguguccggaggccugaacaucccuguccugcgggcugugcucccgagagacaugguuuuucgcacgagcucucccaaggugguccuguga

SEQ ID NO: 9111 - RNA, 1710 nt, Artificial Sequence
  derived and/or modified CDS sequence (opt5) from LASV(Lassa virus/H.sapiens-wt/NGA/2016/ISTH_0104;Clade II)__AVO03632__NP
augagcgccuccaaggaggugaaaucuuuccuguggacccagagccucagacgggaacuguccggcuacugcucuaacaucaaacuucaagucguuaaggacgcucaggcccugcuccacgggcuggauuuuagcgagguguccaaugugcagcgccuuaugagaaagcagaaacgggacgauucugaccugaagcgccucagagaucugaaccaagcggucaauaaccugguggaacucaagagcacacagcagaaauccauucugcggguuggaacgcuuaccagcgacgaucugcucacacuggcugccgaccuugagaagcugaaaucuaaggugauccgcaccgaaagaccccucuccagcggcgucuauauggggaaucugucuacacagcaacuggagcagcggcgcgcccuccugaacaugauuggaauggugggcgggacccaguccacacagccuggaagagauggcguugugcgggucugggacgugaaaaauccggaucuucugaacaaucaauucggcaccaugcccagccucacgcuggcuugucuuaccaagcagggacagguggaccugaacgaugccguccucgcucugacagaccugggacucaucuacaccgccaaguauccuaauucuuccgaccuggaucgccuuagccaaucccaucccauucugaacaugguugacaccaaaaagucuagccucaauaucuccggcuacaacuuuagccugggggcggccgugaaagcuggagccugcaugcuugauggcgggaauaugcuggagaccaucaaggugacgccucagacaauggacgggauucucaaaucuauccugaaggucaaaagaucccugggcauguucgugagcgauacccccggcgaacggaacccuuaugagaacauucucuacaagaucugucugucuggggacggauggccguauauugcuagccgcacauccaucguuggcagagccugggaaaauaccaccguggaucuugagucugacgggaagccccagaaagucggaacaacgggcagcaacaagucccugcagagcgcgggguuuccuaccggacucacauacucucaacugaugacccugaaagauuccaugaugcagcuugaccccagcgccaagacauggauugauaucgagggccggccugaagaccccguggagaucgcucucuaccagccgaugucuggcugcuauauucacuucuuuagagaaccuaccgaccugaaacaguucaagcaagaugccaaguacucccaugggaucgacguugcugaucuguuucccgcccagccuggacucacgagcgccgugauugaggcucugccccgcaauaugguccuuacaugucagggcuccgacgauaucaaaaagcugcucgacucucaggggcggagagauauuaaacugaucgacaucagccuguccaaggcggauucucgcaaauucgaaaacgccgugugggaccaaugcaaggaucuuugucacaugcauaccggagucgugguugagaagaaaaagcggggcgggaaagaggaaauuacaccccacugcgcucucauggacuguaucauguuugaugccgccgugagcggcggacugaauauuccuguccugagagcugugcucccgcgcgacaugguuuuccggacauccagccccaaggugguccuguga

SEQ ID NO: 9112 - RNA, 1710 nt, Artificial Sequence
  derived and/or modified CDS sequence (opt5) from LASV(Lassa virus/H.sapiens-wt/NGA/2016/ISTH_0133;Clade II)__AVO03636__NP
augagcgccuccaaggaggugaaaucuuuccuguggacccagagccucagacgggaacuguccggcuacugcucuaacaucaaacuucaagucguuaaggacgcucaggcccugcuccacgggcuggauuuuagcgagguguccaaugugcagcgccuuaugagaaagcagaaacgggacgauucugaccugaagcgccucagagaucugaaccaagcggucaauaaccugguggaacucaagagcacacagcagaaauccauucugcggguuggaacgcuuaccagcgacgaucugcucacacuggcugccgaccuugagaagcugaaaucuaaggugauccgcaccgaaagaccccucuccagcggcgucuauauggggaaucugucugcccagcaacuggagcagcggcgcgcucuccugaacaugauuggaauggugggcgggacacagggaacccagccuggcagagauggcguugugcgggucugggacgugaaaaauccggaucuucugaacaaucaauucgggacaaugcccucccucacccuggccugucuuacgaagcagggacagguggaccugaacgaugcuguccucgcccugaccgaccugggccucaucuacacagcgaaguauccuaaugccagcgaccuggaucgccuuucucaaucccaucccauucugaacaugguugacaccaaaaagagcucccucaauaucucuggguacaacuuuagccugggagcugccgugaaagcuggcgccugcaugcuugaugggggaaauaugcuggagacaaucaaggugaccccucagacgauggacggcauucucaaauccguccugaaggugaaaaagagccugggcauguucguuucugauacacccggggaaagaaacccuuaugagaacauccucuacaagauuugucuguccggagacggcuggccguauaucgcgagccggaccucuauuguggggcgcgccugggaaaauacaaccgucgaucuugagagcgacggaaaaccccagaagaucggcccugcuggguccaacaaaucucugcagagcgccggauuucccgcuggccucaccuacucccaacugaugacacugaaggauagcaugaugcagcuugacccuucugccaaaacguggauugauaucgagggcagacccgaagacccgguggagaucgcccucuaccagccuauguccgggugcuauauucacuucuuucgggaacccaccgaccugaagcaguucaagcaagaugcuaaauacagccauggaaucgacguuacagaucuguuuucugcgcagccuggccucaccuccgccgugauugaggcucugcccagaaauaugguccuuacaugucaggggagcgacgauaucaagcgccugcucgacucccagggacggagagauauuaaacugaucgacaucucucugagcaagguggauucccgccgguucgaaaacgccgucugggaccaaugcaaagaucuuugucacaugcauaccggcgugguuguggagaagaagaaaagagggggcaaggaggaaauuacgccccacugcgcccucauggacuguaucauguaugaugcugccgucucuggaggccugaauauuccugugcugcgcgcgguucucccgcgggacaugguguuuagaacaagcucccccaaagucgugcuguga

SEQ ID NO: 9113 - RNA, 1710 nt, Artificial Sequence
  derived and/or modified CDS sequence (opt5) from LASV(Lassa virus/H.sapiens-wt/NGA/2016/ISTH_0146;Clade II)__AVO03634__NP
augagcgccuccaaggaggugaaaucuuuccuguggacccagagccucagacgggaacuguccggcuacugcucuaacaucaaacuucaagucguuaaagacgcucaggcccugcuccacgggcuggauuuuagcgagguguccaaugugcagcgccuuaugagaaagcagaaacgggacgauucugaccugaagcgccucagagaucugaaccaagcggucaauaaccugguggaacucaagagcacacagcagaaauccauucugcggguuggaacgcuuaccagcgacgaucugcucacacuggcugccgaccuugagaagcugaaaucuaaggugauccgcaccgaaagaccccucuccagcggcgucuauauggggaaucugucugcccagcaacuggagcagcggcgcgcucuccugaacaugauuggaauggccggcggggcucaguccacacagccuggaagagauggcgugguucgggugugggacgucaaaaauccggaucuucugaacaaucaauucggcaccaugcccagccucacacuggccugucuuaccaagcagggacagguggaccugaacgaugcggugcucgcccugacggaccuggggcucaucuacaccgcuaaguauccuaauucuuccgaccuggaucgccuuagccaaucccaucccauucugaacauggucgacacaaagaagucuagccucaauaucuccggcuacaacuuuagccugggggccgcuguuaaagccggagcgugcaugcuugauggcgggaauaugcuggagaccaucaagauuacaccucagaccauggacggaauccucaaaucuauucugaaggugaaaagaucccugggcauguucgugagcgauacgcccggcgaacggaacccuuaugagaacauccucuacaagauuugucugucuggggacggauggccguauaucgccagccgcacauccauugucggcagagcuugggaaaauaccacaguggaucuugagucugacgggaagccccagaaaguuggaaccaucggcagcaacaagucccugcagagcgccggguuuccuaccggacucacauacucucaacugaugacgcugaaagauuccaugaugcagcuugaccccagcgcuaagaccuggaucgauauugagggccggccugaagaccccguggagaucgcccucuaccagccgaugucuggcugcuauauucacuucuuuagagaaccuacagaccugaaacaguucaagcaagaugccaaguacucccaugggaucgacgucgcugaucuguuucccgcgcagccuggacucaccagcgccgugauugaggcucugccccgcaauaugguucuuacaugucagggcuccgacgauaucaaacggcugcucgacucucaggggagacgcgauaucaagcugauugacaucgcccugagcaaagccgauucccggagauucgaaaacgcugugugggaccaaugcaaggaucuuugucacaugcauaccggagucguggucgagaaaaagaagcgcggcgggaaagaggaaauuacgccccacugcgcccucauggacuguaucauguaugaugcggcugugucuggcggacugaauauuccuguucugcgggccgugcucccgagagacauggucuuucgcacaagcucccccaaggugguucuguga

SEQ ID NO: 9114 - RNA, 1710 nt, Artificial Sequence
  derived and/or modified CDS sequence (opt5) from LASV(Lassa virus/H.sapiens-wt/NGA/2016/ISTH_0187;Clade II)__AVO03550__NP
augagcguguccaaggaggucaaaucuuuccuguggacccagagccucagacgggaacuguccggcuacugcucuaacaucaaacuucaaguugugaaggacgcccaggcucugcuccacgggcuggauuuuagcgagguguccaauguccagcgccuuaugagaaagcagcggcgcgacgauggagaccugaaaagacuccgggaucugaaccaagccgugaauaaccugguugaacucaagucuacacagcaaaagagcgugcugcgcgucggcacgcuuuccagcgacgaucugcucgugcuggcggcugaccuugagaaacugaagucuaaaguuauuagaaccgaacggccccucuccagcgggguguauaugggaaaucugucuucccagcagcuggaucagcgcagagcccuccugaacaugaucggcaugacagggggaaaucggggcggcagcgccucuuccgacgggauuguccgcgugugggaugugaagaacgcugagcuucugaauaaccaguucggaaccaugccuagccucacacuggccugucuuaccaaacagggccaagucgaccugaaugaugcuguucaggcccucacagaccuggggcugaucuacaccgcgaaguauccgaacuccucugaccucgauagacuggcccagagccaucccauucuuaauaugaucgacacgaagaaauccagccugaacaucucuggauacaauuuuucccucggcgcugccgugaaggcuggggccugcaugcuggauggaggcaacaugcuugagaccauuaaagugagcccucaaacaaucgacggcauucugaagaccauccucaaagucaagaaaucucuggggauguucauuagcgaugugcccggagaacggaacccuuaugagaauauccuguacaagauuugucucuccggcgacggguggcccuauaucgcgucucgcacaagcaucguuggcagagccugggaaaacaccguggucgaucuggaguccgacaauaagccucagaaaacgggaaacgggggaagcaauaagucucuucaguccgcuggcuuugccgcuggccugacauacagccagcucaugacccugaaagauucuaugcugcaacuugacccgaacuccaagacauggauggauauugaggggcggcccgaagacccuguggagaucgcccucuaccagcccagcuccggaugcuauauucacuucuuuagagaaccuaccgaccugaaacaguucaagcaggaugccaaguacucucauggcaucgacguuaccgaucuguuugcugcgcaacccgggcucacaagcgccgugauugaggcucugccgcgcaauauggucaucacgugucagggauccgaagacauccggaaacuucuggagucucagggcagacgcgauauuaagcucaucgacauuagccugaacaaagccgauucccggaaguucgagaaugccgugugggaccaguuuaaagaucugugccacaugcauaccggggucgugguugaaaagaagaaaagaggcggaaaggaggaaaucacaccucacugugcucuuauggacugcauuauguucgaugccgcggugagcggcgggcucgacaccaaaguccugcgcgcugugcugccccgggauaugguuuuuagaacaucuaccccuaaggugguccucuga

SEQ ID NO: 9115 - RNA, 1710 nt, Artificial Sequence
  derived and/or modified CDS sequence (opt5) from LASV(Lassa virus/H.sapiens-wt/NGA/2016/ISTH_0419;Clade II)__AVO03540__NP
augagcgccuccaaggaggugaaaucuuuccuguggacccagagccucagacgggaacuguccggcuacugcucuaacaucaagcugcaagucguuaaagacgcucaggcccugcuccacgggcuggauuuuagcgagguguccaaugugcagcgccuuaugagaaagcagaaacgggacgauggagaccugaagcgccucagagaucugaaccaagcggucaauaaccugguggaacucaagucuacacagcagaaaagcguucugcgggugggcacgcuuuccagcgacgaucugcucacccuggcugccgaccuugagaagcugaaaucuaaggucauucgcacagaaagaccccucuccagcgggguguauaugggaaaucugucuucccagcaacuggaucagcggcgcgcccuccugaacaugaucggcaugaccgggggaggccagggcgcuagcgccgggagagacggaauuguucgggugugggaugucaaaaaugcugagcuucugaacaaucaguucggcacaaugccuucucucacccuggccugucuuacaaagcaaggacagguggaccugaacgaugcggugcaggcccucaccgaccuggggcugaucuacacggcuaaguaucccaauuccagcgaccucgaucgccugucccaaucucauccgauucuuaacaugaucgacaccaaaaagagcucccugaauaucagcggcuacaacuuuucucucggggccgcugucaaagccggagcgugcaugcuggauggcggcaauaugcuugagacaauuagaguuuccccucagaccauggacgggauccuuaagagcauucucaaagugaagcggucucugggaauguucgugagcgauauccccggcgaacgcaacccuuaugagaacauucuguacaaaaucugucucuccggggacggauggcccuauauugccucuagaacaagcaucaccggccgggcuugggaaaauacgaucgucgaucuggaguccgacagcagaccucagaagccggggaacucuggauccaaucgcagccuucagucugccggcuuucccgcuggccugacauacucccaacucaugacccugaaggauagcaugcugcagcuugacccuaacgccaaaacauggauggauauugaggggcggcccgacgacccuguggaaaucgcccucuaccagcccuccucuggaugcuauauucacuucuuuagagagccgaccgaucugaagcaguucaaacaagacgcuaaguacagccauggcaucgauguuggggaccuguuuaccgcgcagccuggacucacauccgccgugcuggaagcccuuccccgcaauauggucauuacgugucagggcucugaggauaucaaaaagcugcucgaaagccaggggcggaaggacaucaaacugguggauauuuccaugagcaagccugacucuagaaaauucgagaacgcuguuugggaucaauauaaggaccugugccacaugcauaccggcaucguggucgagaaaaagaagcgcggaggcaaagaagagauuacaccccacugugcccuuauggauugcaucauguuugacgcugccguggucgggggacucgaugcgaagauucugcgggcugugcugcccagagacaugguuuuccgcaccuccacaccuaaagugguccucuga

SEQ ID NO: 9116 - RNA, 1710 nt, Artificial Sequence
  derived and/or modified CDS sequence (opt5) from LASV(Lassa virus/H.sapiens-wt/NGA/2016/ISTH_0447;Clade II)__AVO03560__NP
augagcgccuccaaggaggugagaucuuuccuguggacccagagccuccggcgcgaacuguccggcuacugcucuagcaucaaacuucaagucguuaaggacgcucaggcccugcuccacgggcuggauuuuuccgaggugucuaacgugcagagacuuaugcggaaacagaagcgcgacgauagcgaccugaaaagacuccgggaucugaaucaagcggucaacaaucugguggaacucaaguccacacagcaaaagagcauucugcgcguuggaacgcuuaccucugacgaucugcucacacuggcugccgaccuugagaaacugaaguccaaagugaucagaaccgaacggccccucagcucuggcgucuauauggggaaccuguccagccagcagcuggagcagcgcagagcccuccugaauaugauuggaauggugggcggggcucagggaacacagccuggccgggauggcguugugcgcgucugggacgugaagaacccggaucuucugaauaaccaauucgggaccaugcccucucucacacuggccugucuuaccaaacagggacagguggaccugaaugaugcuguccucgcccugacggaccugggccucaucuacaccgcgaaguauccuaacuccagcgaccuggauagacuuucccaaucucaucccauucugaauaugguugacacaaagaaaagcucccucaacaucagcggguacaauuuuucucugggagccgcugugaaggccggcgcuugcaugcuugaugggggaaacaugcuggagaccaucaaagugacaccucagaccauggacggcauucucaaguccauccugaaagucaagcggagccugggcauguucgugucugauacgcccggggaacgcaauccuuaugagaacauucucuacaaaaucugucugagcggagacggcuggccguauauugccuccagaacaucuaucguugggcgggcgugggaaaacaccacaguggaucuugagagcgacggaaagccccagaaggucggcgccgcuggguccaccaaaagccugcagucugccggauuuccuaccggccucacauacucccaacugaugacgcugaaggauagcaugaugcagcuugaccccucugcuaaaaccuggauugauaucgagggcagaccugaagaccccguggagaucgcccucuaccagccgauguccgggugcuauauucacuucuuucgcgaaccuacagaccugaagcaguucaaacaagaugccaaguacagccauggaaucgacguugcugaucuguuucccgcgcagccuggccucaccuccgccgugauugaggcucugccccggaauaugguccuuacaugucaggggucugacgauaucaagagacugcucgacagccagggacgccgggauauuaaacugaucgacaucgcccuguccaagguggauucuagacgcuucgaaaacgccgucugggaccaaugcaaagaucuuugucacaugcauaccggcgugguuguggagaagaaaaagagagggggcaaggaggaaauuacgccccacugcgcucucauggacuguaucauguaugaugccgcggucagcggaggccugaauauuccugugcugcgggcuguucucccgcgcgacaugguguuucggacauccagccccaaagucgugcuguga

SEQ ID NO: 9117 - RNA, 1710 nt, Artificial Sequence
  derived and/or modified CDS sequence (opt5) from LASV(Lassa virus/H.sapiens-wt/NGA/2016/ISTH_0543;Clade II)__AVO03596__NP
augagcgccuccaaggaggugaaaucuuuccuguggacccagagccucagacgggaacuguccggcuacugcucuaacaucaaacuucaagucguuaaggacgcucaggcccugcuccacgggcuggauuuuagcgagguguccaaugugcagcgccuuaugagaaagcagaaacgggacgauggagaccugaagcgccucagagaucugaaccaagcggucaauaaccugguggaacucaagucuacacagcagaaaagcguucugcgggugggcacgcuuaccuccgacgaucugcucauucuggcugccgaccuugagaagcugaaaagcaaggucauccgcacagaaagaccccucucuuccgggguguauaugggaaaucugagcacccagcaacuggagcagcggaaagcccuccugucuaugauuggcaugguugggggagcucagggcacacagccuggccgcgaugggguggucagagugugggacgugaagaacccggaucuucugaauaaccaauucggaaccaugcccucccucacacuggccugucuuaccaagcagggccaggucgaccugaaugaugcuguucucgcccugacggaccuggggcucaucuacaccgcgaaauauccuaacagcucugaccuggaucggcuuucccaaagccaucccauucugaauaugguggacacaaagaaauccucucucaacaucagcggauacaauuuuucccugggcgccgcugugaaggccggggcuugcaugcuugauggaggcaacaugcuggagaccaucaaagucacaccucagaccauggacggcauucucaagagcauccugaaagugaagcgcucucuggggauguucguuuccgauacgcccggagaaagaaauccuuaugagaacauucucuacaagaucugucugagcggcgacggguggccguauauugccucucggacaagcaucgugggacgcgcgugggaaaacaccacagucgaucuugaguccgacggcaaaccccagaagguggggaccgccggaucuaauaaaagccugcaguccgcuggcuuuccuaccggccucacauacagccaacugaugacgcugaaggauucuaugaugcagcuugaccccuccgccaaaaccuggauugauaucgaggggagaccugaagaccccguugagaucgcucucuaccagccgaugagcggaugcuauauucacuucuuucgggaaccuacagaccugaagcaguucaagcaagaugccaaauacucucauggcaucgacgugaccgaucuguuuuccgcccagcccgggcucacaagcgcugucauugaggcgcugccuagaaacauggugcuuaccugucagggauccgacgauaucaagaaacugcucgacucucagggccgccgggauauuaagcugaucgacaucagccuguccaaagccgauucuagacgcuucgaaaaugcugucugggaccaaugcaaggaucuuugucacaugcauacgggggugguuguggagaagaaaaagcggggcggaaaagaggaaauuacaccccacugcgcccucauggacuguaucauguuugaugccgcugucagcggcgggcugaacauucccauccugagagccgugcucccucgcgacaugguuuuccggaccuccagcccgaaggugguccuguga

SEQ ID NO: 9118 - RNA, 1710 nt, Artificial Sequence
  derived and/or modified CDS sequence (opt5) from LASV(Lassa virus/H.sapiens-wt/NGA/2016/ISTH_0565;Clade II)__AVO03638__NP
augagcgccuccaaggaggugaaaucuuuccuguggacccagagccucagacgggaacuguccggcuacugcucuaacaucaaacuucaagucguuaaggacgcucaggcccugcuccacgggcuggauuuuagcgagguguccaaugugcagcgccuuaugagaaagcagaaacgggacgauggagaccugaagcgccucagagaucugaaccaagcggucaauaaccugguggaacucaagucuacccagcagaaaagcguucugcgggugggcacgcuuaccuccgacgaucugcucacacuggcugccgaccuugagaagcugaaaagcaaggucauucgcaccgaaagaccccucucuuccgggguguauaugggaaaucugagcacacagcaacuggagcagcggaaagcccuccugucuaugaucggcaugguugggggagcucagggcacccagccuggccgcgaugggguggucagagugugggacgugaagaacccggaucuucugaauaaccaauucggaacaaugcccucccucacccuggccugucuuacgaagcagggccaggucgaccugaaugaugcuguucucgcccugaccgaccuggggcucauuuacacagcgaaauauccuaacagcucugaccuggaucggcuuucccaaagccaucccauccugaauaugguggacaccaagaaauccucucucaacauuagcggauacaauuuuucccugggcgccgcugugaaggccggggcuugcaugcuugauggaggcaacaugcuggagacaaucaaagucaccccucagacgauggacggcauccucaagagcauucugaaagugaagcgcucucuggggauguucguuuccgauacacccggagaaagaaauccuuaugagaacauccucuacaagauuugucugagcggcgacggguggccguauaucgccucucggaccagcauugugggacgcgcgugggaaaacacaaccgucgaucuugaguccgacggcaaaccccagaagguggggaccgccggaucuaauaaaagccugcaguccgcuggcuuuccuacaggccucacguacagccaacugaugacccugaaggauucuaugaugcagcuugaccccuccgccaaaacauggaucgauauugaggggagaccugaagaccccguugagaucgcucucuaccagccgaugagcggaugcuauauccacuucuuucgggaaccuaccgaccugaagcaguucaagcaagaugccaaauacucucauggcauugacgugacagaucuguuuuccgcccagcccgggcucaccagcgcugucaucgaggcgcugccuagaaacauggugcuuacgugucagggauccgacgauauuaagaaacugcucgacucucagggccgccgggauaucaagcugauugacaucagccuguccaaagccgauucuagacgcuucgaaaaugcugucugggaccaaugcaaggaucuuugucacaugcauacaggggugguuguggagaagaaaaagcggggcggaaaagaggaaaucacaccccacugcgcccucauggacuguauuauguuugaugccgcugucagcggcgggcugaacauccccauucugagagccgugcucccucgcgacaugguuuuccggaccuccagcccgaaggugguccuguga

SEQ ID NO: 9119 - RNA, 1710 nt, Artificial Sequence
  derived and/or modified CDS sequence (opt5) from LASV(Lassa virus/H.sapiens-wt/NGA/2016/ISTH_0610;Clade II)__AVO03586__NP
augagcgccuccaaggaggugaaaucuuuccuguggacccagagccucagacgggaacuguccggcuacugcucuaacaucaaacuucaagucguuaaagacgcucaggcccugcuccacgggcuggauuuuagcgagguguccaaugugcagcgccuuaugagaaagcagaaacgggacgauucugaccugaagcgccucagagaucugaaccaagcggucaauaaccugguggaacucaagagcacacagcagaaauccguucugcgggugggaacgcuuaccagcgacgaucugcucacacuggcugccgaccuugagaagcugaaaucuaaggucauucgcaccgaaagaccccucuccagcggcguguauauggggaaucugucugcccagcaacuggagcagcggcgcgcucuccugaacaugaucggaaugguuggcggggcccagggaacacagccuggcagagauggcgugguccgggugugggacgugaaaaauccggaucuucugaacaaucaauucgggaccaugcccucccucacacuggcuugucuuaccaagcagggacaggucgaccugaacgauguugugcucgcccugacggaccugggccucauuuacaccgcgaaguauccuaauagcucugaccuggaucgccuuucccaaagccaucccauccugaacaugguggacacaaagaaguccucucucaauauuagcggguacaacuuuucccugggagccgcugucaaagccggcgcuugcaugcuugaugggggaaauaugcuggagaccaucaaggugacaccucagaccauggacggcauccucaaaagcauucugaagguuaaaaagucucugggcauguucguguccgauacgcccggggaaagaaacccuuaugagaacauccucuacaagauuugucugagcggagacggcuggccguauaucgccucucggacaagcauuauggggcgcgcgugggaaaauaccacagucgaucuugaguccgacggaaaaccccagaaggugggcaccgccgggucuaacaaaagccugcaguccgcuggauuuccuaccggccucacauacagccaacugaugacgcugaaggauucuaugaugcagcuugaccccuccgccaaaaccuggaucgauauugagggcagaccugaagaccccguugagaucgcucucuaccagccgaugagcgggugcuauauccacuucuuucgggaaccuacagaccugaagcaguucaagcaagaugccaaauacucucauggaauugacgugaccgaucuguuuuccgcccagcccggccucacaagcgcugucaucgaggcgcugccuagaaauauggugcuuaccugucagggguccgacgauauuaagcgccugcucgacucucagggacggagagauaucaaacugauugacaucgcccugagcaaggcugauucccgccgguucgaaaacgccgucugggaccaaugcaaagaucuuugucacaugcauacgggcgugguuguggagaagaagaaaagagggggcaaggaggaaaucacaccccacugcgcccucauggacuguauuauguaugaugcugccgucucuggaggccugaauauccccgugcugcgcgcgguucucccucgggacaugguguuuagaaccagcuccccgaaagucgugcuguga

SEQ ID NO: 9120 - RNA, 1710 nt, Artificial Sequence
  derived and/or modified CDS sequence (opt5) from LASV(Lassa virus/H.sapiens-wt/NGA/2016/ISTH_0621;Clade II)__AVO03544__NP
augagcgccuccaaggaggugaaaucuuuccuguggacccagagccucagacgggaacuguccggcuacugcucuaacaucaaacuucaagucguuaaggacgcucaggcccugcuccacgggcuggauuuuagcgagguguccaaugugcagcgccuuaugagaaagcagaaacgggacgauggagaccugaagcgccucagagaucugaaccaagcggucaauaaccugguggaacucaagucuacacagcagaaaagcguucugcgggugggcacgcuuuccagcgacgaucugcucauucuggcugccgaccuugagaagcugaaaucuaaggucauccgcaccgaaagaccccucuccagcgggguguauaugggaaaucugucuucccagcaacuggaucagcggcgcgcccuccugaacaugauuggcaugacagggggaagccagggcaccaauacaggcagagacgggaucguucggauuugggaugugaaaaacgcugagcuucugaauaaccaguucggaaccaugccuucucucacacuggccugucuuaccaagcaaggccaggucgaccugaaugaugcugugcaggcccucacggaccuggggcugaucuacaccgcgaaguauccgaacuccagcgaccucgaucgccugucccaaucucaucccauccuuaauaugauugacaccaaaaagagcucccugaacaucagcggauacaauuuuucucucggcgccgcugugaaagccggggcuugcaugcuggauggaggcaacaugcuugagacaauuaaggucuccccucagacaauggacggcauccugaaaagcauucucaagguuaaaaagucucuggggauguucgugagcgauacccccggagaaagaaacccuuaugagaauauccuguacaagauuugucucuccggcgacggguggcccuauaucgccucucggacgagcaucacaggacgcgcgugggaaaacaccauuguggaucuggagacagacaauaaaucccagaagccuggcaacagcgggucuaauagaucccuucagagcgccggauuuccggcuggccugaccuacucucaacucaugacccugaaagauuccaugcugcagcuugaccccaacgccaagacauggauggauaucgagggccggccugacgaccccgucgaaauugcucucuaccagccuagcuccgggugcuauauccacuucuuuagagagcccacggaucugaaacaguucaagcaagacgccaaguacucucauggaauugaugugagcgaccuguuugccgcucagccgggccucaccuccgcgguuaucgaagcccugccucgcaauauggugaucacaugucaggggucugaggauauucggaaacuucuggaaagccagggaagacgcgacaucaagcucgucgauauuucccugagcaaaucugacucccggaaguucgagaacgugguuugggaucaauuuaaagaccugugccacaugcauaccggcguggucguggagaagaagaaaaagggcgggaaagaagagaucacaccccacugugcucuuauggauugcauuauguucgacgccgccgucaugggaggccucgaugcuagagugcugcgcgccguucugccucgggacaugguguuuagaaccagcacgcccaaggucgugcucuga

SEQ ID NO: 9121 - RNA, 1710 nt, Artificial Sequence
  derived and/or modified CDS sequence (opt5) from LASV(Lassa virus/H.sapiens-wt/NGA/2016/ISTH_0701;Clade II)__AVO03630__NP
augagcgccuccaaggaggugaaaucuuuccuguggacccagagccucagacgggaacuguccggcuacugcucuaacaucaaacuucaagucguuaaagacgcucaggcccugcuccacgggcuggauuuuagcgagguguccaaugugcagcgccuuaugagaaagcagaaacgggacgauucugaccugaagcgccucagagaucugaaccaagcggucaauaaccugguggaacucaagagcacacagcagaaauccauucugcggguuggaacgcuuaccagcgacgaucugcucauccuggcugccgaccuugagaagcugaaaucuaaggugauucgcacagaaagaccccucuccagcggcgucuauauggggaaucugucuacccagcaacuggagcagcggcgcgcccuccugaaccuuaucggaauggugggcggggcucagggaacacagccuggcagagauggcguugugcgggucugggacgugaaaaauccggaucugcucaacaaucaauucgggaccaugcccucccugacacuugccugucugaccaagcagggacagguggaccucaacgaugcuguccuggcccugacggaccucggccugauuuacaccgcgaaguauccuaauagcucugaccuugaucgccugucccaaagccaucccauccucaacaugguugacacaaagaaguccucucugaauaucagcggguuuaacuucucccuuggagccgcugugaaagccggcgcuugcaugcuggaugggggaaauaugcucgagaccauuaaggugacaccucagaccauggacggcauccugaaaagcauucugaaggucaaaagaucucucggcauguuuguguccgauacgcccggggaacggaacccuuacgagaacauccuguauaagauuugucuuagcggagacggcuggccguacaucgccucucgcacaagcauuguugggagagcgugggaaaauaccacaguggaucuggaguccgacggaaagccccacaaagucggcaccgccgggucuaacaagagccuccaguccgcuggauucccuaccggccugacauauagccagcugaugacgcuuaaagauucuaugaugcaacucgaccccuccgccaagaccuggaucgauaucgagggccggccugaagaccccguggagauugcucuguaccagccgaugagcgggugcuacauccacuuuuucagagaaccuacagaccugaaacaguuuaagcaggaugccaaguauucucauggaauugacguugccgaucucuuccccgcucaaccuggccugaccuccgcggugaucgaggcccuuccccgcaauaugguccugacaugucaggggagcgacgauauuaaacggcuccuggacucccagggaagacgcgauaucaagcugaucgacauugcucuuucuaaagccgauagccggagauuugaaaacgccgugugggaccagugcaaggaucucugucauaugcacaccggcgucgugguugagaaaaagaagcgcgggggcaaagaggaaaucacgccccacugcgcucugauggacuguauuauguacgaugccgcgguguccggaggccugaauaucccuguccuccgggcugugcugccgagagacaugguuuuccgcacaucuagccccaaggugguccuuuga

SEQ ID NO: 9122 - RNA, 1710 nt, Artificial Sequence
  derived and/or modified CDS sequence (opt5) from LASV(Lassa virus/H.sapiens-wt/NGA/2016/ISTH_0702;Clade II)__AVO03558__NP
augagcgccuccaaggaggugaaaucuuuccuguggacccagagccucagacgggaacuguccggcuacugcucuaacaucaaacuucaagucguuaaggacgcucaggcccugcuccacgggcuggauuuuagcgagguguccaaugugcagcgccuuaugagaaagcagaaacgggacgauucugaccugaagcgccucagagaucugaaccaagcggucaauaaccugguggaacucaagagcacacagcagaaauccauucugcggguuggaacgcuuaccagcgacgaucugcucacacuggcugccgaccuugagaagcugaaaucuaaggugauccgcaccgaaagaccccucuccagcggcgucuauauggggaaucugucuacacagcaacuggagcagcggcgcgcccuccuguccaugauuggaauggugggcgggacccagggaacacagccuggcagagauggcguugugcgggucugggacgugaaaaacccggaucuucugaauaaccaauucgggaccaugcccagccucacgcuggcuugucuuaccaagcagggacagguggaccugaaugaugccguccucgcucugacagaccugggccucaucuacaccgccaaguauccuaacucuuccgaccuggaucgccuuagccaaucccaucccauucugaauaugguugacaccaaaaagucuagccucaacaucuccggguacaauuuuagccugggagcggccgugaaagcuggcgccugcaugcuugaugggggaaacaugcuggagaccaucaaggugacgccucagacaauggacggcauucucaaaucuauccugaaggucaaaaagucccugggcauguucgugagcgauacccccggggaaagaaauccuuaugagaacauucucuacaagaucugucugucuggagacggcuggccguauauugcuagccggacauccaucguugggcgcgccugggaaaacaccaccguggaucuugagucugacggaaaaccccagaaggucggcacagcggggagcaauaaaucccugcagagcgccggauuuccuacgggccucaccuacucucaacugaugacacugaaggauuccaugaugcagcuugaccccagcgcuaaaaccuggauugauaucgagggcagaccugaagaccccguggagaucgcccucuaccagccgaugucugggugcuauauucacuucuuucgggaaccuacagaccugaagcaguucaagcaagaugcuaaauacucccauggaaucgacguugccgaucuguuucccgcccagccuggccucaccagcgcugugauugaggcgcugcccagaaacaugguccuuacgugucagggguccgacgauaucaagcgccugcucgacucucagggacggagagauauuaaacugaucgacaucagccuguccaaggccgauucucgccgguucgaaaaugcugugugggaccaaugcaaagaucuuugucacaugcauacaggcgucgugguugagaagaagaaaagagggggcaaggaggaaauuacaccccacugcgcccucauggacuguaucauguaugaugccgcugugagcggaggccugaacauuccuguccugcgcgccgugcucccgcgggacaugguuuuuagaaccuccagccccaaagugguccuguga

SEQ ID NO: 9123 - RNA, 1710 nt, Artificial Sequence
  derived and/or modified CDS sequence (opt5) from LASV(Lassa virus/H.sapiens-wt/NGA/2016/ISTH_0717;Clade II)__AVO03548__NP
augagcguguccaaggaggucaaaucuuuccuguggacccagagccucagacgggaacuguccggcuacugcucuaacaucaagguucaaguggugaaagacgcccaggcccuucugcacgggcucgauuuuagcgaggucuccaaugugcagcgccugaugagaaagcagaaacgggacgauggagaccuuaagcgccugagagaucucaaccaagcuguuaauaaccugguggaacugaagucuacacagcagaaaagcguccuccgggugggcacgcuguccagcgacgaucuucugguucucgcggcugaccuggagaaacuuaagucuaaggugauucgcaccgaaagaccccuguccagcgggaucuauaugggaaaucucucuucccagcaacuggaucagcggaaagcccugcucaacaugauuggcaugacagggggaaaugucggccgcaacaccacaggcgacgggguggugagagucugggauguuaagaaugccgagcugcuuaacaaucaguucggaaccaugccuagccugacacucgcuugucugaccaagcagggccaaguggaccuuaacgaugccgugcuggcucucacggaccuggggcugaucuacaccgccaaauaucccaauucuuccgaccucgaucggcuggcgcagagccauccgauucuuuccaugaucgacacaaagaaaucuagccugaacaucuccggauacaauuuuagccucggcgccgcugucaaggccggggcuugcaugcuggauggaggcaacaugcuugagaccauuaaagugucuccucagacaaucgacggcauucugaaguccauccucaaaguuaagcgcagccuggggauguucauuucugauacccccggagaaagaaacccuuaugagaauauccuguacaagauuugucucagcggcgacggguggcccuauaucgccucccggacgucuaucgugggacgcgcgugggaaaacacagucguggaucuggagagcgacaauaaaccucaaaagaccggcaacgggggauccaauaaaagccuucagucugccggcuuugcugccggccugacauacucccagcucaugacccugaaggauagcaugcugcagcuugacccgaacgcuaaaaccuggauggauauugaggggagacccgaagacccuguugagaucgcccucuaccaacccucuuccggaugcuauauucacuucuuucgggaaccuacagaccugaagcaguucaagcaggaugccaaauacagccauggcaucgacgugacggaucuguuugcugcgcagcccgggcucaccuccgccgucauugaggcucugccgagaaauauggugaucacaugucaaggaucugaagacauccgcaaacuucuggagagccagggccggagagauauuaagcucaucgacauuucccugucuaaggucgauagccgcaaauucgagaacgccgugugggaccaguuuaaggaucugugccacaugcauaccgggaucguuguggaaaagaaaaagcggggcggaaaagaggaaauuacaccucacugugcccuuauggacugcaucauguucgaugcugccgucuccggcgggguggacgcgaagguucucagagcugugcugccccgcgauauggucuuucggaccagcacgccuaaaguggugcuguga

SEQ ID NO: 9124 - RNA, 1710 nt, Artificial Sequence
  derived and/or modified CDS sequence (opt5) from LASV(Lassa virus/H.sapiens-wt/NGA/2016/ISTH_0753;Clade II)__AVO03610__NP
augagcgccuccaaggaggugaaaucuuuccuguggacccagagccucagacgggaacuguccggcuacugcucuagcaucaaacuucaagucguuaaggacgcucaggcccugcuccacgggcuggauuuuuccgaggugucuaacgugcagcgccuuaugagaaagcagaaacgggacgauagcgaccugaagcgccucagagaucugaaucaagcggucaacaaucugguggaacucaaguccacacagcagaaaagcauucugcggguuggaacgcuuaccucugacgaucugcucacacuggcugccgaccuugagaagcugaaauccaaggugauccgcaccgaaagaccccucagcucuggcgucuauauggggaaccuguccacacagcaacuggagcagcggcgcgcccuccugaauaugauuggaauggugggcggggcucagggaacccagccuggcagagauggcguugugcgggucugggacgugaaaaacccggaucuucugaauaaccaauucgggacaaugcccagccucacccuggccugucuuacgaagcagggacagguggaccugaaugaugcuguccucgcccugaccgaccugggccucaucuacacagcgaaguauccuaacucuuccgaccuggaucgccuuagccaaucccaucccauucugaauaugguugacaccaaaaagucuagccucaacaucuccggguacaauuuuagccugggagccgcugugaaagccggcgcuugcaugcuugaugggggaaacaugcuggagacaaucaaggugaccccucagacgauggacggcauucucaaaucuguccugaaggugaaaagaucccugggcauguucguuagcgauacacccggggaacggaauccuuaugagaacauccucuacaagauuugucugucuggagacggcuggccguauaucgccagccgcaccuccauuguggggagagcgugggaaaacacaaccgucgaucuugagucugacggaaagccccagaaagugggcgccgcugggagcaauaagucccugcagagcgccggauuuccuaccggccucacauacucucaacugaugacgcugaaagauuccaugaugcagcuugaccccagcgcuaagaccuggaucgauauugagggccggccugaagaccccguugagaucgcccucuaccagccgaugucugggugcuauauccacuucuuuagagaaccuacagaccugaaacaguucaagcaagaugccaaguacucccauggaauugacguggcugaucuguuucccgcgcagccuggccucaccagcgccgucaucgaggcucugccccgcaacauggugcuuacaugucagggguccgacgauauuaaacggcugcucgacucucagggaagacgcgauaucaagcugauugacaucgcccugagcaaagccgauucccggagauucgaaaaugcugucugggaccaaugcaaggaucuuugucacaugcauaccggcgugguuguggagaaaaagaagcgcgggggcaaagaggaaaucacgccccacugcgcccucauggacuguauuauguaugaugcggcugucucuggaggccugaacaucccugugcugcgggccguucucccgagagacaugguguuucgcacaagcucccccaaggucgugcuguga

SEQ ID NO: 9125 - RNA, 1710 nt, Artificial Sequence
  derived and/or modified CDS sequence (opt5) from LASV(Lassa virus/H.sapiens-wt/NGA/2016/ISTH_0759;Clade II)__AVO03594__NP
augagcgccuccaaggaggugaaaucuuuccuguggacccagagccucagacgggaacuguccggcuacugcucuagcaucaaacuucaagucguuaaagacgcucaggcccugcuccacgggcuggauuuuuccgaggugucuaacgugcagcgccuuaugagaaagcagaaacgggacgauagcgaccugaagcgccucagagaucugaaucaagcggucaacaaucugguggaacucaaguccacacagcagaaaagcauucugcggguuggaacgcuuaccucugacgaucugcucacacuggcugccgaccuugagaagcugaaauccaaggugacccgcacagaaagaccccucagcucuggcgucuauauggggaaccuguccacccagcaacuggagcagcggcgcgcccuccugaauaugaucggaauggugggcggggcucagggaacacagccuggcagagauggcguugugcgggucugggacgugaaaaacccggaucuucugaauaaccaauucgggaccaugcccagccucacgcuggccugucuuaccaagcagggacagguggaccugaaugaugcuguccucgcccugacagaccugggccucauuuacaccgcgaaguauccuaacucuuccgaccuggaucgccuuagccaaucccaucccauccugaauaugguugacacaaagaagucuagccucaacauuuccggguacaauuuuagccugggagccgcugugaaagccggcgcuugcaugcuugaugggggaaacaugcuggagaccaucaaggugacgccucagacaauggacggcauccucaaaucuauucugaaggucaaaagaucccugggcauguucgugagcgaugcccccggggaacggaauccuuaugagaacauccucuacaagauuugucugucuggagacggcuggccguauaucgcgagccgcaccuccauuguugggagagccugggaaaacacaaccguggaucuugagucugacggaaagccccagaaagucggcaccgcugggagcaauaagucccugcagagcgccggauuuccuacaggccucacguacucucaacugaugacccugaaagauuccaugaugcagcuugaccccagcgcuaagacauggaucgauauugagggccggccugaagaccccguggagaucgcccucuaccagccgaugucugggugcuauauccacuucuuuagagaaccuaccgaccugaaacaguucaagcaagaugccaaguacucccauggaauugacguugcugaucuguuucccgcgcagccuggccucacaagcgccgugaucgaggcucugccccgcaacaugguccuuaccugucagggguccgacgauauuaaaaagcugcucgacucucagggacggagagauaucaaacugauugacaucgcccugagccgcgccgauucccggagauucgaaaaugcugugugggaccaaugcaaggaucuuugucacaugcauacgggcgucgugguugagaaaaagaagcgcgggggcaaagaggaaaucacaccccacugcgcccucauggacuguauuauguaugaugcggcugugucuggaggccugaacaucccuguccugcgggccgugcucccgagagacaugguuuuucgcaccagcucccccaaggugguccuguga

SEQ ID NO: 9126 - RNA, 1710 nt, Artificial Sequence
  derived and/or modified CDS sequence (opt5) from LASV(Lassa virus/H.sapiens-wt/NGA/2016/ISTH_0777;Clade II)__AVO03616__NP
augagcgccuccaaggaggugaaaucuuuccuguggacccagagccucagacgggaacuguccggcuacugcucuaacaucaaacuucaagucguuaaggacgcucaggcccugcuccacgggcuggauuuuagcgagguguccaaugugcagcgccuuaugagaaagcagaaacgggacgauggagaccugaagcgccucagagaucugaaccaagcggucaauaaccugguggaacucaagucuacacagcagaaaagcguucugcgggugggcacgcuuaccuccgacgaucugcucacacuggcugccgaccuugagaagcugaaaagcaaggucauucgcaccgaaagaccccucucuuccgggguguauaugggaaaucugagcacacagcaacuggagcagcggaaaguucuccugucuaugaucggcauggucgggggaacccagcgcgcccagccuggcaaggauggcguggugagagugugggacgucaagaacccggaucuucugaauaaccaauucgggacaaugcccucccucacccuggcuugucuuacgaaacagggacagguugaccugaaugauaccgugcucgcccugacagaccugggccucauuuacaccgcuaaguauccuaacagcucugaccuggaucggcuuucccaaagccaucccauccugaauaugguggacaccaaaaaguccucucucaacauuagcggguacaauuuuucccugggagccgcggucaaagccggcgcuugcaugcuugaugggggaaacaugcuggagaccaucaaggugacgccucagacaauggacggcauccucaaaagcauucugaagguuaagcgcucucugggcauguucguguccgauacccccggggaaagaaauccuuaugagaacauccucuacaaaauuugucugagcggagacggcuggccguauaucgccucucggacaagcauugucgggcgcgcuugggaaaacaccaccguggaucuugaguccgacggaaagccccagaaaguuggcacagccgggucuaauaagagccugcaguccgcgggauuuccuacgggccucaccuacagccaacugaugacacugaaagauucuaugaugcagcuugaccccuccgccaagaccuggaucgauauugagggcagaccugaagaccccguggagaucgcucucuaccagccggucagcgggugcuauauccacuucuuucgggaaccuacagaccugaagcaguucaaacaagaugccaaguacucucauggaauugacgugaccgaucuguuuuccgcucagcccggccucacgagcgccgucaucgaggcccugccuagaaacauggugcuuacaugucagggguccgacgauauuaaaaagcugcucgacucucagggacgccgggauaucaaacugauugacaucagccuguccaaguucgauucuagaaaguuugaaaaugcuguuugggaccaaugcaaagaucuuugucacaugcauaccggcguggucguggagaagaaaaagcgcgggggcaaagaggaaaucacaccccacugcgcgcucauggacuguauuauguucgaugccgcuguuagcggaggccugaacauccccauucugcgggccgugcucccuagagacauggucuuucgcacauccagcccgaagguggugcuguga

SEQ ID NO: 9127 - RNA, 1707 nt, Artificial Sequence
  derived and/or modified CDS sequence (opt5) from LASV(Lassa virus/H.sapiens-wt/NGA/2016/ISTH_0779;Clade II)__AVO03656__NP
agcguguccaaggaggucaaaucuuuccuguggacccagagccucagacgggaacuguccggcuacugcucuaacaucaaacuucaaguugugaaggacgcccaggcucugcuccacgggcuggauuuuagcgagguguccaauguccagcgccuuaugagaaagcagaaacgggacgauaacgaccugaagcgccucagagaucugaaucaagccgugaacaaucugguugaacucaagucugugcagcagaaaagcauucugcgggucggaacacuuuccagcgacgaucugcucauccuggcggcugaccuugagaagcugaaaucuaaggugauucgcacggaaagaccccucuccagcggcguuuauauggggaaccugucuucccagcaacuggagcagcggaaagcccuccugaauaugaucggaaugaccggcgggagccagggagcccagccuggccgcgauggcguggucagagugugggacgugaagaacucugaucuucugaauaaccaauucgggacaaugccgucccucacccuggcuugucuuacaaagcagggacaggucgaccugaaugaugccguucucgcucugaccgaccugggccucauuuacacagccaaauaucccaacaccagcgaccuggaucggcuuucccaaucucauccuauccugaauaugguggacacgaagaaaagcucccucaacaucagcggguacaauuuuucucugggagcggccgugaaggcuggcgccugcaugcuugaugggggaaacaugcuggagaccauuaaagucacaccccagaccauggacggcauccucaaguccauucugaaagugaagcgcgcucugggcauguucguuagcgauacaccuggggaaagaaaccccuaugagaauauccucuacaagauuugucugucuggagaaggcuggccuuauaucgccagccggaccuccauuacggggcgcgcgugggagaacacaaucguggaccuugagucugauagcaaaccgcagaagaugggaaccacaggcuccaauaaaagccugcagucugccggguuucccgcuggacucaccuacucccaacugaugacccugaaggacagcaugaugcagcuugauccuucugccaaaacauggaucgacauugaaggcagacccgaggauccugucgaaaucgcucucuaccagcccauuuccggcugcuauauccacuucuuucgggagccgacggaccugaagcaguucaagcaagacgccaaauacagccaugggauugauguggccgaccuguuuuccgcucagccuggacucaccucugcgguuaucgaagcccugcccagaaacauggugcuuacaugucagggcagcgaugacaucaagaaacugcucgauucccaggggcgccgggacauuaagcugaucgauauuucucugaauaaagcugacagcagacgcuucgagaacgccgucugggaucaaugcaaggaccuuugucacaugcauaccggaguggucguggagaagaaaaagcggggcgggaaagaagagaucacaccucacugcgcccucauggauuguauuauguuugacgcugccguuuccggcggacugaauauccccauccugagagcggugcucccccgcgauauggucuuccggaccagcucuccuaaggugguucuguga

SEQ ID NO: 9128 - RNA, 1710 nt, Artificial Sequence
  derived and/or modified CDS sequence (opt5) from LASV(Lassa virus/H.sapiens-wt/NGA/2016/ISTH_0917;Clade II)__AVO03536__NP
augagcgccuccaaggaggugaaaucuuuccuguggacccagagccucagacgggaacuguccggcuacugcucuaacaucaaacuucaagucguuaaggacgcucaggcccugcuccacgggcuggauuuuagcgagguguccaaugugcagcgccuuaugagaaagcagaaacgggacgauucugaccugaagcgccucagagaucugaaccaagcggucaauaaccugguggaacucaagagcacacagcagaaauccauucugcggguuggaacgcuuagcucugacgaucugcucacccuggcuacagaccuugagaagcugaaauccaaggugauccgcaccgaaagaccccucagcucuggcgucuauauggggaaucuguccacacagcaacuggaucagcggcgcgcccuccugaacaugauuggaauggugggcgggagccagggaaccucugccggcagagacggcaucguucgggugugggauguccgcaauccugagcuucugaacaaucaguucgggacaaugccgucccucacccuggcuugucuuacgaaacaaggacagguggaccugaacgaugccgugcaggcucucaccgaccugggccugauuuacacagccaaguaucccaauagcuccgaccucgauagacugucucaaagccauccuauccuuaacaugaucgacaccaagaaauccagcauuaauaucucuggguacaacuuuucccugggagcggccgucaaggcuggcgccugcaugcucgaugggggaaauaugcuggagacaauuaaaguuagcccccagucuaucgacggcauucuuaagagcauccugaaagugaagcggacccucggcauguucguguccgauacgccuggggaacgcaaccccuaugagaacauucuguacaaaaucugucugucuggagacggcuggccuuauaucgcuagcagaacauccauuaccgggcgggccugggaaaauacagucguggaucucgagagcgacgauaagccgaagaaacccggaaacaaugagucuaacagaucccugcagagcgcgggcuuuccugccgggcuuaccuacucucagcugaugacccucaaggacuccaugcugcaacuggaucccaaugcuaaaacauggauggacaucgaaggacgcccugacgaucccguugagauugcccuuuaccagccgaacagcggcugcuauauccacuucuuucgggaaccuacggaccucaagcaguucaaacaggaugcuaaguacucccauggcauugacaucggggaucuguuugccucucaacccggacugaccagcgccgugaucgaggcucucccuagaaauauggucauuacaugucagggcuccgaagacaucaagaaacugcuugagucucaggggcgcaaggauauucggcugguggacaucagccucuccaaagcggauagcagaaaguucgagaacgccguuugggaccaguauaaagaucugugccacaugcauaccggaauuguggucgaaaagaagaaaaagggcgggaaagaggaaaucacaccccacugugcucugauggacugcaucauguuugaugccgccgugaugggcggacuugacgcuaagguccuccgcgccgugcugccccgggacaugguuuucagaaccucuacgccucgcgugguccuguga

SEQ ID NO: 9129 - RNA, 1710 nt, Artificial Sequence
  derived and/or modified CDS sequence (opt5) from LASV(Lassa virus/H.sapiens-wt/NGA/2016/ISTH_0919;Clade II)__AVO03660__NP
augagcgccuccaaggaggugaaaucuuuccuguggacccagagccucagacgggaacuguccggcuacugcucuaacaucaaacuucaagucguuaaagacgcucaggcccugcuccacgggcuggauuuuagcgagguguccaaugugcagcgccuuaugagaaagcagaaacgggacgauucugaccugaagcgccucagagaucugaaccaagcggucaauaaccugguggaacucaagagcacacagcagaaauccauucugcggguuggaacgcuuaccagcgacgaucugcucacacuggcugccgaccuugagaagcugaaaucuaaggugauccgcaccgaaagaccccucuccagcggcgucuauauggggaaucugucuacacagcaacuggagcagcggcgcgcccuccugaaccuuauuggaauggugggcggggcucagggagcccagccuggcagagauggcguugugcgggucugggacgugaaaaauccggaucugcucaacaaucaauucgggaccaugcccucccugacacuugcuugucugaccaagcagggacagguggaccucaacgaugucguucuggcccugacggaccucggccugaucuacaccgcgaaguauccuaauagcucugaccuugaucgccugucccaaagccaucccauucucaacaugguggacacaaagaaguccucucugaauaucagcggguuuaacuucucccuuggagccgcugugaaagccggcgcuugcaugcuggaugggggaaauaugcucgagaccaucaaggucacaccucagaccauggacggcauucugaaaagcauccugaaggugaaaaagucucucggcauguuuguuuccgauacgcccggggaaagaaacccuuacgagaacauucuguauaagaucugucuuagcggagacggcuggccguacauugccucucggacaagcaucguggggcgcgcgugggaaaauaccacagucgaucuggaguccgacggaaaaccccacaaggugggcaccgccgggucuaacaaaagccuccaguccgcuggauucccuaccggccugacauauagccagcugaugacgcuuaaggauucuaugaugcaacucgaccccuccgccaaaaccuggauugauaucgagggcagaccugaagaccccguugagaucgcucuguaccagccgaugagcgggugcuacauucacuuuuuccgggaaccuacagaccugaagcaguuuaagcaggaugccaaauauucucauggaaucgacguggccgaucucuuccccgcucaaccuggccugaccuccgcggucauugaggcccuucccagaaauauggugcugacaugucaggggagcgacgauaucaagcgccuccuggacucccagggacggagagauauuaaacugaucgacaucgcucuuucuaaggccgauagccgccgguuugaaaacgccgucugggaccagugcaaagaucucugucauaugcacaccggcgugguuguggagaagaagaaaagagggggcaaggaggaaauuacgccccacugcgcucugauggacuguaucauguacgaugccgcggucuccggaggccugaauauuccugugcuccgcgcuguucugccgcgggacaugguguucagaacaucuagccccaaagucgugcuuuga

SEQ ID NO: 9130 - RNA, 1710 nt, Artificial Sequence
  derived and/or modified CDS sequence (opt5) from LASV(Lassa virus/H.sapiens-wt/NGA/2016/ISTH_1006;Clade II)__AVO03644__NP
augagcgccuccaaggaggugaaaucuuuccuguggacccagagccucagacgggaacuguccggcuacugcucuaacaucaaacuucaagucguuaaggacgcucaggcccugcuccacgggcuggauuuuagcgagguguccaaugugcagcgccuuaugagaaagcagaaacgggacgauucugaccugaagcgccucagagaucugaaccaagcggucaauaaccugguggaacucaagagcacacagcagaaauccauucugcggguuggaacgcuuaccagcgacgaucugcucacacuggcugccgaccuugagaagcugaaaucuaaggugauccgcaccgaaagaccccucuccagcggcgucuauauggggaaucugucuacacagcaacuggagcagcggcgcgcccuccugaacaugauuggaauggugggcgggacccagggaacacagccuggcagagauggcguugugcgggucugggacgugaaaaauccggaucuucugaacaaucaauucgggaccaugcccucccucacgcuggcuugucuuaccaagcagggacagguggaccugaacgaugccguccucgcucugacagaccugggccucaucuacaccgccaaguauccuaauagcucugaccuggaucgccuuucccaaagccaucccauucugaacaugguugacaccaaaaaguccucucucaauaucagcggguacaacuuuucccugggagcggccgugaaagcuggcgccugcaugcuugaugggggaaauaugcuggagaccaucaaggugacgccucagacaauggacggcauucucaaaagcauccugaaggucaaaaagucucugggcauguucguguccgauacccccggggaaagaaacccuuaugagaacauucucuacaagaucugucugagcggagacggcuggccguauauugcuucucggacaagcaucguugggcgcgccugggaaaauaccaccguggaucuugaguccgacggaaaaccccagaaggucggcacagcggggucuaacaaaagccugcaguccgccggauuuccuacgggccucaccuacagccaacugaugacacugaaggauucuaugaugcagcuugaccccuccgcuaaaaccuggauugauaucgagggcagaccugaagaccccguggagaucgcccucuaccagccgaugagcgggugcuauauucacuucuuucgggaaccuacagaccugaagcaguucaagcaagaugcuaaauacucucauggaaucgacguugccgaucuguuucccgcccagccuggccucaccuccgcugugauugaggcgcugcccagaaauaugguccuuacgugucaggggagcgacgauaucaagcgccugcucgacucccagggacggagagauauuaaacugaucgacaucucucugagcaaggccgauucccgccgguucgaaaacgcugugugggaccaaugcaaagaucuuugucacaugcauacaggcgucgugguugagaagaagaaaagagggggcaaggaggaaauuacaccccacugcgcccucauggacuguaucauguaugaugccgcugugucuggaggccugaauauuccuguccugcgcgccgugcucccgcgggacaugguuuuuagaaccagcucccccaaagugguccuguga

SEQ ID NO: 9131 - RNA, 1710 nt, Artificial Sequence
  derived and/or modified CDS sequence (opt5) from LASV(Lassa virus/H.sapiens-wt/NGA/2016/ISTH_1026;Clade II)__AVO03590__NP
augagcgccuccaaggaggugaaaucuuuccuguggacccagagccucagacgggaacuguccggcuacugcucuaacaucaaacuucaagucguuaaagacgcucaggcccugcuccacgggcuggauuuuagcgagguguccaaugugcagcgccuuaugagaaagcagaaacgggacgauucugaccugaagcgccucagagaucugaaccaagcggucaauaaccugguggaacucaagagcacacagcagaaauccauucugcggguuggaacgcuuaccagcgacgaucugcucacacuggcugccgaccuugagaagcugaaaucuaaggugauccgcaccgaaagaccccucuccagcggcgucuauauggggaaucugucugcccagcaacuggagcagcggcgcgcucuccugaaccuuauuggaauggugggcggggcccagggaacacagccuggcagagauggcguugugcgggucugggacgugaaaaauccggaucugcucaacaaucaauucgggaccaugcccucccugacacuugcuugucugaccaagcagggacagguggaccucaacgaugccguccuggcgcugacggaccucggccugaucuacaccgccaaguauccuaauagcucugaccuugaucgccugucccaaagccaucccauucucaacaugguugacacaaagaaguccucucugaauaucagcggguuuaacuucucccuuggagcugccgugaaagcuggcgccugcaugcuggaugggggaaauaugcucgagaccaucaaggugacaccucagaccauugacggcauccugaaaagcauucugaaggucaaaaagucucucggcauguuuguguccgauacgcccggggaaagaaacccuuacgagaacauccuguauaagauuugucuuagcggagacggcuggccguacaucgcgucucggacaagcauuguugggcgcgccugggaaaauaccacaguggaucuggaguccgacggaaaaccccacaaggucggcaccgcugggucuaacaaaagccuccaguccgccggauucccuaccggccugacauauagccagcugaugacgcuuaaggauucuaugaugcaacucgaccccuccgcuaaaaccuggaucgauaucgagggcagaccugaagaccccguggagauugcccuguaccagccgaugagcgggugcuacauccacuuuuuccgggaaccuacagaccugaagcaguuuaagcaggaugccaaauauucucauggaauugacguugcugaucucuuccccgcgcaaccuggccugaccuccgccgugaucgaggcccuucccagaaauaugguccugacaugucaggggagcgacgauauuaagcgccuccuggacucccagggacggagagauaucaaacugaucgacauugcucuuucuaaggccgauagccgccgguuugaaaacgcugugugggaccagugcaaagaucucugucauaugcacaccggcgucgugguugagaagaagaaaagagggggcaaggaggaaaucacgccccacugcgcccugauggacuguauuauguacgaugcggcuguguccggaggccugaauaucccuguccuccgcgccgugcugccgcgggacaugguuuucagaacaucuagccccaaagugguccuuuga

SEQ ID NO: 9132 - RNA, 1710 nt, Artificial Sequence
  derived and/or modified CDS sequence (opt5) from LASV(Lassa virus/H.sapiens-wt/NGA/2016/ISTH_1070;Clade II)__AVO03652__NP
augagcgccuccaaggaggugaaaucuuuccuguggacccagagccucagacgggaacuguccggcuacugcucuaacaucaaacuucaagucguuaaggacgcucaggcccugcuccacgggcuggauuuuagcgagguguccaaugugcagcgccuuaugagaaagcagaaacgggacgauggagaccugaagcgccucagagaucugaaccaagcggucaauaaccugguggaacucaagucuacccagcagaaaagcguucugcgggugggcacgcuuaccuccgacgaucugcucacacuggcugccgaccuugagaagcugaaaagcaaggucauucgcaccgaaagaccccucucuuccgggguguauaugggaaaucugagcacacagcaacuggagcagcggcgcgcccuccugucuaugaucggcaugguugggggagcucagggcacccagccuggcagagauggggugguccgggugugggacgugaaaaacccggaucuucugaauaaccaauucggaacaaugcccucccucacccuggccugucuuacgaagcagggccaggucgaccugaaugauguugugcucgcucugaccgaccuggggcucauuuacacagccaaguauccuaacagcucugaccuggaucgccuuucccaaagccaucccauccugaauaugguggacaccaaaaaguccucucucaacauuagcggauacaauuuuucccugggcgcggccgucaaagcuggggccugcaugcuugauggaggcaacaugcuggagacaaucaaggugaccccucagacgauggacggcauccucaaaagcauucugaagguuaaaaagucucuggggauguucguguccgauacacccggagaaagaaauccuuaugagaacauccucuacaagauuugucugagcggcgacggguggccguauaucgcuucucggaccgccauugucggacgcgcgugggaaaacacaaccguggaucuugagagcgacggcaaaccccagaagguuggggccaccggauccaauaaaucucugcagagcgcuggcuuuccuacaggccucacguacucccaacugaugacccugaaggauagcaugaugcagcuugaccccucugccaaaacauggaucgauauugaggggagaccugaagaccccguggagaucgcucucuaccagccgauguccggaugcuauauccacuucuuucgggaaccuaccgaccugaagcaguucaagcaagaugccaaauacagccauggcauugacgucacagaucuguuuucugcccagcccgggcucaccuccgcugugaucgaggcgcugccuagaaacaugguccuuacgugucagggaagcgacgauauuaagcgccugcucgacucccagggccggagagauaucaaacugauugacaucgcccugucuaaggcugauagccgccgguucgaaaaugccgugugggaccaaugcaaagaucuuugucacaugcauacagggguuguggucgagaagaagaaaagaggcggaaaggaggaaaucacaccccacugcgcccucauggacuguauuauguaugaugcugccguguccggcgggcugaacauccccguucugcgcgcggugcucccucgggacauggucuuuagaaccucuagcccgaaaguggugcuguga

SEQ ID NO: 9133 - RNA, 1710 nt, Artificial Sequence
  derived and/or modified CDS sequence (opt5) from LASV(Lassa virus/H.sapiens-wt/NGA/2016/ISTH_1150;Clade II)__AVO03628__NP
augagcgccuccaaggaggugaaaucuuuccuguggacccagagccucagacgggaacuguccggcuacugcucuagcaucaaacuucaagucguuaaggacgcucaggcccugcuccacgggcuggauuuuuccgaggugucuaacgugcagcgccuuaugagaaagcagaaacgggacgauagcgaccugaagcgccucagagaucugaaucaagcggucaacaaucugguggaacucaaguccacccagcagaaaagcauucugcggguuggaacgcuuaccucugacgaucugcucacacuggcugccgaccuugagaagcugaaauccaaggugauccgcaccgaaagaccccucagcucuggcgucuauauggggaaccuguccacacagcaacuggagcagcggcgcgcccuccugagcaugauuggaauggugggcggggcucagggaacccagccuggcagagauggcguugugcgggucugggacgugaaaaauccggaucuucugaacaaucaauucgggacaaugcccucucucacccuggccugucuuacgaagcagggacagguggaccugaacgauaccguccucgcucugacagaccugggccucaucuacaccgccaaguauccuaauuccagcgaccuggaucgccuuucccaaucucaucccauucugaacaugguugacaucaaaaagagcucccucaauaucagcggguacaacuuuucucugggagcggccgugaaagcuggcgccugcaugcuugaugggggaaauaugcuggagacaauuaaggugaccccucagacgauggacggcauccucaaauccauucugaaggucaaaagaagccugggcauguucgugucugauacacccggggaacggaacccuuaugagaauauccucuacaagauuugucugagcggagacggcuggccguauaucgcuucccgcaccucuauuguugggagagccugggaaaacacaaccguggaucuugagagcgacggaaagccccagaaagucggcaccgcgggguccaacaagagccugcagucugccggauuuccuacaggccucacguacucccaacugaugacccugaaagauagcaugaugcagcuugaccccucugcuaagacauggaucgauaucgagggccggccugaagaccccguggagauugcccucuaccagccgauguccgggugcuauauccacuucuuuagagaaccuaccgaccugaaacaguucaagcaagaugcuaaguacagccauggaauugacguuacagaucuguuuuccgcccagcccggccucaccucugccgugaucgaggcucugccucgcgggaugguccuuacgugucagggaagcgacgauauuaaaaagcugcucgacucccagggccggagagauaucaaacugaucgacauuucucugagcaaggcggauucccgccgguucgaaaaugccgugugggaccaaugcaaagaucuuugucacaugcauacaggggucgugguugagaagaagaaaagaggcggaaaggaggaaaucacaccccacugcgcucucauggacuguauuauguuugaugccgccgugagcggcgggcugaacauccccauucugcgcgcuguccucccucgggacaugguguucagaaccucuuccccgaaaguugugcuguga

SEQ ID NO: 9134 - RNA, 1710 nt, Artificial Sequence
  derived and/or modified CDS sequence (opt5) from LASV(Lassa virus/H.sapiens-wt/NGA/2016/ISTH_1174;Clade II)__AVO03556__NP
augagcgccuccaaggaggugaaaucuuuccuguggacccagagccucagacgggaacuguccggcuacugcucuaacaucaaacuucaagucguuaaggacgcucaggcccugcuccacgggcuggauuuuagcgagguguccaaugugcagcgccuuaugagaaagcagaaacgggacgauucugaccugaagcgccucagagaucugaaccaagcggucaauaaccugguggaacucaagagcacacagcagaaauccauucugcggguuggaacgcuuaccagcgacgaucugcucacacuggcugccgaccuugagaagcugaaaucuaaggugauccgcaccgaaagaccccucuccagcggcgucuauauggggaaucugucuacacagcaacuggagcagcggcgcgcccuccugaacaugauuggaauggugggcggggcucaguccacccagccuggaagagauggcguugugcgggucugggacgugaaaaauccggaucuucugaacaaucaauucggcacaaugcccagccucacccuggccugucuuacgaagcagggacagguggaccugaacgaugcuguccucgcccugaccgaccuggggcucaucuacacagcgaaguauccuaauucuuccgaccuggaucgccuuagccaaucccaucccauucugaacaugguugacaccaaaaagucuagccucaauaucuccggcuacaacuuuagccugggggccgcugugaaagccggagcuugcaugcuugauggcgggaauaugcuggagacaaucaagauuaccccucagacgauggacggaauccucaaaucuauucugaaggugaaaagaucccugggcauguucgucagcgauacacccggcgaacggaacccuuaugagaacauccucuacaaggugugucugucuggggacggauggccguauauugccagccgcaccuccaucguuggcagagcgugggaaaauacaaccguggaucuugagucugacgggaagccccagaaagucggaaccgugggcagcaacaagucccugcagagcgccggguuuccuacaggacucacguacucucaacugaugacccugaaagauuccaugaugcagcuugaccccagcgcuaagacauggauugauaucgagggccggccugaagaccccguugagaucgcccucuaccagccgaugucuggcugcuauauucacuucuuuagagaaccuaccgaccugaaacaguucaagcaagaugcuaaguacucccaugggaucgacguggccgaucuguuucccgcccagccuggacucacaagcgcugucauugaggcgcugccccgcaauauggugcuuaccugucagggcuccgacgauaucaaacggcugcucgacucucaggggagacgcgauauuaagcugaucgacaucgcccugagcaaagcugauucccggagauucgaaaacgccgucugggaccaaugcaaggaucuuugucacaugcauacgggagugguuguggagaaaaagaagcgcggcgggaaagaggaaauuacaccccacugcgcccucauggacuguaucauguaugaugcugccgucucuggcggacugaauauuccugugcugcgggcgguucucccgagagacaugguguuucgcaccagcucccccaaggucgugcuguga

SEQ ID NO: 9135 - RNA, 1710 nt, Artificial Sequence
  derived and/or modified CDS sequence (opt5) from LASV(Lassa virus/H.sapiens-wt/NGA/2016/ISTH_1207;Clade II)__AVO03600__NP
augagcgccuccaaggaggugaaaucuuuccuguggacccagagccucagacgggaacuguccggcuacugcucuaacaucaaacuucaagucguuaaagacgcucaggcccugcuccacgggcuggauuuuagcgagguguccaaugugcagcgccuuaugagaaagcagaaacgggacgauucugaccugaagcgccucagagaucugaaccaagcggucaauaaccugguggaacucaagagcacacagcagaaauccauucugcggguuggaacgcuuaccagcgacgaucugcucauccuggcugccgaccuugagaagcugaaaucuaaggugauucgcacagaaagaccccucuccagcggcgucuauauggggaaucugucuacccagcaacuggagcagcggcgcgcccuccugaacaugaucggaaugguggauggcgcucaggggacacagccuggaagagacggcguugugcgggucugggaugugaaaaauccggaccuucugaacaaucaauucggcaccaugcccucccucacacuggccugucuuaccaagcagggacagguggaucugaacgacgcuguccucgcccugacggaccuggggcucauuuacaccgcgaaguauccuaauagcucugaucuggaccgccuuucccaaagccaucccauccugaacaugguugauacaaagaaguccucucucaauaucagcggcuacaacuuuucccugggggccgcugugaaagccggagcuugcaugcuugacggcgggaauaugcuggagaccauuaaggugacaccucagaccauggauggaauccucaaaagcauucugaaggucaaaaagucucugggcauguucguguccgacacgcccggcgaaagaaacccuuaugagaacauccucuacaagauuugucugagcggggauggauggccguauaucgccucucggacaagcauuguuggccgcgcgugggaaaauaccacaguggaccuugaguccgaugggaaaucucagaaggucggaaccgccggcagcaacaaaucccugcagagcgcuggguuucccaccggacucacauacucucaacugaugacgcugaaggacuccaugaugcagcuugauccuagcgccaaaaccuggaucgacaucgagggcagacccgaagacccuguggagauugcucucuaccagcccaugucuggcugcuauauccacuucuuucgggaaccgacagaucugaagcaguucaagcaagacgccaaauacucccaugggauugauguugccgaccuguuuccugcucagcccggacucaccagcgcggugaucgaggcccugccuagaaauaugguccuuacaugucagggcuccgaugacauuaagcgccugcucgauucucaggggcggagagacaucaaacugaucgauauugcucugagcaaggccgacucccgccgguucgaaaacgccgugugggaucaaugcaaagaccuuugucacaugcauaccggagucgugguugagaagaagaaaagaggcgggaaggaggaaaucacgccccacugcgcucucauggauuguauuauguaugacgccgcggugucuggcggacugaauauccccguccugcgcgcugugcucccucgggacaugguuuuuagaacaagcuccccgaaagugguccuguga

SEQ ID NO: 9136 - RNA, 1710 nt, Artificial Sequence
  derived and/or modified CDS sequence (opt5) from LASV(Lassa virus/H.sapiens-wt/NGA/2016/ISTH_1306;Clade II)__AVO03624__NP
augagcgccuccaaggaggugaaaucuuuccuguggacccagagccucagacgggaacuguccggcuacugcucuaacaucaaacuucaagucguuaaggacgcucaggcccugcuccacgggcuggauuuuagcgagguguccaaugugcagcgccuuaugagaaagcagaaacgggacgauggagaccugaagcgccucagagaucugaaccaagcggucaauaaccugguggaacucaagucuacacagcagaaaagcauucugcggguuggcacgcuuaccuccgacgaucugcucacacuggcugccgaccuugagaagcugaaaagcaaggugauccgcaccgaaagaccccucucuuccggggucuauaugggaaaucugagcacacagcaacuggagcagcggcgcgcccuccugaacaugauuggcaugguugggggagcucagggcacccagccuggcagagaugggguggugcgggucugggacgugaaaaauccggaucuucugaacaaucaauucggaacaaugcccucucucacccuggccugucuuacgaagcagggccagguggaccugaacgaugcuguccucgcccugaccgaccuggggcucaucuacacagcgaaguauccuaauuccagcgaccuggaucgccuuucucaaucccaucccauucugaacaugguugacaccaaaaagagcucccucaauaucucuggauacaacuuuagccugggcgccgcugugaaagccggggcuugcaugcuugauggaggcaauaugcuggagacaaucaaggugaccccucagacgauggacggcauucucaaauccauccugaaggucaaaaagagccuggggauguucgugucugauacacccggagaaagaaacccuuaugagaacauucucuacaagaucugucuguccggcgacggguggccguauauugccagccggaccucuaucguuggacgcgcgugggaaaauacaaccguggaucuugagagcgacggcaaaccccagaaggucgggaccgccggauccaacaaaucucugcagagcgcuggcuuuccuacaggccucacguacucccaacugaugacccugaaggauagcaugaugcagcuugaccccucugccaaaacauggauugauaucgaggggagaccugaagaccccguggagaucgcucucuaccagccgauguccggaugcuauauucacuucuuucgggaaccuaccgaccugaagcaguucaagcaagaugccaaauacagccauggcaucgacguugccgaucuguuucccgcucagccugggcucacaucugcggugauugaggcccugcccagaaauaugguccuuaccugucagggauccgacgauaucaagcgccugcucgacagccagggccggagagauauuaaacugaucgacaucgcucuguccaaggccgauucucgccgguucgaaaacgccgugugggaccaaugcaaagaucuuugucacaugcauacgggggucgugguugagaagaagaaaagaggcggaaaggaggaaauuacaccccacugcgcucucauggacuguaucauguaugaugccgcggugagcggcgggcugaauauuccuguccugcgcgcugugcucccgcgggacaugguuuuuagaaccuccucucccaaagugguccuguga

SEQ ID NO: 9137 - RNA, 1710 nt, Artificial Sequence
  derived and/or modified CDS sequence (opt5) from LASV(Lassa virus/H.sapiens-wt/NGA/2016/ISTH_1311;Clade II)__AVO03576__NP
augagcgccuccaaggaggugaaaucuuuccuguggacccagagccucagacgggaacuguccggcuacugcucuaacaucaaacuucaagucguuaaagacgcucaggcccugcuccacgggcuggauuuuagcgagguguccaaugugcagcgccuuaugagaaagcagaaacgggacgauggagaccugaagcgccucagagaucugaaccaagcggucaauaaccugguggaacucaagucuacacagcagaaaagcguucugcgggugggcacgcuuaccuccgacgaucugcucauucuggcugccgaccuugagaagcugaaaagcaaggucauccgcacagaaagaccccucucuuccgggguguauaugggaaaucugagcacccagcaacuggagcagcggcgcgcccuccugucuaugauuggcaugguugggggagcucagggcacacagccuggcagagauggggugguccgggugugggacgugaaaaacccggaucuucugaauaaccaauucggaaccaugcccucccucacacuggccugucuuaccaagcagggccaggucgaccugaaugaugcuguucucgcccugacggaccuggggcucaucuacaccgugaaguauccuaacagcucugaccuggaucgccuuucccaaagccaucccauucugaauaugguggacacaaagaaguccucucucaacaucagcggauacaauuuuucccugggcgcggccgucaaagcuggggccugcaugcuugauggaggcaacaugcuggagaccaucaaggugacaccucagaccauugacggcauccucaaaagcauucugaagguuaaaagaucucuggggauguucguguccgauacgcccggagaacggaauccuuaugagaacauccucuacaagauuugucugagcggcgacggguggccguauaucgcuucucgcacaagcauugucggcagagccugggaaaacaccacaguggaucuugaguccgacggaaagccccagaaaguuggggcggccggaucuaauaagagccugcaguccgcuggcuuuccuaccggccucaccuacagccaacugaugacacugaaagauucuaugaugcagcuugaccccuccgccaagacguggaucgauaucgaggggcggccugaagaccccguggagauugcucucuaccagccgaugagcggaugcuauauccacuucuuuagagaaccuaccgaccugaaacaguucaagcaagaugccaaguacucucauggcauugacgucacagaucuguuuuccgcccagcccgggcucaccagcgcugugaucgaggcgcugccucgcaacaugguccuuacaugucagggauccgacgauauuaaaaagcugcucgacucucagggccggagagauaucaaacugaucgacauuagccugaauaagaccgauucccgccgguucgaaaacgccgugugggaccaaugcaaagaucuuugucacaugcauacggggguuguggucgagaagaagaaaagaggcggaaaggaggaaaucacaccccacugcgcucucauggacuguauuauguuugaugccgccgugucuggcgggcugaauauccccauucugcgcgcuguucucccucgggacaugguguucagaaccagcuccccgaaagucgugcuguga

SEQ ID NO: 9138 - RNA, 1710 nt, Artificial Sequence
  derived and/or modified CDS sequence (opt5) from LASV(Lassa virus/H.sapiens-wt/NGA/2016/ISTH_1423;Clade II)__AVO03578__NP
augagcgccuccaaggaggugaaaucuuuccuguggacccagagccucagacgggaacuguccggcuacugcucuaacaucaaacuucaagucguuaaggacgcucaggcccugcuccacgggcuggauuuuagcgagguguccaaugugcagcgccuuaugagaaagcagaaacgggacgauucugaccugaagcgccucagagaucugaaccaagcggucaauaaccugguggaacucaagagcacacagcagaaauccauucugcggguuggaacgcuuaccagcgacgaucugcucacacuggcugccgaccuugagaagcugaaaucuaaggugauccgcaccgaaagaccccucuccagcggcgucuauauggggaaucugucuacacagcaacuggagcagcggcgcgcccuccugaacaugauuggaaugguguccggcacccaggggacacagccuggaagagauggcguugugcgggucugggacgugaaaaauccggaucuucugaacaaucaauucggcaccaugcccagccucacgcuggcuugucuuaccaagcagggacagguggaccugaacgaugccguccucgcucugacagaccugggacucaucuacaccgccaaguauccuaauucuuccgaccuggaucgccuuagccaaucccaucccauucugaacaugguugacaccaaaaagucuagccucaauaucuccggcuacaacuuuagccugggggcggccgugaaagcuggagccugcaugcuugauggcgggaauaugcuggagaccaucaaggugacgccucagacaauggacgggauucucaaaucuauccugaaggucaaaaagucccugggcauguucgugagcgauacccccggcgaaagaaacccuuaugagaacauucucuacaagaucugucugucuggggacggauggccguauauugcuagccggacauccaucguuggccgcgccugggaaaauaccaccguggaucuugagucugacgggaaaccccagaagaugggaacagcgggcagcaacaaaucccugcagagcgccggguuuccuacgggacucaccuacucucaacugaugacacugaaggauuccaugaugcagcuugaccccagcgcuaaaaccuggauugauaucgagggcagaccugaagaccccgucgagaucgcccucuaccagccgaugucuggcugcuauauucacuucuuucgggaaccuacagaccugaagcaguucaagcaagaugcuaaauacucccaugggaucgacguggccgaucuguuucccgcccagccuggacucaccagcgcuguuauugaggcgcugcccagaaauauggugcuuacgugucagggcuccgacgauaucaagaaacugcucgacucucaggggcgccgggauauuaagcugaucgacaucgcccugagcaaagcugauuccagacgcuucgaaaacgccgucugggaccaaugcaaggaucuuugucacaugcauacaggaguggucguggagaagaaaaagcggggcgggaaagaggaaauuacaccccacugcgcccucauggacuguaucauguaugaugcugccguuucuggcggacugaauauuccugugcugagagcgguccucccgcgcgacaugguguuucggaccagcaaccccaagguugugcuguga

SEQ ID NO: 9139 - RNA, 1710 nt, Artificial Sequence
  derived and/or modified CDS sequence (opt5) from LASV(Lassa virus/H.sapiens-wt/NGA/2016/ISTH_1472;Clade II)__AVO03606__NP
augagcgccuccaaggaggugaaaucuuuccuguggacccagagccucagacgggaacuguccggcuacugcucuaacaucaaacuucaagucguuaaggacgcucaggcccugcuccacgggcuggauuuuagcgagguguccaaugugcagcgccuuaugagaaagcagaaacgggacgauucugaccugaagcgccucagagaucugaaccaagcggucaauaaccugguggaacucaagagcacacagcagaaauccauucugcggguuggaacgcuuaccagcgacgaucugcucacacuggcugccgaccuugagaagcugaaaucuaaggugauccgcaccgaaagaccccucuccagcggcgucuauauggggaaucugucuacacagcaacuggagcagcggcgcgcccuccugaacaugauuggaauggugggcgggauccagggaacccagccuggcagagauggcguugugcgggucugggacgugaaaaauccggaucuucugaacaaucaauucgggacaaugcccucccucacccuggcuugucuuacgaagcagggacagguggaccugaacgauaccguccaagcccucacagaccugggccugauuuacaccgcuaaguauccuaauagcucugaccucgaucgccugucccagagccaucccauccuuaacaugguugacaccaaaaaguccucucugaauaucagcggguacaacuuuucccucggagccgcggugaaagccggcgcuugcaugcuggaugggggaaauaugcuugagaccauuaaggugacgccucagacaauggacggcauccugaaaagcauucucaaggucaaaaagucucugggcauguucguguccgauacccccggggaaagaaacccuuaugagaacauccuguacaagauuugucucagcggagacggcuggccguauaucgccucucggacaagcauuguugggcgcgcuugggaaaauaccaccguggaucuggaguccgacggaaaaccccagaaggucggcacagccgggucuaacaaaagccuucaauccgcgggauuuccuacgggccugaccuacagccagcucaugacacugaaggauucuaugaugcagcuggaccccuccgccaaaaccuggaucgauaucgagggcagaccugaagaccccguggagauugcucuuuaccagccgaugagcgggugcuauauccacuucuuucgggaaccuacagaccucaagcaauucaagcaggaugccaaauacucucauggaauugacguugcugaucuguuucccgcccagccuggccugaccuccgccgugaucgaggcucuccccagaaauaugguccugacgugucaggggagcgacgauauuaagcgccuucuggacucccaaggacggagagauaucaaacucaucgacauuucucugagcaagacagauucccgccgguucgaaaacgcggugugggaccagugcaaagaucugugucacaugcauaccggcgucgugguugagaagaagaaaagagggggcaaggaggaaaucacaccccacugcgcccuuauggacuguauuauguaugaugcugccgugucuggaggccucaauaucccuguccugcgcgccgugcugccgcgggacaugguuuuuagaacaagcucccccaaagugguccucuga

SEQ ID NO: 9140 - RNA, 1710 nt, Artificial Sequence
  derived and/or modified CDS sequence (opt5) from LASV(Lassa virus/H.sapiens-wt/NGA/2016/ISTH_1474;Clade II)__AVO03614__NP
augagcgccuccaaggaggugaaaucuuuccuguggacccagagccucagacgggaacuguccggcuacugcucuaacaucaaacuucaagucguuaaggacgcucaggcccugcuccacgggcuggauuuuagcgagguguccaaugugcagcgccuuaugagaaagcagaaacgggacgauucugaccugaagcgccucagagaucugaaccaagcggucaauaaccugguggaacucaagagcacacagcagaaauccauucugcggguuggaacgcuuaccagcgacgaucugcucacacuggcugccgaccuugagaagcugaaaucuaaggugauccgcaccgaaagaccccucuccagcggcgucuauauggggaaucugucuacacagcaacuggagcagcggcgcgcccuccugaacaugauuggaauggugggcgggauccagggaacccagccuggcagagauggcguugugcgggucugggacgugaaaaauccggaucuucugaacaaucaauucgggacaaugcccucccucacccuggcuugucuuacgaagcagggacagguggaccugaacgauaccguccaagcccucacagaccugggccugauuuacaccgcuaaguauccuaauagcucugaccucgaucgccugucccagagccaucccauccuuaacaugguugacaccaaaaaguccucucugaauaucagcggguacaacuuuucccucggagccgcggugaaagccggcgcuugcaugcuggaugggggaaauaugcuugagaccauuaaggugacgccucagacaauggacggcauccugaaaagcauucucaaggucaaaagaucucugggcauguucguguccgauacccccggggaacggaacccuuaugagaacauccuguacaagauuugucucagcggagacggcuggccguauaucgccucucgcacaagcauuguugggagagcuugggaaaauaccaccguggaucuggaguccgacggaaagccccagaaagucggcacagccgggucuaacaagagccuucaauccgcgggauuuccuacgggccugaccuacagccagcucaugacacugaaagauucuaugaugcagcuggaccccuccgccaagaccuggaucgauaucgagggccggccugaagaccccguggagauugcucuuuaccagccgaugagcgggugcuauauccacuucuuuagagaaccuacagaccucaaacaauucaagcaggaugccaaguacucucauggaauugacguugcugaucuguuucccgcccagccuggccugaccuccgccgugaucgaggcucucccccgcaauaugguccugacgugucaggggagcgacgauauuaaacggcuucuggacucccaaggaagacgcgauaucaagcucaucgacauugcgcugucuaaagccgauagccggagauucgaaaacgcugugugggaccagugcaaggaucugugucacaugcauacaggcgucgugguugagaaaaagaagcgcgggggcaaagaggaaaucacaccccacugcgcccuuauggacuguauuauguaugaugccgcuguguccggaggccucaauaucccuguccugcgggccgugcugccgagagacaugguuuuucgcaccucuagccccaaggugguccucuga

SEQ ID NO: 9141 - RNA, 1710 nt, Artificial Sequence
  derived and/or modified CDS sequence (opt5) from LASV(Lassa virus/H.sapiens-wt/NGA/2016/ISTH_1496;Clade II)__AVO03580__NP
augagcgccuccaaggaggugaaaucuuuccuguggacccagagccucagacgggaacuguccggcuacugcucuaacaucaaacuucaagucguuaaggacgcucaggcccugcuccacgggcuggauuuuagcgagguguccaaugugcagcgccuuaugagaaagcagaaacgggacgauucugaccugaagcgccucagagaucugaaccaagcggucaauaaccugguggaacucaagagcacacagcagaaauccauucugaagguuggaacgcuuaccagcgacgaucugcucacacuggcugccgaccuugagaaacugaagucuaaagugauccggaccgaacgcccccucuccagcggcgucuauauggggaaucugucuacacagcaacuggagcagagacgggcccuccugaacaugauuggaauggugggcggggcucagggaacccagccuggccgcgauggcguugugagagucugggacgugaagaauccggaucuucugaacaaucaauucgggacaaugcccucccucacccuggccugucuuacgaagcagggacagguggaccugaacgaugcuguccucgcccugaccgaccugggccucaucuacacagcgaaauauccuaauagcucugaccuggaucggcuuucccaaagccaucccauucugaacaugguugacaccaagaaauccucucucaauaucagcggguacaacuuuucccugggagccgcugugaaggccggcgcuugcaugcuugaugggggaaauaugcuggagacaaucaaagugaccccucagacgauggacggcauucucaagagcauccugaaagucaagcgcucucugggcauguucguguccgauacacccggggaaagaaacccuuaugagaacauucucuacaagaucugucugagcggagacggcuggccguauauugccucucggaccagcaucguugggcgcgcgugggaaaauacaaccguggaucuugaguccgacggaaaaccccagaaggucggcaccauugggucuaacaaaagccugcaguccgccggauuuccuacaggccucacguacagccaacugaugacccugaaggauucuaugaugcagcuugaccccuccgcuaaaacauggaucgauaucgagggcagaccugaagaccccguggagauugcccucuaccagccgaugagcgggugcuauauccacuucuuucgggaaccuaccgaccugaagcaguucaagcaagaugcuaaauacucucauggaauugacguugccgaucuguuucccgcccagccuggccucacauccgcugugaucgaggcgcugcccagaaauaugguccuuaccugucaggggagcgacgauauuaagcgccugcucgacucccagggacggagagauaucaaacugaucgacauugcccugucuaaggcugauagccgccgguucgaaaacgccgugugggaccaaugcaaagaucuuugucacaugcauacgggcgucgugguugagaagaagaaaagagggggcaaggaggaaaucacaccccacugcgcccucauggacuguauuauguaugaugcugccguguccggaggccugaauaucccuguccugcgcgcggugcucccgcgggacaugguuuuuagaaccucuagccccaaagugguccuguga

SEQ ID NO: 9142 - RNA, 1710 nt, Artificial Sequence
  derived and/or modified CDS sequence (opt5) from LASV(Lassa virus/H.sapiens-wt/NGA/2016/ISTH_1541;Clade II)__AVO03554__NP
augagcgccuccaaggaggugaaaucuuuccuguggacccagagccucagacgggaacuguccggcuacugcucuaacaucaaacuucaagucguuaaggacgcucaggcccugcuccacgggcuggauuuuagcgagguguccaaugugcagcgccuuaugagaaagcagaaacgggacgauggagaccugaagcgccucagagaucugaaccaagcggucaauaaccugguggaacucaagucuacacagcagaaaagcauucugcggguuggcacgcuuuccagcgacgaucugcucauccuggcugccgaccuugagaagcugaaaucuaaggugauucgcaccgaaagaccccucuccagcggggucuauaugggaaaucugucuucccagcaacuggaucagcggcgcgcccuccugaacaugaucggcaugacagggggaaaucagggcgcuagcaccggcagagacgggauugugcggguuugggaugugaaaaacgccgagcuucugaauaaccaguucggaacaaugccuucucucacccuggcuugucuuacaaagcaaggccaggucgaccugaaugaugccgugcaggcgcucaccgaccuggggcugaucuacacggccaaguauccgaacuccagcgaccucgaucgccugucccaaucucaucccauccuuaauaugauugacaccaaaaagagcucccugaacaucagcggauacaauuuuucucucggcgcugccgugaaagcuggggccugcaugcuggauggaggcaacaugcuugagacaauuaaggucuccccucagaccauggacggcauccugaaaagcauucucaagguuaaaaagucucuggggauguucgugagcgauacacccggagaaagaaacccuuaugagaauauccuguacaagauuugucucuccggcgacggguggcccuauaucgcgucucggaccagcaucauuggacgcgccugggaaaacacgaucguggaucuggaggcugacaauaaaccucagaaguccggcaacaaugggagcaacagaucucuucaguccgccggauuuccgagcggccugacauacucucaacucaugacccugaaagauuccaugcugcagcuugaccccaaugcuaagacauggauggauauugagggccggccugacgaccccgucgaaaucgcccucuaccagccuagcuccgggugcuauauucacuucuuuagagagcccaccgaucugaaacaguucaagcaagacgccaaguacucucauggaaucgaugugagcgaccuguuugcugcgcagccgggccucaccuccgccguuaucgaagcucugccucgcaacauggugauuacaugucaggggucugaggauaucaaaaagcugcuugaaagccagggacggaaagacauuaagcucgucgauaucucccugagcaaacuggacucuagaaaguucgagaaugugguuugggaucaauauaaggaccuuugccacaugcauacgggcauuguggucgagaaaaagaaacgcgggggcaaggaagagaucacaccccacugugcccucauggauugcaucauguuugacgccgcugugaugggaggccuggaugcccggguccugagagcggugcucccucgcgacaugguuuuccggaccuccacccccaaagugguccuguga

SEQ ID NO: 9143 - RNA, 1710 nt, Artificial Sequence
  derived and/or modified CDS sequence (opt5) from LASV(Lassa virus/H.sapiens-wt/NGA/2016/ISTH_1546;Clade II)__AVO03538__NP
augagcgccuccaaggaggugaaaucuuuccuguggacccagagccucagacgggaacuguccggcuacugcucuaacaucaaacuucaagucguuaaggacgcucaggcccugcuccacgggcuggauuuuagcgagguguccaaugugcagcgccuuaugagaaagcagaaacgggacgauggagaccugaagcgccucagagaucugaaccaagcggucaauaaccugguggaacucaagucuacacagcagaaaagcguucugcgggugggcacgcuuuccagcgacgaucugcucauucuggcugccgaccuugagaagcugaaaucuaaggucauccgcaccgaaagaccccucuccagcgggguguauaugggaaaucugucuucccagcaacuggaucagcggcgcgcccuccugaacaugauuggcaugacagggggaaaucagggcaccaacgcuggcagagacgggaucguucggauuugggaugugaaaaaugccgagcuucugaacaaucaguucggaacaaugccuagccucacccuggcuugucuuacaaagcaaggccaggucgaccugaacgauguggugcaggcccucaccgaccuggggcugaucuacacggcgaaguaucccaauucuuccgaccucgaucgccugagccaaucccauccgauccuuaacaugauugacaccaaaaagucuagccugaauaucuccggauacaacuuuagccucggcgccgcugucaaagccggggcuugcaugcuggauggaggcaacaugcuugagacaauuaagguuucuccucagaccauggacggcauccugaaauccauucucaaggugaaaagaagccuggggauguucgugucugauacacccggagaacggaauccuuaugagaacauccuguacaagauuugucucagcggcgacggguggcccuauaucgccucccgcaccucuaucauugggagagcgugggaaaauacgaucgucgaucuggagacaaacaauaagccucagaaaccgggcaacaaugggagcaaccggucccuucagagcgccggauuucccgcuggccugaccuacucucaacucaugacacugaaggacuccaugcugcagcuugauccuaaugccaaaaccuggauggacauugagggcagacccgaugacccuguggaaaucgcucucuaccagcccagcucugggugcuauauucacuucuuucgcgagccgaccgaccugaagcaguucaaacaagaugccaaguacucccauggaaucgaccugagcgaucucuuugccgcucagccuggccugacauccgcgguuaucgaagcccuuccccggaacauggugauuacgugucaggggucugaggacaucaugaagcugcucgaaagccagggaagaaaagauauuaagcuggucgacaucucccugucuaaaagcgauucccgcaaguucgagaaugcugugugggaccaauauaaagaucuuugccacaugcauaccggcauuguuguggagaagaagaaaaagggaggcaaagaagagaucacaccucacugugcccucauggacugcaucauguuugaugccgcugucaugggaggccuggacgccaaggugcugcgggcgguccuccccaaagauaugguguucagaaccagcacacccaagguugugcuguga

SEQ ID NO: 9144 - RNA, 1710 nt, Artificial Sequence
  derived and/or modified CDS sequence (opt5) from LASV(Lassa virus/H.sapiens-wt/NGA/2016/ISTH_1568;Clade II)__AVO03562__NP
augagcgccuccaaggaggugaaaucuuuccuguggacccagagccucagacgggaacuguccggcuacugcucuagcaucaaacuucaagucguuaaggacgcucaggcccugcuccacgggcuggauuuuuccgaggugucuaacgugcagcgccuuaugagaaagcagaaacgggacgauagcgaccugaagcgccucagagaucugaaucaagcggucaacaaucugguggaacucaaguccacacagcagaaaagcauucugcggguuggaacgcuuaccucugacgaucugcucacacuggcugccgaccuugagaagcugaaauccaaggugauccgcaccgaaagaccccucagcucuggcgucuauauggggaaccuguccagccagcaacuggagcagcggcgcgcccuccugaauaugauuggaauggugggcggggcucagggaacacagccuggcagagauggcguugugcgggucugggacgugaaaaacccggaucuucugaauaaccaauucgggaccaugcccucucucacacuggccugucuuaccaagcagggacagguggaccugaaugaugcuguccucgcccugacggaccugggccucaucuacaccgcgaaguauccuaacuccagcgaccuggaucgccuuucccaaucucaucccauucugaauaugguugacaccaaaaagagcucccucaacaucagcggguacaauuuuucucugggagccgcugugaaagccggcgcuugcaugcuugaugggggaaacaugcuggagacaaucaaggugacaccucagaccauggacggcauucucaaauccauccugaaggucaaaagaagccugggcauguucgugucugauacgcccggggaacggaauccuuaugagaacauucucuacaagaucugucugagcggagacggcuggccguauauugccucccgcacaucuaucguugggagagcgugggaaaacaccacaguggaucuugagagcgacggaaagccccagaaagucggcccugccggguccaauaagagccugcagucugcuggauuucccaccggccucaccuacucccaacugaugacacugaaagauagcaugaugcagcuugacccuucugccaagacguggauugauaucgagggccggcccgaagacccgguggagaucgcucucuaccagccuauuuccgggugcuauauccacuucuuuagagaacccaccgaccugaaacaguucaagcaagaugccaaguacagccauggaauugacguugccgaucuguuuccugcucagcccggccucacauccgcggugaucgaggcccugccccgcaacaugguccuuaccugucaggggucugacgauauuaaacggcugcucgacagccagggaagacgcgauaucaagcugaucgacauugcucuguccaaagccgauucucggagauucgaaaaugccgugugggaccaaugcaaggaucuuugucacaugcauacaggcgucgugguugagaaaaagaagcgcgggggcaaagaggaaaucaccccucacugcgcucucauggacuguauuauguaugaugccgcggugagcggaggccugaacaucccgguccugcgggcugugcuccccagagacaugguuuuucgcacguccagcccuaaggugguccuguga

SEQ ID NO: 9145 - RNA, 1710 nt, Artificial Sequence
  derived and/or modified CDS sequence (opt5) from LASV(Lassa virus/H.sapiens-wt/NGA/2016/ISTH_1591;Clade II)__AVO03648__NP
augagcgccuccaaggaggugaaaucuuuccuguggacccagagccucagacgggaacuguccggcuacugcucuagcaucaaacuucaagucguuaaggacgcucaggcccugcuccacgggcuggauuuuuccgaggugucuaacgugcagcgccuuaugagaaagcagaaacgggacgauagcgaccugaagcgccucagagaucugaaucaagcggucaacaaucugguggaacucaaguccacacagcagaaaagcauucugcggguuggaacgcuuaccucugacgaucugcucacacuggcugccgaccuugagaagcugaaauccaaggugauccgcaccgaaagaccccucagcucuggcgucuauauggggaaccuguccagccagcaacuggagcagcggcgcgcccuccugaauaugauuggaauggugggcggggcucagggaacacagccuggcagagauggcguugugcgggucugggacgugaaaaacccggaucuucugaauaaccaauucgggaccaugcccucucucacacuggccugucuuaccaagcagggacagguggaccugaaugaugcuguccucgcccugacggaccugggccucaucuacaccgcgaaguauccuaacuccagcgaccuggaucgccuuucccaaucucaucccauucugaauaugguugacaccaaaaagagcucccucaacaucagcggguacaauuuuucucugggagccgcugugaaagccggcgcuugcaugcuugaugggggaaacaugcuggagaccaucaaggugacaccucagaccauggacggcauucucaaauccauccugaaggucaaaagaagccugggcauguucgugucugauacgcccggggaacggaauccuuaugagaacauucucuacaagaucugucugagcggagacggcuggccguauauugccucccgcacaucuaucguugggagagcgugggaaaacaccacaguggaucuugagagcgacggaaagccccagaaagucggcuccgccgggagcaauaagucucugcaguccgcuggauuuccuaccggccucaccuacagccaacugaugacacugaaagauucuaugaugcagcuugaccccuccgccaagacguggauugauaucgagggccggccugaagaccccguggagaucgcucucuaccagccgaugagcgggugcuauauucacuucuuuagagaaccuaccgaccugaaacaguucaagcaagaugccaaguacucccauggaaucgacguugccgaucuguuucccgcucagccuggccucacaucugcggugauugaggcccugccccgcaacaugguccuuaccugucaggggagcgacgaugugaaacggcugcucgacucccagggaagacgcgauaucaagcugauugacaucgcucugucuaaagccgauagccggagauucgaaaaugccgucugggaccaaugcaaggaucuuugucacaugcauacaggcgugguuguggagaaaaagaagcgcgggggcaaagaggaaaucacaccccacugcgcucucauggacuguauuauguaugaugccgcggucuccggaggccugaacaucccugugcugcgggcuguucucccgagagacaugguguuucgcacgagcucucccaaggucgugcuguga

SEQ ID NO: 9146 - RNA, 1710 nt, Artificial Sequence
  derived and/or modified CDS sequence (opt5) from LASV(Lassa virus/H.sapiens-wt/NGA/2016/ISTH_1604;Clade II)__AVO03542__NP
augagcgccuccaaggaggugaaaucuuuccuguggacccagagccucagacgggaacuguccggcuacugcucuaacaucaaacuucaagucguuaaggacgcucaggcccugcuccacgggcuggauuuuagcgagguguccaaugugcagcgccuuaugagaaagcagaaacgggacgauggagaccugaagcgccucagagaucugaaccaagcggucaauaaccugguggaacucaagucuacacagcagaaaagcauucugcggguuggcacgcuuuccagcgacgaucugcucacccuggcugccgaccuugagaagcugaaaucuaaggugauccgcacagaaagaccccucuccagcggggucuauaugggaaaucugucuacccagcaacuggaucagcggcgcgcccuccugaacaugauuggcaugguugggggaucccagggcacaagcgcuggcagagacgggaucgugcgggugugggauguccgcaauccugagcuucugaacaaucaguucggaaccaugccgucucucacacuggccugucuuaccaaacaaggccagguggaccugaacgaugcugugcaggcccucacggaccuggggcugauuuacaccgcgaaguaucccaauuccagcgaccucgauagacugucccaaucucauccuauccuuaacaugaucgacacaaagaaaagcuccauuaauaucagcggauacaacuuuucucugggcgccgcugucaaggccggggcuugcaugcucgauggaggcaauaugcuggagaccauuaaaguuagcccccaguccauggacggcauccuuaagucuauucugaaagugaagcggagccucgggauguucguguccgauacaccuggagaacgcaaccccuaugagaacauccuguacaaaauuugucugucuggcgacggguggccuuauaucgccagcagaaccuccaucacgggacgggcgugggaaaauacagucguggaucucgagagcgacaacaagccgaagaaacccggcaauaacgagucuaauagaucccugcagagcgccggguuuccugcuggacuuaccuacucucagcugaugacacucaaggauuccaugcugcaacuggaccccaacgccaaaaccuggauggauauugaaggccgcccugacgaccccguugagaucgcucuuuaccagccgaauagcggcugcuauauucacuucuuucgggaaccuaccgaucucaagcaguucaaacaggacgccaaguacucccaugggaucgauauuucugaccuguuugccgcucaacccggacugacaagcgcggugaucgaggcccucccuagaaacauggucaucacgugucagggcuccgaagaugugaagaaacugcuugagucucaggggcgcaaggacauucggcugguugauaucagccucuccaaagcugacagcagaaaguucgagaaugccgugugggaucaguauaaagaccugugccacaugcauaccggaauugucguggaaaagaagaaaaagggcgggaaagaggaaaucacaccccacugugcccugauggauugcauuauguuugacgcugccgucaugaacggccuugaugcgcgcgugcuccgggcuguucugcccagagacaugguguuccgcaccucuacaccucgggucgugcuguga

SEQ ID NO: 9147 - RNA, 1710 nt, Artificial Sequence
  derived and/or modified CDS sequence (opt5) from LASV(Lassa virus/H.sapiens-wt/NGA/2016/ISTH_1609;Clade II)__AVO03662__NP
augagcgccuccaaggaggugaaaucuuuccuguggacccagagccucagacgggaacuguccggcuacugcucuaacaucaaacuucaagucguuaaagacgcucaggcccugcuccacgggcuggauuuuagcgagguguccaaugugcagcgccuuaugagaaagcagaaacgggacgauggagaccugaagcgccucagagaucugaaccaagcggucaauaaccugguggaacucaagucuacacagcagaaaagcauucugcggguuggcacgcuuuccagcgacgaucugcucauccuggcugccgaccuugagaagcugaaaucuaaggugauucgcaccgaaagaccccucuccagcggggucuauaugggaaaucugucuucccagcaacuggaucagcggcgcgcccuccugaacaugaucggcaugacagggggaaaucagggcaccaacacaggcagagacgggauugugcggguuugggaugugaaaaaugcugagcuucugaacaaucaguucggaaccaugccuagccucacacuggccugucuuaccaagcaaggccaggucgaccugaacgaugcugugcaggcccucacggaccuggggcugaucuacaccgcgaaguaucccaauucuuccgaccucgaucgccugagccaaucccaucccauccuuaacaugauugacacaaagaagucuagccugaauaucuccggauacaacuuuagccucggcgccgcugugaaagccggggcuugcaugcuggauggaggcaacaugcuugagaccauuaaggucucuccucagacaauggacggcauccugaaauccauucucaagguuaaaaagagccuggggauguucgugucugauacccccggagaaagaaauccuuaugagaacauccuguacaagauuugucucagcggcgacggguggcccuauaucgccucccggacgucuaucacaggacgcgcgugggaaaauaccaugguggaucuggagacaaacaauaaaagccagaagccuggcaacaauggguccaacagaagccuucagucugccggauuuccggcuggccugaccuacucccaacucaugacccugaaagacagcaugcugcagcuugaucccaaugccaagacauggauggacauugagggccggccugaugaccccgucgaaaucgcucucuaccagccuucuuccgggugcuauauucacuucuuuagagagcccacggaccugaaacaguucaagcaagaugccaaguacagccauggaaucgacauuuccgaucuguuugccgcucagccgggccucaccucugcggugaucgaaguucugccucgcaacaugacaaucaccugucaggggagcgaggacauuaaaaagcugcuugaaucccagggacggaaagauaucaagcucguggacauuucucugagcaaacuggauuccagaaaguucgagaaugccgucugggaccaauuuaaggaucuuugccacaugcauacaggcaucgugguugagaaaaagaaaaagggcgggaaagaagagauuaccccgcacugugcucucauggacugcaucauguucgaugccgccgugaugggaggccuggacgcuaagguccugcgcgccgugcucccucgggauauggucuuuagaacgagcacacccaaggugguucuguga

SEQ ID NO: 9148 - RNA, 1710 nt, Artificial Sequence
  derived and/or modified CDS sequence (opt5) from LASV(Lassa virus/H.sapiens-wt/NGA/2016/ISTH_1610;Clade II)__AVO03604__NP
augagcgccuccaaggagaucaaaucuuuccuguggacccagagccucagacgggaacuguccggcuacugcucuagcauuaaacuucaaguggucaaggacgcucaggcccugcuccacgggcuggauuuuuccgagguuucuaacgugcagcgccuuaugagaaagcagaaacgggacgauagcgaccugaagcgccucagagaucugaaucaagcggugaacaaucuggucgaacucaaguccacccagcagaaaagcauccugcgggugggaacgcuuaccucugacgaucugcucacacuggcugccgaccuugagaagcugaaauccaagguuauucgcaccgaaagaccccucagcucuggcguguauauggggaaccuguccacacagcaacuggagcagcggcgcgcccuccugaauaugaucggaauggucggcggggcucagggaacccagccuggcagagauggcgugguucgggugugggacgucaaaaacccggaucuucugaauaaccaauucgggacaaugcccagccucacccuggccugucuuacgaagcagggacagguggaccugaaugaugcugugcucgcccugaccgaccugggccucauuuacacagcgaaguauccuaacucuuccgaccuggaucgccuuagccaaucccaucccauccugaauauggucgacaccaaaaagucuagccucaacaucuccggguacaauuuuagccugggagccgcuguuaaagccggcgcuugcaugcuugaugggggaaacaugcuggagacaauuaaggugaccccucagacgauggacggcauccucaaaucuauucugaaggugaaaagaucccugggcauguucgucagcgauacacccggggaacggaauccuuaugagaacauccucuacaagauuugucugucuggagacggcuggccguauaucgccagccgcaccuccauuguggggagagcgugggaaaacacaaccguugaucuugagucugacggaaagccccagaaagugggcaccgccgggagcaauaagucccugcagagcgcuggauuuccuacaggccucacguacucucaacugaugacccugaaagauuccaugaugcagcuugaccccagcgccaagacauggaucgauaucgagggccggccugaagaccccgucgagauugcucucuaccagccgaugucugggugcuauauccacuucuuuagagaaccuaccgaccugaaacaguucaagcaagaugccaaguacucccauggaauugacguggccgaucuguuucccgcucagccuggccucacaagcgcgguuaucgaggcccugccccgcaacauggugcuuaccugucagggguccgacgauauuaaaaagcugcucgacucucagggacggagagauaucaaacugaucgacauugcucugagcaagacggauucccgccgguucgaaaaugccgucugggaccaaugcaaagaucuuugucacaugcauacaggcguggucguggagaagaagaaaagagggggcaaggaggaaaucacaccccacugcgcccucauggacuguauuauguaugaugcugccguuucuggaggccugaacaucccugugcugcgcgcgguccucccgcgggacaugguguuuagaaccagcucccccaaaguugugcuguga

SEQ ID NO: 9149 - RNA, 1710 nt, Artificial Sequence
  derived and/or modified CDS sequence (opt5) from LASV(Lassa virus/H.sapiens-wt/NGA/2018/ISTH_0541;Clade II)__AVV65114__NP
augagcgccuccaaggaggugaaaucuuuccuguggacccagagccucagacgggaacuguccggcuacugcucuagcaucaaacuucaagucguuaaggacgcucaggcccugcuccacgggcuggauuuuuccgaggugucuaacgugcagcgccuuaugagaaagcagaaacgggacgauagcgaccugaagcgccucagagaucugaaucaagcggucaacaaucugguggaacucaaguccacacagcagaaaagcauucugcggguuggaacgcuuaccucugacgaucugcucacacuggcugccgaccuugagaagcugaaauccaaggugauccgcaccgaaagaccccucagcucuggcgucuauauggggaaccuguccacacagcaacuggagcagcggcgcgcccuccugaauaugauuggaauggugggcggggcucagggaacccagccuggcagagauggcguugugcgggucugggacgugaaaaacccggaucuucugaauaaccaauucgggacaaugcccagccucacccuggccugucuuacgaagcagggacagguggaccugaaugaugcuguccucgcccugaccgaccugggccucaucuacacagcgaaguauccuaacucuuccgaccuggaucgccuuagccaaucccaucccauucugaauaugguugacaccaaaaagucuagccucaacaucuccggguacaauuuuagccugggagccgcugugaaagccggcgcuugcaugcuugaugggggaaacaugcuggagacaaucaaggugaccccucagacgauggacggcauucucaaaucuauccugaaggucaaaagaucccugggcauguucgugagcgauacacccggggaacggaauccuuaugagaacauucucuacaagaucugucugucuggagacggcuggccguauauugccagccgcaccuccaucguugggagagcgugggaaaacacaaccguggaucuugagucugacggaaagccccagaaagucggcguggccgggagcaauaagucccugcagagcgcuggauuuccuaccggccucacauacucucaacugaugacgcugaaagauuccaugaugcagcuugaccccagcgccaagaccuggauugauaucgagggccggccugaagaccccguugagaucgcucucuaccagccgaugucugggugcuauauucacuucuuuagagaaccuacagaccugaaacaguucaagcaagaugccaaguuuucccauggaaucgacguggccgaucuguuccccgcucagccuggccucaccagcgcggucauugaggcccugccccgcaacauggugcuuacaugucagggguccgacgauaucaaacggcugcucgacucucagggaagacgcgauauuaagcugaucgacaucgcucugagcaaagccgauucccggagauuugaaaaugccgucugggaccaaugcaaggaucuuugucacaugcauaccggcgugguuguggagaaaaagaagcgcgggggcaaagaggaaauuacgccccacugcgcucucauggacuguaucauguacgaugccgcggucucuggaggccugaacauuccugugcugcgggcuguucucccgagagacaugguguuccgcacaagcucccccaaggucgugcuguga

SEQ ID NO: 9150 - RNA, 1710 nt, Artificial Sequence
  derived and/or modified CDS sequence (opt5) from LASV(Lassa virus/H.sapiens-wt/NGA/2018/ISTH_0664;Clade II)__AVV65096__NP
augagcgccuccaaggaggugaaaucuuuccuguggacccagagccucagacgggaacuguccggcuacugcucuagcaucaaacuucaagucguuaaggacgcucaggcccugcuccacgggcuggauuuuuccgaggugucuaacgugcagcgccuuaugagaaagcagaaacgggacgauagcgaccugaagcgccucagagaucugaaucaagcggucaacaaucugguggaacucaaguccacacagcagaaaagcauucugcggguuggaacgcuuaccucugacgaucugcucacacuggcugccgaccuugagaagcugaaauccaaggugauccgcaccgaaagaccccucagcucuggcgucuauauggggaaccuguccacacagcaacuggagcagcggcgcgcccuccugaauaugauuggaauggugggcgggacccagggaacacagccuggcagagauggcguugugcgggucugggacgugaaaaacccggaucuucugaauaaccaauucgggaccaugcccagccucacgcuggcuugucuuaccaagcagggacagguggaccugaaugaugccguccucgcucugacagaccugggccucaucuacaccgccaaguauccuaacucuuccgaccuggaucgccuuagccaaucccaucccauucugaauaugguugacaccaaaaagucuagccucaacaucuccggguacaauuuuagccugggagcggccgugaaagcuggcgccugcaugcuugaugggggaaacaugcuggagaccaucaaggugacgccucagacaauggacggcauucucaaaucuauccugaaggucaaaaagucccugggcauguucgugagcgauacccccggggaaagaaauccuuaugagaacauucucuacaagaucugucugucuggagacggcuggccguauauugcuagccggacauccaucguugggcgcgccugggaaaacaccaccguggaucuugagcccgacggaaaacugcagaaggucggcacaguggggucuaauaaaagccuccaguccgcgggauuuccuacgggccugaccuacagccaacugaugacacuuaaggauucuaugaugcagcucgaccccuccgccaaaaccuggauugauaucgagggcagaccugaagaccccguugagaucgcucuguaccagccgaugagcgggugcuauauucacuucuuucgggaaccuacagaccugaagcaguucaagcaagaugccaaauacucucauggaaucgacguggcugaucucuuucccgcccagccuggccugaccuccgccgucauugaggcgcuucccagaaacauggugcugacgugucaggggagcgacgauaucaagcgccuccuggacucccagggacggagagauauuaaacugaucgacaucucucuuagcaaggcugauucccgccgguucgaaaaugccgucugggaccaaugcaaagaucucugucacaugcauacaggcgugguuguggagaagaagaaaagagggggcaaggaggaaauuacaccccacugcgcucugauggacuguaucauguaugaugccgccgucucuggaggccugaacauuccugugcuccgcgcuguucugccgcgggacaugguguuuagaaccagcucccccaaagucgugcuuuga

SEQ ID NO: 9151 - RNA, 1710 nt, Artificial Sequence
  derived and/or modified CDS sequence (opt5) from LASV(Lassa virus/H.sapiens-wt/NGA/2018/ISTH_0959;Clade II)__AVV65100__NP
augagcgccuccaaggaggugaaaucuuuccuguggacccagagccucagacgggaacuguccggcuacugcucuaacaucaaacuucaagucguuaaggacgcucaggcccugcuccacgggcuggauuuuagcgagguguccaaugugcagcgccuuaugagaaagcagaaacgggacgauucugaccugaagcgccucagagaucugaaccaagcggucaauaaccugguggaacucaagagcacccagcagaaauccauucugcggguuggaacgcuuaccagcgacgaucugcucacacuggcugccgaccuugagaagcugaaaucuaaggugauccgcaccgaaagaccccucuccagcggcgucuauauggggaaucugucuacacagcaacuggagcagcggcgcgcccuccugaaccuuauuggaauggugggcggggcucagggaacccagccuggcagagauggcguugugcgggucugggacgugaaaaauccggaucugcucaacaaucaauucgggacaaugcccucccugacccuugccugucugacgaagcagggacagguggaccucaacgaugucguucuggcucugaccgaccucggccugaucuacacagccaaguauccuaauagcucugaccuugaucgccugucccaaagccaucccauucucaacaugguggacaccaaaaaguccucucugaauaucagcggguuuaacuucucccuuggagcggccgugaaagcuggcgccugcaugcuggaugggggaaauaugcucgagacaaucaaggucaccccucagacgauggacggcauucugaaaagcauccugaaggugaaaaagucucucggcauguuuguuuccgauacacccggggaaagaaacccuuacgagaacauucuguauaagaucugucuuagcggagacggcuggccguacauugcuucucggaccagcaucguggggcgcgccugggaaaauacaaccgucgaucuggaguccgacggaaaaccccacaaggugggcaccgcggggucuaacaaaagccuccaguccgccggauucccuacaggccugacguauagccagcugaugacccuuaaggauucuaugaugcaacucgaccccuccgcuaaaacauggauugauaucgagggcagaccugaagaccccguugagaucgcccuguaccagccgaugagcgggugcuacauucacuuuuuccgggaaccuaccgaccugaagcaguuuaagcaggaugcuaaauauucucauggaaucgacguggccgaucucuuccccgcccaaccuggccugacauccgcugucauugaggcgcuucccagaaauauggugcugaccugucaggggagcgacgauaucaagcgccuccuggacucccagggacggaaagauauuaagcugaucgacaucgcccuuucuaaaacggauagcagacgcuuugaaaacgcugucugggaccagugcaaggaucucugucauaugcacacaggcgugguuguggagaagaaaaagagagggggcaaagaggaaauuacaccccacugcgcccugauggacuguaucauguacgaugccgcugucuccggaggccugaauauuccugugcuccgggccguucugccgcgcgacaugguguuccggaccucuagccccaaggucgugcuuuga

SEQ ID NO: 9152 - RNA, 1710 nt, Artificial Sequence
  derived and/or modified CDS sequence (opt5) from LASV(Lassa virus/H.sapiens-wt/NGA/2018/ISTH_1024;Clade II)__AVV65106__NP
augagcgccuccaaggaggugaaaucuuuccuguggacccagagccucagacgggaacuguccggcuacugcucuagcaucaaacuucaagucguuaaggacgcucaggcccugcuccacgggcuggauuuuuccgaggugucuaacgugcagcgccuuaugagaaagcagaaacgggacgauagcgaccugaagcgccucagagaucugaaucaagcggucaacaaucugguggaacucaaguccacacagcagaaaagcguucugcgggugggaacgcuuucuuccgacgaucugcucacccuggcugccgaccuugagaagcugaaaagcaaggucauucgcacagaaagaccccucucuuccggcguguauauggggaaccugagcacccagcaacuggagcagcggcgcgcccuccugaauaugaucggaaugguuggcggggcucagggaacacagccuggcagagauggcgugguccgggugugggacgugaaaaacccggaucuucugaauaaccaauucgggaccaugcccucucucacacuggccugucuuaccaagcagggacaggucgaccugaaugaugcuguucucgcccugacggaccugggccucauuuacaccgcgaaguauccuaacuccagcgaccuggaucgccuuucccaaucucaucccauccugaauaugguggacaccaaaaagagcucccucaacauuagcggguacaauuuuucucugggagccgcugugaaagccggcgcuugcaugcuugaugggggaaacaugcuggagacaaucaaggucacaccucagaccaucgacggcauucucaaauccauccugaaggugaaaaagagccugggcauguucguuucugauacgcccggggaaagaaauccuuaugagaacauucucuacaagaucugucugagcggagacggcuggccguauauugccucccggacaucuaucguggggcgcgcgugggaaaacaccacagucgaucuugagagcgacggaaaaccccagaaggugggcaccgccggguccaauaaaagccugcagucugcuggauuuccuaccggccucacauacucccaacugaugacgcugaaggauagcaugaugcagcuugaccccucugccaaaaccuggauugauaucgagggcagaccugaagaccccguugagaucgcucucuaccagccgauguccgggugcuauauucacuucuuucgggaaccuacagaccugaagcaguucaagcaagaugccaaauacagccauggaaucgacguggucgaucuguuucccgcccagccuggccucaccuccgcugugauugaggcgcugcccagaaacaugguccuuacaugucaggggucugacgauaucaagcgccugcucgacagccagggacggagagauauuaaacugaucgacaucgcccuguccaaggcugauucucgccgguucgaaaaugccgugugggaccaaugcaaagaucuuugucacaugcauaccggcguuguggucgagaagaagaaaagagggggcaaggaggaaauuacgccccacugcgcccucauggacuguaucauguaugaugcugccgugagcggaggccugaacauuccuguucugcgcgcggugcucccgcgggacauggucuuuagaacauccagccccaaaguggugcuguga

SEQ ID NO: 9153 - RNA, 1710 nt, Artificial Sequence
  derived and/or modified CDS sequence (opt5) from LASV(Lassa virus/H.sapiens-wt/NGA/2018/ISTH_1079;Clade II)__AVV65108__NP
augagcgccuccaaggaggugaaaucuuuccuguggacccagagccucagacgggaacuguccggcuacugcucuaacaucaaacuucaagucguuaaggacgcucaggcccugcuccacgggcuggauuuuagcgagguguccaaugugcagcgccuuaugagaaagcagaaacgggacgauucugaccugaagcgccucagagaucugaaccaagcggucaauaaccugguggaacucaagagcacacagcagaaauccauucugcggguuggaacgcuuaccagcgacgaucugcucacacuggcugccgaccuugagaagcugaaaucuaaggugauccgcaccgaaagaccccucuccagcggcgucuauauggggaaucugucuacacagcaacuggagcagcggcgcgcccuccugaacaugauuggaauggugggcgggacccagggaacacagccuggcagagauggcguugugcgggucugggacgugaaaaauccggaucuucugaacaaucaauucgggaccaugcccucccucacgcuggcuugucuuaccaagcagggacagguggaccugaacgaugccguccucgcucugacagaccugggccucaucuacaccgccaaguauccuaauagcucugaccuggaucgccuuucccaaagccaucccauucugaacaugguugacaccaaaaaguccucucucaauaucagcggguacaacuuuucccugggagcggccgugaaagcuggcgccugcaugcuugaugggggaaauaugcuggagaccaucaaggugacgccucagacaauggacggcauucucaaaagcauccugaaggucaaaaagucucugggcauguucguguccgauacccccggggaaagaaacccuuaugagaacauucucuacaagaucugucugagcggagacggcuggccguauauugcuucucggacaagcaucguugggcgcgccugggaaaauaccaccguggaucuugaguccgacggaaaaccccagaaggucggcacagcggggucuaacaaaagccugcaguccgccggauuuccuacgggccucaccuacagccaacugaugacacugaaggauucuaugaugcagcuugaccccuccgcuaaaaccuggauugauaucgagggcagaccugaagaccccguggagaucgcccucuaccagccgauuagcgggugcuauauccacuucuuucgggaaccuacagaccugaagcaguucaagcaagaugcuaaauacucucauggaauugacguugccgaucuguuucccgcccagccuggccucaccuccgcugugaucgaggcgcugcccagaaauaugguccuuacgugucaggggagcgacgauauuaagcgccugcucgacucccagggacggagagauaucaaacugaucgacauuucucugagcaaggccgauucccgccgguucgaaaacgcugugugggaccaaugcaaagaucuuugucacaugcauacaggcgucgugguugagaagaagaaaagagggggcaaggaggaaaucacaccccacugcgcccucauggacuguauuauguaugaugccgcugugucuggaggccugaauaucccuguccugcgcgccgugcucccgcgggacaugguuuuuagaaccagcucccccaaagugguccuguga

SEQ ID NO: 9154 - RNA, 1710 nt, Artificial Sequence
  derived and/or modified CDS sequence (opt5) from LASV(Lassa virus/H.sapiens-wt/NGA/2018/ISTH_1375;Clade II)__AVV65116__NP
augagcgccuccaaggaggugaaaucuuuccuguggacccagagccucagacgggaacuguccggcuacugcucuaacaucaaacuucaagucguuaaagacgcucaggcccugcuccacgggcuggauuuuagcgagguguccaaugugcagcgccuuaugagaaagcagaaacgggacgauucugaccugaagcgccucagagaucugaaccaagcggucaauaaccugguggaacucaagagcacacagcagaaauccauucugcggguuggaacgcuuaccagcgacgaucugcucauccuggcugccgaccuugagaagcugaaaucuaaggugauucgcacagaaagaccccucuccagcggcgucuauauggggaaucugucuacccagcaacuggagcagcggcgcgcccuccugaaccuuaucggaauggugggcggggcucagggaacacagccuggcagagauggcguugugcgggucugggacgugaaaaauccggaucugcucaacaaucaauucgggaccaugcccucccugacacuugccugucugaccaagcagggacagguggaccucaacgaugcuguccuggcccugacggaccucggccugauuuacaccgcgaaguauccuaauagcucugaccuugaucgccugucccaaagccaucccauccucaacaugguugacacaaagaaguccucucugaauaucagcggguuuaacuucucccuuggagccgcugugaaagccggcgcuugcaugcuggaugggggaaauaugcucgagaccauuagaaucacaccucagaccauggacggcauucucaagagcauccugaaagugaagaaaucucugggcauguuugucuccgauacgcccggggaacggaacccuuacgagaacauucuguauaagaucugucuuagcggagacggcuggccguacauugccucucgcacaagcaucguggggagagcgugggaaaauaccacaguugaucuggaguccgacggaaagccccacaaagugggcaccgccgggucuaacaagagccuccaguccgcuggauucccuaccggccugacauauagccagcugaugacgcuuaaagauucuaugaugcaacucgaccccuccgccaagaccuggaucgauauugagggccggccugaagaccccgucgagaucgcucuguaccagccgaugagcgggugcuacauucacuuuuucagagaaccuacagaccugaaacaguuuaagcaggaugccaaguauucucauggaaucgacguggccgaucucuuccccgcucaaccuggccugaccuccgcgguuauugaggcccuuccccgcaauauggugcugacaugucaggggagcgacgauaucaaacggcuccuggacucccagggaagacgcgauaucaagcugauugacaucgcucuuucuaaagccgauagccggagauuugaaaacgccgucugggaccagugcaaggaucucugucauaugcacaccggcguggucguggagaaaaagaagcgcgggggcaaagaggaaauuacgccccacugcgcucugauggacuguaucauguacgaugccgcgguuuccggaggccugaauauuccugugcuccgggcuguccugccgagagacaugguguuccgcacaucuagccccaagguugugcuuuga

SEQ ID NO: 9155 - RNA, 1710 nt, Artificial Sequence
  derived and/or modified CDS sequence (opt5) from LASV(Lassa virus/H.sapiens-wt/NGA/2018/ISTH_1381;Clade II)__AVV65112__NP
augagcguguccaaggaggucaaaucuuuccuguggacccagagccucagacgggaacuguccggcuacugcucuagcaucaaacuucaaguugugaaggacgcccaggcucugcuccacgggcuggauuuuuccgaggugucuaacguccagcgccuuaugagaaagcagaaacgggacgauagcgaccugaagcgccucagagaucugaaucaagccgugaacaaucugguugaacucaaguccacacagcagaaaagcauucugcgggugggaacgcuuaccucugacgaucugcucacacuggcggcugaccuugagaagcugaaauccaaggucauccgcaccgaaagaccccucagcucuggcguguauauggggaaccuguccacacagcaacuggagcagcggcgcgcccuccugaauaugauuggaauggccggcggggcucagggaacccagccuggcagagauggcguugugcgggucugggacgugaaaaacccggaucuucugaauaaccaauucgggacaaugcccagccucacccuggccugucuuacgaagcagggacagguggaccugaaugaugcuguccucgcccugaccgaccugggccucaucuacacagcgaaguauccuaacucuuccgaccuggaucgccuuagccaaucccaucccauucugaauaugguugacaccaaaaagucuagccucaacaucuccggguacaauuuuagccugggagccgcugugaaagccggcgcuugcaugcuugaugggggaaacaugcuggagacaaucaaggugaccccucagacgauggacggcauucucaaaucuauccugaaggucaaaagaucccugggcauguucgugagcgauacacccggggaacggaauccuuaugagaacauucucuacaagaucugucugucuggagacggcuggccguauauugccagccgcaccuccaucguugggagagcgugggaaaacacaaccguggaucuugagucugacggaaagccccagaaaauuggcaauaccgggagcaacaagucccugcagagcgccggauuuccuacaggccucacguacucucaacugaugacccugaaagauuccaugaugcagcuugaccccagcgcuaagacauggaucgauaucgagggccggccugaagaccccgucgagauugcccucuaccagccgaugucugggugcuauauccacuucuuuagagaaccuaccgaccugaaacaguucaagcaagaugcuaaguacucccauggaauugacguggccgaucuguuucccgcccagccuggccucacaagcgcuguuaucgaggcgcugccccgcaauauggugcuuaccugucagggguccgacgauauuaaacggcugcucgaaucucagggaagacgcgacaucaagcugaucgauauugcccugagcaaagcugacucccggagauucgagaacgccgucugggaucaaugcaaggaccuuugucacaugcauacgggcguggucguggagaaaaagaagcgcgggggcaaagaagagaucacaccccacugcgcccucauggauuguauuauguaugacgcugccguuucuggaggccugaauaucccugugcugcgggcgguccucccgagagauaugguguuucgcaccagcucccccaagguugugcuguga

SEQ ID NO: 9156 - RNA, 1710 nt, Artificial Sequence
  derived and/or modified CDS sequence (opt5) from LASV(LASV003-NIG-2008;Clade II)__AIT17581__NP
augagcgccuccaaggaggugaaaucuuuccuguggacccagagccucagacgggaacuguccggcuacugcucuagcaucaaacuucaagucguuaaggacgcucaggcccugcuccacgggcuggauuuuuccgaggugucuaacgugcagcgccuuaugagaaagcagaaacgggacgauagcgaccugaagcgccucagagaucugaaucaagcggucaacaaucugguggaacucaaguccacccagcagaaaagcguucugcgggugggaacgcuuaccucugacgaucugcucacacuggcugccgaccuugagaagcugaaauccaaggucauucgcaccgaaagaccccucagcucuggcguguauauggggaaccuguccgcccagcaacuggagcagcggcgcacacuccugaauaugaucggaaugguuggcggggcucagggaacccagccuggcagagauggcgugguccgggugugggacgugaaaaacccggaucuucugaauaaccaauucgggacaaugcccagccucacccuggccugucuuacgaagcagggacaggucgaccugaaugauguugugcucgcucugaccgaccugggccucauuuacacagccaaguauccuaacucuuccgaccuggaucgccuuagccaaucccaucccauccugucuaugguggacaccaaaaagagcucccucaauauuagcggguacaacuuuucucugggagcggccgucaaagcuggcgccugcaugcuugaugggggaaauaugcuggagacaaucaaggugaccccucagacgauggacggcauccucaaauccauucugaagguuaaaaagagccugggcauguucgugucugauacacccggggaaagaaacccuuaugagaauauccucuacaagauuugucugagcggagacggcuggccguauaucgcuucccggaccucuauugucgggcgcgccugggaaaacacaaccguggaucuugagagcgacggaaaaccccagaagguuggcaccgcgggguccaacaaaagccugcagucugccggauuuccuacaggccucacguacucccaacugaugacccugaaggauagcaugaugcagcuugaccccucugcuaaaacauggaucgauauugagggcagaccugaagaccccguggagaucgcccucuaccagccgauguccgggugcuauauccacuucuuucgggaaccuaccgaccugaagcaguucaagcaagaugcuaaauacagccauggaauugacgucacagaucuguuucccgcccagccuggccucaccuccgccgugaucgaggcucugcccagaaauaugguccuuacgugucaggggucugacgauauuaagcgccugcucgacagccagggacggagagauaucaaacugauugacaucgcgcuguccaaggccgauucucgccgguucgaaaacgcugugugggaccaaugcaaagaucuuugucacaugcauacaggcguuguggucgagaagaagaaaagagggggcaaggaggaaaucacaccccacugcgcccucauggacuguauuauguaugaugccgcugugagcggaggccugaauaucccuguucugcgcgccgugcucccgcgggacauggucuuuagaaccuccagccccaaaguggugcuguga

SEQ ID NO: 9157 - RNA, 1710 nt, Artificial Sequence
  derived and/or modified CDS sequence (opt5) from LASV(LASV035-NIG-2009;Clade II)__AIT17589__NP
augagcgccuccaaggaggugaaaucuuuccuguggacccagagccucagacgggaacuguccggcuacugcucuagcaucaaacuucaagucguuaaagacgcucaggcccugcuccacgggcuggauuuuuccgaggugucuaacgugcagcgccuuaugagaaagcagaaacgggacgauagcgaccugaagcgccucagagaucugaaucaagcggucaacaaucugguggaacucaaguccacacagcagaaaagcauucugcggguuggaacgcuuaccucugacgaucugcucacacuggcugccgaccuugagaagcugaaauccaaggugauccgcaccgaaagaccccucagcucuggcgucuauauggggaaccuguccgcccagcaacuggagcagcggcgcgcucuccugaauaugauuggaauggugggcggggcccagggaacacagccuggcagagauggcguugugcgggucugggacgugaaaaacccggaucuucugaauaaccaauucgggaccaugcccagccucacacuggcuugucuuaccaagcagggacagguggaccugaaugaugccguccucgcgcugacggaccugggccucaucuacaccgccaaguauccuaacucuuccgaccuggaucgccuuagccaaucccaucccauucugaauaugguugacacaaagaagucuagccucaacaucuccggguacaauuuuagccugggagcugccgugaaagcuggcgccugcaugcuugaugggggaaacaugcuggagaccaucaaggugacaccucagaccauggacggcauucucaaaucuauccugaaggucaaaagaucccugggcauguucgugagcgauacgcccggggaacggaauccuuaugagaacauucucuacaagaucugucugucuggagacggcuggccguauauugcgagccgcacauccaucguugggagagccugggaaaacaccacaguggaucuugagucugacggaaagccccagaaagucggcaccaccgggagcaauaagucccugcagagcgcuggauuuccuacaggccucacguacucucaacugaugacccugaaagauuccaugaugcagcuugaccccagcgccaagacauggauugauaucgagggccggccugaagaccccguggagaucgcucucuaccagccgaugucugggugcuauauucacuucuuuagagaaccuaccgaccugaaacaguucaagcaagaugccaaguacucccauggaaucgacguugccgaucuguuucccgcucagccuggccucacaagcgcggugauugaggcccugccccgcaacaugguccuuaccugucagggguccgacgauaucaaaaagcugcucgacucucagggacggagagauauuaaacugaucgacaucgcucugagcaaggccgauucccgcaaauucgaaaaugccgugugggaccaaugcaaggaucuuugucacaugcauacgggcgucgugguugagaagaaaaagagagggggcaaagaggaaauuacaccccacugcgcucucauggacuguaucauguaugaugccgcggugucuggaggccugaacauuccuguccugcgggcugugcucccgcgcgacaugguuuuucggaccagcucccccaaggugguccuguga

SEQ ID NO: 9158 - RNA, 1710 nt, Artificial Sequence
  derived and/or modified CDS sequence (opt5) from LASV(LASV042-NIG-2009;Clade II)__AIT17593__NP
augagcgccuccaaggaggugaaaucuuuccuguggacccagagccucagacgggaacuguccggcuacugcucuagcaucaaacuucaagucguuaaagacgcucaggcccugcuccacgggcuggauuuuuccgaggugucuaacgugcagcgccuuaugagaaagcagaaacgggacgauggagaccugaagcgccucagagaucugaaucaagcggucaacaaucugguggaacucaagagcacacagcagaaauccauucugcggguuggcacgcuuaccagcgacgaucugcucacacuggcugccgaccuugagaagcugaaaucuaaggugauccgcaccgaaagaccccucuccagcggggucuauaugggaaaccugucuucccagcaacuggagcagcggcgcgcccuccugaauaugauuggcauggugggaggagcucagggcacacagccuggcagagaugggguugugcgggucugggacgugaaaaacccggaucuucugaauaaccaauucggaaccaugcccagccucacacuggccugucuuaccaagcagggccagguggaccugaaugaugcuguccucgcccugacggaccuggggcucaucuacaccgcgaaguauccuaacucuuccgaccuggaucgccuuagccaaucccaucccauucugaauaugguugacacaaagaagucuagccucaacaucuccggauacaauuuuagccugggcgccgcugugaaagccggggcuugcaugcuugauggaggcaacaugcuggagaccaucaaggugacaccucagaccauggacggcauucucaaaucuauccugaaggucaaaagaucccuggggauguucgugagcgauacgcccggagaacggaauccuuaugagaacauucucuacaagaucugucugucuggcgacggguggccguauauugccagccgcacauccaucguugggagagcgugggaaaacaccacaguggaucuugagucugacggcaagccccagaaagucggggccgcuggaagcaccaagucccugcagagcgccggcuuuccuaccggccucacauacucucaacugaugacgcugaaagauuccaugaugcagcuugaccccagcgcuaagaccuggauugauaucgaggggcggccugaagaccccguggagaucgcccucuaccagccgaugucuggaugcuauauucacuucuuuagagaaccuacagaccugaaacaguucaagcaagaugccaaguacucccauggcaucgacguugcugaucuguuucccgcgcagccugggcucaccagcgccgugauugaggcucugccccgcaauaugguccuuacaugucagggauccgacgauaucaaacggcugcucgacucucagggcagacgcgauauuaagcugaucgacaucgcccugagcaaaguggauucccggagauucgaaaacgccgucugggaccaaugcaaggaucuuugucacaugcauaccggggugguuguggagaaaaagaagcgcggcggaaaagaggaaauuacgccccacugcgcucucauggacuguaucauguaugaugccgcggucucuggcgggcugaauauuccugugcugcgggcuguucucccgagagacaugguguuucgcacaagcucccccaaggucgugcuguga

SEQ ID NO: 9159 - RNA, 1710 nt, Artificial Sequence
  derived and/or modified CDS sequence (opt5) from LASV(LASV049-NIG-2009;Clade II)__AIT17605__NP
augagcgccuccaaggaggugaaaucuuuccuguggacccagagccucagacgggaacuguccggcuacugcucuagcaucaaacuucaagucguuaaggacgcucaggcccugcuccacgggcuggauuuuuccgaggugucuaacgugcagcgccuuaugagaaagcagaaacgggacgauagcgaccugaagcgccucagagaucugaaucaagcggucaacaaucugguggaacucaaguccacacagcagaaaagcauucugcggguuggaacgcuuaccucugacgaucugcucacacuggcugccgaccuugagaagcugaaauccaaggugauccgcaccgaaagaccccucagcucuggcgucuauauggggaaccuguccacacagcaacuggagcagcggcgcgcccuccugaauaugauuggaauggcuggcggggcccagggaacccagccuggcagagauggcgugguucgggugugggacgucaaaaacccggaucuucugaauaaccaauucgggacaaugcccagccucacccuggcuugucuuacgaagcagggacagguggaccugaaugaugccgugcucgcgcugaccgaccugggccucaucuacacagccaaguauccuaacucuuccgaccuggaucgccuuagccaaucccaucccauucugaauauggucgacaccaaaaagucuagccucaacaucuccggguacaauuuuagccugggagcugccguuaaagcuggcgccugcaugcuugaugggggaaacaugcuggagacaaucaaggugaccccucagacgauggacggcauucucaaaucuauccugaaggugaaaaagucccugggcauguucgucagcgauacacccggggaaagaaauccuuaugagaacauucucuacaagaucugucugucuggagacggcuggccguauauugcgagccggaccuccaucguggggcgcgccugggaaaacacaaccguugaucuugagucugacggaaaaccccagaaggugggcaccgcugggagcaauaaaucccugcagagcgccggauuuccuacaggccucacguacucucaacugaugacccugaaggauuccaugaugcagcuugaccccagcgcuaaaacauggauugauaucgagggcagaccugaagaccccgucgagaucgcccucuaccagccgaugucugggugcuauauucacuucuuucgggaaccuaccgaccugaagcaguucaagcaagaugccaaauacucccauggaaucgacguggcugaucuguuuagcgcgcagcccggccucacauccgccguuauugaggcucugccuagaaacauggugcuuaccugucaggggucugacgauaucaagcgccugcucgacagccagggacggagagauauuaaacugaucgacaucgcccuguccaaggccgauucucgccgguucgaaaaugcugucugggaccaaugcaaagaucuuugucacaugcauacgggcguggucguggagaagaagaaaagagggggcaaggaggaaauuacaccccacugcgcccucauggacuguaucauguaugaugcggcuguuagcggaggccugaacauucccgugcugcgcgccguccucccucgggacaugguguuuagaaccuccagcccgaaaguugugcuguga

SEQ ID NO: 9160 - RNA, 1710 nt, Artificial Sequence
  derived and/or modified CDS sequence (opt5) from LASV(LASV052-NIG-2008;Clade II)__AIT17609__NP
augagcgccuccaaggaggugaaaucuuuccuguggacccagagccucagacgggaacuguccggcuacugcucuagcaucaaacuucaagucguuaaggacgcucaggcccugcuccacgggcuggauuuuuccgaggugucuaacgugcagcgccuuaugagaaagcagaaacgggacgauagcgaccugaagcgccucagagaucugaaucaagcggucaacaaucugguggaacucaaguccacacagcagaaaagcauucugcggguuggaacgcuuaccucugacgaucugcucacacuggcugccgaccuugagaagcugaaauccaaggugauccgcaccgaaagaccccucagcucuggcgucuauauggggaaccuguccacacagcaacuggagcagcggcgcgcccuccugaauaugauuggaauggcuggcggggcccagggaacccagccuggcagagauggcgugguucgggugugggacgucaaaaacccggaucuucugaauaaccaauucgggacaaugcccagccucacccuggcuugucuuacgaagcagggacagguggaccugaaugaugccgugcucgcgcugaccgaccugggccucaucuacacagccaaguauccuaacucuuccgaccuggaucgccuuagccaaucccaucccauucugaauauggucgacaccaaaaagucuagccucaacaucuccggguacaauuuuagccugggagcugccguuaaagcuggcgccugcaugcuugaugggggaaacaugcuggagacaaucaaggugaccccucagacgauggacggcauucucaaaucuauccugaaggugaaaagaucccugggcauguucgucagcgauacacccggggaacggaauccuuaugagaacauucucuacaagaucugucugucuggagacggcuggccguauauugcgagccgcaccuccaucguggggagagccugggaaaacacaaccguugaucuugagucugacggaaagccccagaaagugggcgcugccgggagcaauaagucccugcagagcgcuggauuuccuaccggccucacauacucucaacugaugacgcugaaagauuccaugaugcagcuugaccccagcgccaagaccuggauugauaucgagggccggccugaagaccccgucgagaucgcccucuaccagccgaugucugggugcuauauucacuucuuuagagaaccuacagaccugaaacaguucaagcaagaugcuaaguacucccauggaaucgacguggcggaucuguuucccgcccagccuggccucaccagcgcuguuauugaggcccugccccgcaacauggugcuuacaugucagggguccgacgauaucaaacggcugcucgacucucagggaagacgcgauauuaagcugaucgacaucgcccugagcaaagcugauucccggagauucgaaaaugccgucugggaccaaugcaaggaucuuugucacaugcauaccggcguggucguggagaaaaagaagcgcgggggcaaagaggaaauuacgccccacugcgcgcucauggacuguaucauguaugaugcugccguuucuggaggccugaacauuccugugcugcgggccguccucccgagagacaugguguuucgcacaagcucccccaagguugugcuguga

SEQ ID NO: 9161 - RNA, 1710 nt, Artificial Sequence
  derived and/or modified CDS sequence (opt5) from LASV(LASV056-NIG-2008;Clade II)__AIT17613__NP
augagcgccuccaaggaggugaaaucuuuccuguggacccagagccucagacgggaacuguccggcuacugcucuaacaucaaacuucaagucguuaaggacgcucaggcccugcuccacgggcuggauuuuagcgagguguccaaugugcagcgccuuaugagaaagcagaaacgggacgauucugaccugaagcgccucagagaucugaaccaagcggucaauaaccugguggaacucaagagcacccagcagaaauccauucugcggguuggaacgcuuaccagcgacgaucugcucacacuggcugccgaccuugagaagcugaaaucuaaggugauccgcaccgaaagaccccucuccagcggcgucuauauggggaaucugucuacacagcaacuggagcagcggcgcgcccuccugaacaugauuggaauggugggcggggcucagggaacccagccuggcagagauggcguugugcgggucugggacgugaaaaauccggaucuucugaacaaucaauucgggacaaugcccucccucacccuggccugucuuacgaagcagggacagguggaccugaacgaugcuguccucgcccugaccgaccugggccucaucuacacagcgaaguauccuaauagcucugaccuggaucgccuuucccaaagccaucccauucugaacaugguugacaccaaaaaguccucucucaauaucagcggguacaacuuuucccugggagccgcugugaaagccggcgcuugcaugcuugaugggggaaauaugcuggagacaaucaaggugaccccucagacgauggacggcauucucaaaagcauccugaaggucaaaagaucucugggcauguucguguccgauacacccggggaacggaacccuuaugagaacauucucuacaagaucugucugagcggagacggcuggccguauauugccucucgcaccagcaucguugggagagcgugggaaaauacaaccguggaucuugaguccgacggaaagccccagaaagucggcaccgccgggucuaacaagagccugcaguccgcuggauuuccuacaggccucacguacagccaacugaugacccugaaagauucuaugaugcagcuugaccccuccgccaagacauggauugauaucgagggccggccugaagaccccguggagaucgcucucuaccagccgaugagcgggugcuauauucacuucuuuagagaaccuaccgaccugaaacaguucaagcaagaugccaaguacucucauggaaucgacguugccgaucuguuucccgcucagccuggccucacauccgcggugauugaggcccugccccgcaauaugguccuuaccugucaggggagcgacgauaucaaacggcugcucgacucccagggaagacgcgauauuaagcugaucgacaucgcucugucuaaaacggauagccggagauucgaaaacgccgugugggaccaaugcaaggaucuuugucacaugcauacaggcgucgugguugagaaaaagaagcgcgggggcaaagaggaaauuacaccccacugcgcccucauggacuguaucauguaugaugcugccguguccggaggccugaauauuccuguccugcgggcggugcucccgagagacaugguuuuucgcaccucuagccccaaggugguccuguga

SEQ ID NO: 9162 - RNA, 1710 nt, Artificial Sequence
  derived and/or modified CDS sequence (opt5) from LASV(LASV058-NIG-2008;Clade II)__AIT17617__NP
augagcgccuccaaggaggugaaaucuuuccuguggacccagagccucagacgggaacuguccggcuacugcucuagcaucaaacuucaagucguuaaagacgcucaggcccugcuccacgggcuggauuuuuccgaggugucuaacgugcagcgccuuaugagaaagcagaaacgggacgauagcgaccugaagcgccucagagaucugaaucaagcggucaacaaucugguggaacucaaguccacacagcagaaaagcauucugcggguuggaacgcuuaccucugacgaucugcucacacuggcugccgaccuugagaagcugaaauccaaggugauccgcaccgaaagaccccucagcucuggcgucuauauggggaaccuguccgcccagcaacuggagcagcggcgcgcucuccugaauaugauuggaauggugggcggggcccagggaacacagccuggcagagauggcguugugcgggucugggacgugaaaaacccggaucuucugaauaaccaauucgggaccaugcccagccucacacuggcuugucuuaccaagcagggacagguggaccugaaugaugccguccucgcgcugacggaccugggccucaucuacaccgccaaguauccuaacucuuccgaccuggaucgccuuagccaaucccaucccauucugaauaugguugacacaaagaagucuagccucaacaucuccggguuuaauuucagccugggagcugccgugaaagcuggcgccugcaugcuugaugggggaaacaugcuggagaccaucaaggugacaccucagaccauggacggcauucucaaaucuauccugaaggucaaaagaucccugggcauguuugugagcgauacgcccggggaacggaauccuuacgagaacauucucuauaagaucugucugucuggagacggcuggccguacauugcgagccgcacauccaucguugggagagccugggaaaacaccacaguggaucuugagucugacggaaagccccagaaagucggcaccgcugggagcaauaagucccugcagagcgccggauucccuaccggccucacauauucucaacugaugacgcugaaagauuccaugaugcagcuugaccccagcgcuaagaccuggauugauaucgagggccggccugaagaccccguggagaucgcccucuaccagccgaugucugggugcuacauucacuuuuucagagaaccuacagaccugaaacaguuuaagcaagaugccaaguauucccauggaaucgacguugcugaucuguuccccgcgcagccuggccucaccagcgccgugauugaggcucugccccgcaacaugguccuuacaugucagggguccgacgauaucaaacggcugcucgacucucagggaagacgcgauauuaagcugaucgacaucgcccugagcaaagccgauucccggagauuugaaaaugcugugugggaccaaugcaaggaucuuugucacaugcauaccggcgucgugguugagaaaaagaagcgcgggggcaaagaggaaauuacgccccacugcgcccucauggacuguaucauguacgaugcggcugugucuggaggccugaacauuccuguccugcgggccgugcucccgagagacaugguuuuccgcacaagcucccccaaggugguccuguga

SEQ ID NO: 9163 - RNA, 1710 nt, Artificial Sequence
  derived and/or modified CDS sequence (opt5) from LASV(LASV063-NIG-2009;Clade II)__AIT17621__NP
augagcgccuccaaggaggugaaaucuuuccuguggacccagagccucagacgggaacuguccggcuacugcucuagcaucaaacuucaagucguuaaagacgcucaggcccugcuccacgggcuggauuuuuccgaggugacaaacgugcagcgccuuaugagaaagcagaaacgggacgauucugaccugaagcgccucagagaucugaaucaagcggucaacaaucugguggaacucaagagcacgcagcagaaauccauucugcggguuggaacccuuacaagcgacgaucugcucacccuggcugccgaccuugagaagcugaaaucuaaggugauccgcacagaaagaccccucuccagcggcgucuauauggggaaccugucuacccagcaacuggagcagcggcgcgcccuccugaauaugauuggaauggugggcggggcucagggaacacagccuggcagagauggcguugugcgggucugggacgugaaaaacccggaucuucugaauaaccaauucgggaccaugcccucccucacgcuggccugucuuaccaagcagggacagguggaccugaaugaugcuguccucgcccugacagaccugggccucaucuacaccgcgaaguauccuaacagcucugaccuggaucgccuuucccaaagccaucccauucugaauaugguugacacaaagaaguccucucucaacaucagcggguacaauuuuucccugggagccgcugugaaagccggcgcuugcaugcuugaugggggaaacaugcuggagaccaucaaggugacgccucagacaauggacggcauucucaaaagcauccugaaggucaaaagaucucugggcauguucguguccgauacccccggggaacggaauccuuaugagaacauucucuacaagaucugucugagcggagacggcuggccguauauugccucucgcacaagcaucguugggagagcgugggaaaacaccaccguggaucuugaguccgacggaaagccccagaaagucggcauugccgggucuaauaagagccugcaguccgcuggauuuccuacaggccucacguacagccaacugaugacccugaaagauucuaugaugcagcuugaccccuccgccaagacauggaucgauaucgagggccggccugaagaccccguggagauugcucucuaccagccgaugagcgggugcuauauccacuucuuuagagaaccuaccgaccugaaacaguucaagcaagaugccaaguacucucauggaauugacguugccgaucuguuucccgcucagccuggccucacauccgcggugaucgaggcccugccccgcaacaugguccuuaccugucaggggagcgacgauauuaaacggcugcucgacucccagggaagacgcgauaucaagcugaucgacauugcucugucuaaagccgauagccggaaguucgaaaaugccgugugggaccaaugcaaagaucuuugucacaugcauacgggcgucgugguugagaagaagaaaagagggggcaaggaggaaaucacaccccacugcgcucucauggacuguauuauguaugaugccgcgguguccggaggccugaacaucccuguccugcgcgcugugcucccgcgggacaugguuuuuagaaccucuagccccaaagugguccuguga

SEQ ID NO: 9164 - RNA, 1710 nt, Artificial Sequence
  derived and/or modified CDS sequence (opt5) from LASV(LASV1000-NIG-2009;Clade II)__AIT17783__NP
augagcgccuccaaggaggugaaaucuuuccuguggacccagagccucagacgggaacuguccggcuacugcucuaacaucaaacuucaagucguuaaggacgcucaggcccugcuccacgggcuggauuuuagcgagguguccaaugugcagcgccuuaugagaaagcagaaacgggacgauucugaccugaagcgccucagagaucugaaccaagcggucaauaaccugguggaacucaagagcacacagcagaaauccauucugcggguuggaacgcuuaccagcgacgaucugcucacacuggcugccgaccuugagaagcugaaaucuaaggugauccgcaccgaaagaccccucuccagcggcgucuauauggggaaucugucuacacagcaacuggagcagcggcgcgcccuccugaacaugauuggaauggugggcggggcucagggaacccagccuggcagagauggcguugugcgggucugggacgugaaaaauccggaucuucugaacaaucaauucgggacaaugcccucccucacccuggccugucuuacgaagcagggacagguggaccugaacgaugucguucucgcucugaccgaccugggccucaucuacacagccaaguauccuaauagcucugaccuggaucgccuuucccaaagccaucccauucugaacaugguggacaccaaaaaguccucucucaauaucagcggguacaacuuuucccugggagcggccgugaaagcuggcgccugcaugcuugaugggggaaauaugcuggagacaaucaaggucaccccucagacgauggacggcauucucaaaagcauccugaaggugaaaaagucucugggcauguucguuuccgauacacccggggaaagaaacccuuaugagaacauucucuacaagaucugucugagcggagacggcuggccguauauugcuucucggaccagcaucguggggcgcgccugggaaaauacaaccgucgaucuugaguccgacggaaaaccccagaaggugggcaccgcggggucuaacaaaagccugcaguccgccggauuuccuacaggccucacguacagccaacugaugacccugaaggauucuaugaugcagcuugaccccuccgcuaaaacauggauugauaucgagggcagaccugaagaccccguugagaucgcccucuaccagccggugagcgggugcuauauucacuucuuucgggaaccuaccgaccugaagcaguucaagcaagaugcuaaauacucucauggaaucgacgucgccgaucuguuucccgcccagccuggccucacauccgcugugauugaggcgcugcccagaaauaugguccuuaccugucaggggagcgacgauaucaagcgccugcucgacucccagggacggagagauauuaaacugaucgacaucgcccugucuaaggcugauagccgccgguucgaaaacgccgugugggaccaaugcaaagaucuuugucacaugcauacgggcguuguggucgagaagaagaaaagagggggcaaggaggaaauuacaccccacugcgcccucauggacuguaucauguaugaugcugccguguccggaggccugaauauuccuguucugcgcgcggugcucccgcgggacauggucuuuagaaccucuagccccaaaguggugcuguga

SEQ ID NO: 9165 - RNA, 1710 nt, Artificial Sequence
  derived and/or modified CDS sequence (opt5) from LASV(LASV1008-NIG-2009;Clade II)__AIT17787__NP
augagcgccuccaaggaggugaaaucuuuccuguggacccagagccucagacgggaacuguccggcuacugcucuaacaucaaacuucaagucguuaaggacgcucaggcccugcuccacgggcuggauuuuagcgagguguccaaugugcagcgccuuaugagaaagcagaaacgggacgauggagaccugaagcgccucagagaucugaaccaagcggucaauaaccugguggaacucaagucuacccagcagaaaagcauucugcggguuggcacgcuuaccuccgacgaucugcucacacuggcugccgaccuugagaagcugaaaagcaaggugauccgcaccgaaagaccccucucuuccggggucuauaugggaaaucugagcacacagcaacuggagcagcggcgcgcccuccugaacaugauuggcaugguugggggagcucagggcacccagccuggcagagaugggguggugcgggucugggacgugaaaaauccggaucuucugaacaaucaauucggaacaaugcccucucucacccuggccugucuuacgaagcagggccagguggaccugaacgaugcuguccucgcccugaccgaccuggggcucaucuacacagcgaaguauccuaauuccagcgaccuggaucgccuuucucaaucccaucccauucugaacaugguugacaccaaaaagagcucccucaauaucucuggauacaacuuuagccugggcgccgcugugaaagccggggcuugcaugcuugauggaggcaauaugcuggagacaaucaaggugaccccucagacgauggacggcauucucaaauccauccugaaggucaaaaagagccuggggauguucgugucugauacacccggagaaagaaacccuuaugagaacauucucuacaagaucugucuguccggcgacggguggccguauauugccagccggaccucuaucguuggacgcgcgugggaaaauacaaccguggaucuugagagcgacggcaaaccccagaaggucgggaccgccggauccaacaaaucucugcagagcgcuggcuuuccuacaggccucacguacucccaacugaugacccugaaggauagcaugaugcagcuugaccccucugccaaaacauggauugauaucgaggggagaccugaagaccccguggagaucgcucucuaccagccgauguccggaugcuauauucacuucuuucgggaaccuaccgaccugaagcaguucaagcaagaugccaaauacagccauggcaucgacguuacagaucuguuuucugcccagcccgggcucaccuccgcugugauugaggcgcugccuagaaauaugguccuuacgugucagggaagcgacgauaucaagcgccugcucgacucccagggccggagagauauuaaacugaucgacaucgcccugucuaagguggauagccgccgguucgaaaacgcugucugggaccaaugcaaagaucuuugucacaugcauacaggggugguuguggagaagaagaaaagaggcggaaaggaggaaauuacaccccacugcgcccucauggacuguaucauguaugaugccgcugucuccggcgggcugaauauucccgugcugcgcgccguucucccucgggacaugguguuuagaaccucuagcccgaaagucgugcuguga

SEQ ID NO: 9166 - RNA, 1710 nt, Artificial Sequence
  derived and/or modified CDS sequence (opt5) from LASV(LASV1015-NIG-2009;Clade II)__AIT17795__NP
augagcgccuccaaggaggugaaaucuuuccuguggacccagagccucagacgggaacuguccggcuacugcucuagcaucaaacuucaagucguuaaggacgcucaggcccugcuccacgggcuggauuuuuccgaggugucuaacgugcagcgccuuaugagaaagcagaaacgggacgauagcgaccugaagcgccucagagaucugaaucaagcggucaacaaucugguggaacucaaguccacacagcagaaaagcauucugcggguuggaacgcuuaccucugacgaucugcucacacuggcugccgaccuugagaagcugaaauccaaggugauccgcaccgaaagaccccucagcucuggcgucuauauggggaaccuguccacacagcaacuggagcagcggcgcgcccuccugaauaugauuggaauggugggcggggcucagggaacccagccuggcagagauggcguugugcgggucugggacgugaaaaacccggaucuucugaauaaccaauucgggacaaugcccagccucacccuggccugucuuacgaagcagggacagguggaccugaaugaugcuguccucgcccugaccgaccugggccucaucuacacagcgaaguauccuaacucuuccgaccuggaucgccuuagccaaucccaucccauucugaauaugguugacaccaaaaagucuagccucaacaucuccggguacaauuuuagccugggagccgcugugaaagccggcgcuugcaugcuugaugggggaaacaugcuggagacaaucaaggugaccccucagacgauggacggcauucucaaaucuauccugaaggucaaaagaucccugggcauguucgugagcgauacacccggggaacggaauccuuaugagaacauucucuacaagaucugucugucuggagacggcuggccguauauugccagccgcaccuccaucguugggagagcgugggaaaacacaaccguggaucuugagucugacggaaagccccagaaagucggcaccgccgggagcaauaagucccugcagagcgcuggauuuccuacaggccucacguacucucaacugaugacccugaaagauuccaugaugcagcuugaccccagcgccaagacauggauugauaucgagggccggccugaagaccccguggagaucgcucucuaccagccgaugucugggugcuauauucacuucuuuagagaaccuaccgaccugaaacaguucaagcaagaugccaaguacucccauggaaucgacguugccgaucuguuucccgcucagccuggccucacaagcgcggugauugaggcccugccccgcaacaugguccuuaccugucagggguccgacgauaucaaaaagcugcucgacucucagggacggagagauauuaaacugaucgacaucgcucugagcaaggccgauucccgccgguucgaaaaugccgugugggaccaaugcaaagaucuuugucacaugcauacgggcgucgugguugagaagaagaaaagagggggcaaggaggaaauuacaccccacugcgcucucauggacuguaucauguaugaugccgcggugucuggaggccugaacauuccuguccugcgcgcugugcucccgcgggacaugguuuuuagaaccagcucccccaaagugguccuguga

SEQ ID NO: 9167 - RNA, 1710 nt, Artificial Sequence
  derived and/or modified CDS sequence (opt5) from LASV(LASV1016-NIG-2009;Clade II)__AIT17799__NP
augagcgccuccaaggaggugaaaucuuuccuguggacccagagccucagacgggaacuguccggcuacugcucuaacaucaaacuucaagucguuaaagacgcucaggcccugcuccacgggcuggauuuuagcgagguguccaaugugcagcgccuuaugagaaagcagaaacgggacgauucugaccugaagcgccucagagaucugaaccaagcggucaauaaccugguggaacucaagagcacacagcagaaauccauucugcggguuggaacgcuuaccagcgacgaucugcucacacuggcugccgaccuugagaagcugaaaucuaaggugauccgcaccgaaagaccccucuccagcggcgucuauauggggaaucugucugcccagcaacuggagcagcggcgcgcucuccugaacaugauuggaauggugggcggggcccagggaacacagccuggcagagauggcguugugcgggucugggacgugaaaaauccggaucuucugaacaaucaauucgggaccaugcccucccucacacuggcuugucuuaccaagcagggacagguggaccugaacgaugccguccucgcgcugacggaccugggccucaucuacaccgccaaguauccuaauagcucugaccuggaucgccuuucccaaagccaucccauucugaacaugguugacacaaagaaguccucucucaauaucagcggguacaacuuuucccugggagcugccgugaaagcuggcgccugcaugcuugaugggggaaauaugcuggagaccaucaaggugacaccucagaccauggacggcauucucaaaagcauccugaaggucaaaaagucucugggcauguucguguccgauacgcccggggaaagaaacccuuaugagaacauucucuacaagaucugucugagcggagacggcuggccguauauugcgucucggacaagcaucguugggcgcgccugggaaaauaccacaguggaucuugaguccgacggaaaaccccagaaggucggcaccgcugggucuaacaaaagccugcaguccgccggauuuccuaccggccucacauacagccaacugaugacgcugaaggauucuaugaugcagcuugaccccuccgcuaaaaccuggauugauaucgagggcagaccugaagaccccguggagaucgcccucuaccagccgaugagcgggugcuauauucacuucuuucgggaaccuacagaccugaagcaguucaagcaagaugccaaauacucucauggaaucgacguugcugaucuguuucccgcgcagccuggccucaccuccgccgugauugaggcucugcccagaaauaugguccuuacaugucaggggagcgacgauaucaagcgccugcucgacucccagggacggagagauauuaaacugaucgacaucgcccugucuaaggccgauagccgccgguucgaaaacgcugugugggaccaaugcaaagaucuuugucacaugcauaccggcgucgugguugagaagaagaaaagagggggcaaggaggaaauuacgccccacugcgcccucauggacuguaucauguaugaugcggcuguguccggaggccugaauauuccuguccugcgcgccgugcucccgcgggacaugguuuuuagaacaucuagccccaaagugguccuguga

SEQ ID NO: 9168 - RNA, 1710 nt, Artificial Sequence
  derived and/or modified CDS sequence (opt5) from LASV(LASV221-NIG-2010;Clade II)__AIT17625__NP
augagcgccuccaaggaggugaaaucuuuccuguggacccagagccucagacgggaacuguccggcuacugcucuagcaucaaacuucaagucguuaaggacgcucaggcccugcuccacgggcuggauuuuuccgaggugucuaacgugcagcgccuuaugagaaagcagcggcgcgacgauagcgaccugaaaagacuccgggaucugaaucaagcggucaacaaucugguggaacucaaguccacacagcaaaagagcauucugcgcguuggaacgcuuaccucugacgaucugcucacacuggcugccgaccuugagaaacugaaguccaaagugaucagaaccgaacggccccucagcucuggcgucuauauggggaaccuguccacacagcagcuggagcagcgcagagcccuccugaauaugauuggaauggugggcggggcucagggaacccagccuggccgggauggcguugugcgcgucugggacgugaagaacccggaucuucugaauaaccaauucgggacaaugcccagccucacccuggccugucuuacgaaacagggacagguggaccugaaugaugcuguccucgcccugaccgaccugggccucaucuacacagcgaaguauccuaacucuuccgaccuggauagacuuagccaaucccaucccauucugaauaugguugacaccaagaaaucuagccucaacaucuccggguacaauuuuagccugggagccgcugugaaggccggcgcuugcaugcuugaugggggaaacaugcuggagacaaucaaagugaccccucagacggucgacggcauucucaagucuauccugaaagugaagcggucccugggcauguucguuagcgauacacccggggaacgcaauccuuaugagaacauucucuacaaaaucugucugucuggagacggcuggccguauauugccagcagaaccuccaucguggggcgggcgugggaaaacacaaccgucgaucuugagucugacggaaagccccagaaggugggcaccgccgggagcaauaaaucccugcagagcgcuggauuuccuacaggccucacguacucucaacugaugacccugaaggauuccaugaugcagcuugaccccagcgccaaaacauggauugauaucgagggcagaccugaagaccccguugagaucgcucucuaccagccgaugucugggugcuauauucacuucuuucgcgaaccuaccgaccugaagcaguucaaacaagaugccaaguacucccauggaaucgacguggccgaucuguuucccgcucagccuggccucacaagcgcggucauugaggcccugccccggaacauggugcuuaccugucagggguccgacgauaucaagagacugcucgacucucagggacgccgggauauuaaacugaucgacaucgcucugagcaaggccgauuccagaaaauucgaaaaugccgucugggaccaaugcaaggaucuuugucacaugcauacgggcgugguuguggagaaaaagaagcgcgggggcaaagaggaaauuacaccccacugcgcucucauggacuguaucauguaugaugccgcggucucuggaggccugaacauuccugugcugcgggcuguucucccgagagacaugguguuucgcaccagcucccccaaggucgugcuguga

SEQ ID NO: 9169 - RNA, 1710 nt, Artificial Sequence
  derived and/or modified CDS sequence (opt5) from LASV(LASV224-NIG-2010;Clade II)__AIT17627__NP
augagcgccuccaaggaggugaaaucuuuccuguggacccagagccucagacgggaacuguccggcuacugcucuagcaucaaacuucaagucguuaaggacgcucaggcccugcuccacgggcuggauuuuuccgaggugucuaacgugcagcgccuuaugagaaagcagaaacgggacgauagcgaccugaagcgccucagagaucugaaucaagcggucaacaaucugguggaacucaaguccacacagcagaaaagcauucugcggguuggaacgcuuaccucugacgaucugcucacacuggcugccgaccuugagaagcugaaauccaaggugauccgcaccgaaagaccccucagcucuggcgucuauauggggaaccuguccagccagcaacuggagcagcggcgcgcccuccugaauaugauuggaauggugggcggggcucagggaacacagccuggcagagauggcguugugcgggucugggacgugaaaaacccggaucuucugaauaaccaauucgggaccaugcccucucucacacuggccugucuuaccaagcagggacagguggaccugaaugaugcuguccucgcccugacggaccugggccucaucuacaccgcgaaguauccuaacuccagcgaccuggaucgccuuucccaaucucaucccauucugaauaugguugacaccaaaaagagcucccucaacaucagcggguacaauuuuucucugggagccgcugugaaagccggcgcuugcaugcuugaugggggaaacaugcuggagaccaucaaggugacaccucagaccauggacggcauucucaaauccauccugaaggucaaaagaagccugggcauguucgugucugauacgcccggggaacggaauccuuaugagaacauucucuacaagaucugucugagcggagacggcuggccguauauugccucccgcacaucuaucguugggagagcgugggaaaacaccacaguggaucuugagagcgacggaaagccccagaaagucggcuccgccgggagcaauaagucucugcaguccgcuggauuuccuaccggccucaccuacagccaacugaugacacugaaagauucuaugaugcagcuugaccccuccgccaagacguggauugauaucgagggccggccugaagaccccguggagaucgcucucuaccagccgaugagcgggugcuauauucacuucuuuagagaaccuaccgaccugaaacaguucaagcaagaugccaaguacucccauggaaucgacguugccgaucuguuucccgcucagccuggccucacaucugcggugauugaggcccugccccgcaacaugguccuuaccugucaggggagcgacgauaucaaacggcugcucgacucccagggaagacgcgauauuaagcugaucgacaucgcucugucuaaagccgauagccggagauucgaaaaugccgugugggaccaaugcaaggaucuuugucacaugcauacaggcgucgugguugagaaaaagaagcgcgggggcaaagaggaaauuacaccccacugcgcucucauggacuguaucauguaugaugccgcgguguccggaggccugaacauuccuguccugcgggcugugcucccgagagacaugguuuuucgcacgagcucucccaaggugguccuguga

SEQ ID NO: 9170 - RNA, 1710 nt, Artificial Sequence
  derived and/or modified CDS sequence (opt5) from LASV(LASV225-NIG-2010;Clade II)__AIT17631__NP
augagcgccuccaaggagaucaaaucuuuccuguggacccagagccucagacgggaacuguccggcuacugcucuagcauuaaacuucaaguggucaaggacgcucaggcccugcuccacgggcuggauuuuuccgagguuucuaacgugcagcgccuuaugagaaagcagaaacgggacgauagcgaccugaagcgccucagagaucugaaucaagcggugaacaaucuggucgaacucaaguccacacagcagaaaagcauccugcgggugggaacgcuuaccucugacgaucugcucacacuggcugccgaccuugagaagcugaaauccaagguuauucgcaccgaaagaccccucagcucuggcguguauauggggaaccuguccacacagcaacuggagcagcggcgcgcccuccugaauaugaucggaauggucggcggggcucagggaacccagccuggcagagauggcgugguucgggugugggacgucaaaaacccggaucuucugaauaaccaauucgggacaaugcccagccucacccuggccugucuuacgaagcagggacagguggaccugaaugaugcugugcucgcccugaccgaccugggccucauuuacacagcgaaguauccuaacucuuccgaccuggaucgccuuagccaaucccaucccauccugaauauggucgacaccaaaaagucuagccucaacaucuccggguacaauuuuagccugggagccgcuguuaaagccggcgcuugcaugcuugaugggggaaacaugcuggagacaauuaaggugaccccucagacgauggacggcauccucaaaucuauucugaaggugaaaagaucccugggcauguucgucagcgaugcccccggggaacggaauccuuaugagaacauccucuacaagauuugucugucuggagacggcuggccguauaucgcgagccgcacauccauuguggggagagccugggaaaacaccacaguugaucuugagucugacggaaagccccagaaagugggcaccgcugggagcaauaagucccugcagagcgccggauuuccuaccggccucacauacucucaacugaugacgcugaaagauuccaugaugcagcuugaccccagcgcuaagaccuggaucgauaucgagggccggccugaagaccccgucgagauugcccucuaccagccgaugucugggugcuauauccacuucuuuagagaaccuacagaccugaaacaguucaagcaagaugccaaguacucccauggaauugacguggcugaucuguuucccgcgcagccuggccucaccagcgccguuaucgaggcucugccccgcaacauggugcuuacaugucagggguccgacgauauuaaacggcugcucgacucucagggaagacgcgauaucaagcugaucgacauugcccugagcaaagccgauucccggagauucgaaaaugcugucugggaccaaugcaaggaucuuugucacaugcauaccggcguggucguggagaaaaagaagcgcgggggcaaagaggaaaucacgccccacugcgcccucauggacuguauuauguaugaugcggcuguuucuggaggccugaacaucccugugcugcgggccguccucccgagagacaugguguuucgcacaagcucccccaagguugugcuguga

SEQ ID NO: 9171 - RNA, 1710 nt, Artificial Sequence
  derived and/or modified CDS sequence (opt5) from LASV(LASV229-NIG-2010;Clade II)__AIT17635__NP
augagcgccuccaaggaggugaaaucuuuccuguggacccagagccucagacgggaacuguccggcuacugcucuaacaucaaacuucaagucguuaaggacgcucaggcccugcuccacgggcuggauuuuagcgagguguccaaugugcagcgccuuaugagaaagcagaaacgggacgauaacgaccugaagcgccucagagaucugaaucaagcggucaacaaucugguggaacucaagucuacacagcagaaaagcauucugcggguuggaacgcuuaccuccgacgaucugcucacacuggcugccgaccuugagaagcugaaaagcaaggugauccgcaccgaaagaccccucucuuccggcgucuauauggggaaccugaauacacagcaacuggagcagcggcgcgcccuccugaacaugauuggaauggugggcggggcucagggaacccagccuggcagagauggcguugugcgggucugggacgugaaaaauccggaucuucugaacaaucaauucgggacaaugcccagccucacccuggccugucuuacgaagcagggacagguggaccugaacgaugcuguccucgcccugaccgaccugggccucaucuacacagcgaaguauccuaauucuuccgaccuggaucgccuuagccaaucucaucccauucugaacaugguugacaccaaaaaguccagccucaauaucuccggguacaacuuuucucugggagccgcugugaaagccggcgcuugcaugcuugaugggggaaacaugcuggagacaaucaaggugaccccucagacgauggacggcauucucaaaagcauccugaaggucaaaaagucccugggcauguucgugagcgauacacccggggaaagaaauccuuaugagaacauucucuacaagaucugucugucuggagacggcuggccguauauugccucccggaccagcaucguugggcgcgcgugggaaaauacaaccguggaucuugagucugacggaaaaccccagaaggucggcaccgccgggagcaacaaaucccugcagucugcuggauuuccuacaggccucacguacagccaacugaugacccugaaggauuccaugaugcagcuugaccccagcgccaaaacauggauugauaucgagggcagaccugaagaccccguggagaucgcucucuaccagccgaugucugggugcuauauucacuucuuucgggaaccuaccgaccugaagcaguucaagcaagaugccaaauacucccauggaaucgacguugccgaucuguuucccgcucagccuggccucacaagcgcggugauugaggcccugcccagaaauaugguccuuaccugucaggggucugacgauaucaagcgccugcucgacucccagggacggagagauauuaaacugaucgacaucgcucugagcaaggccgauucccgccgguucgaaaacgccgugugggaccaaugcaaagaucuuugucacaugcauacgggcgucgugguugagaagaagaaaagagggggcaaggaggaaauuacaccccacugcgcucucauggacuguaucauguaugaugccgcggugucuggaggccugaauauuccuguccugcgcgcugugcucccgcgggacaugguuuuuagaaccagcucccccaaagugguccuguga

SEQ ID NO: 9172 - RNA, 1710 nt, Artificial Sequence
  derived and/or modified CDS sequence (opt5) from LASV(LASV237-NIG-2010;Clade II)__AIT17639__NP
augagcgccuccaaggaggugaaaucuuuccuguggacccagagccucagacgggaacuguccggcuacugcucuaacaucaaacuucaagucguuaaggacgcucaggcccugcuccacgggcuggauuuuagcgagguguccaaugugcagcgccuuaugagaaagcagaaacgggacgauucugaccugaagcgccucagagaucugaaccaagcggucaauaaccugguggaacucaagagcacacagcagaaauccauucugcggguuggaacgcuuaccagcgacgaucugcucacacuggcugccgaccuugagaagcugaaaucuaaggugauccgcaccgaaagaccccucuccagcggcgucuauauggggaaucugucuacacagcaacuggagcagcggcgcgcccuccugaacaugauuggaauggugggcggggcucagggaacccagccuggcagagauggcguugugcgggucugggacgugaaaaauccggaucuucugaacaaucaauucgggacaaugcccucccucacccuggccugucuuacgaagcagggacagguggaccugaacgaugcuguccucgcccugaccgaccugggccucaucuacacagcgaaguauccuaauagcucugaccuggaucgccuuucccaaagccaucccauucugaacaugguugacaucaaaaaguccucucucaauaucagcggguacaacuuuucccugggagccgcugugaaagccggcgcuugcaugcuugaugggggaaauaugcuggagaccauuaaggugacaccucagaccauggacggcauccucaaaagcauucugaaggucaaaagaucucugggcauguucguguccgauacgcccggggaacggaacccuuaugagaacauccucuacaagauuugucugagcggagacggcuggccguauaucgccucucgcacaagcauuguugggagagcgugggaaaauaccacaguggaucuugaguccgacggaaagccccagaaagucggcucugccgggagcaacaagucccugcagagcgcuggauuuccuaccggccucaccuacucucaacugaugacacugaaagauuccaugaugcagcuugaccccagcgccaagacguggaucgauaucgagggccggccugaagaccccguggagauugcucucuaccagccgaugucugggugcuauauccacuucuuuagagaaccuaccgaccugaaacaguucaagcaagaugccaaguacucccauggaauugacguugccgaucuguuucccgcucagccuggccucacaagcgcggugaucgaggcccugccccgcaauaugguccuuaccugucagggguccgacgauauuaaacggcugcucgacucucagggaagacgcgauaucaagcugaucgacauugcucugagcaaagccgauucccggagauucgaaaacgccgugugggaccaaugcaaggaucuuugucacaugcauacaggcgucgugguugagaaaaagaagcgcgggggcaaagaggaaaucacgccccacugcgcucucauggacuguauuauguaugaugccgcggugucuggaggccugaauaucccuguccugcgggcugugcucccgagagacaugguuuuucgcaccagcucccccaaggugguccuguga

SEQ ID NO: 9173 - RNA, 1710 nt, Artificial Sequence
  derived and/or modified CDS sequence (opt5) from LASV(LASV242-NIG-2010;Clade II)__AIT17651__NP
augagcgccuccaaggaggugaaaucuuuccuguggacccagagccucagacgggaacuguccggcuacugcucuagcaucaaacuucaagucguuaaagacgcucaggcccugcuccacgggcuggauuuuuccgaggugucuaacgugcagcgccuuaugagaaagcagaaacgggacgauagcgaccugaagcgccucagagaucugaaucaagcggucaacaaucugguggaacucaaguccacacagcagaaaagcguucugcgggugggaacgcuuaccucugacgaucugcucacacuggcugccgaccuugagaagcugaaauccaaggucauucgcaccgaaagaccccucagcucuggcguguauauggggaaccuguccgcccagcaacuggagcagcggcgcgcucuccugaauaugaucggaaugguuggcggggcccagggaacacagccuggcagagauggcgugguccgggugugggacgugaaaaacccggaucuucugaauaaccaauucgggaccaugcccagccucacacuggcuugucuuaccaagcagggacaggucgaccugaaugauguugugcucgcccugacggaccugggccucauuuacaccgcgaaguauccuaacucuuccgaccuggaucgccuuagccaaucccaucccauccugaauaugguggacacaaagaagucuagccucaacauuuccggguacaauuuuagccugggagccgcugucaaagccggcgcuugcaugcuugaugggggaaacaugcuggagaccaucaaggugacaccucagaccauggacggcauccucaaaucuauucugaagguuaaaaagucccugggcauguucgugagcgauacgcccggggaaagaaauccuuaugagaacauccucuacaagauuugucugucuggagacggcuggccguauaucgccagccggacauccauugucgggcgcgcgugggaaaacaccacaguggaucuugagucugacggaaaaccccagaagguuggcaccgccgggagcaauaaaucccugcagagcgcuggauuuccuaccggccucacauacucucaacugaugacgcugaaggauuccaugaugcagcuugaccccagcgccaaaaccuggaucgauauugagggcagaccugaagaccccguggagaucgcucucuaccagccgaugucugggugcuauauccacuucuuucgggaaccuacagaccugaagcaguucaagcaagaugccaaauacucccauggaauugacgucaccgaucuguuuagcgcccagcccggccucacauccgcugugaucgaggcgcugccuagaaacaugguccuuaccugucaggggucugacgauauuaagcgccugcucgacagccagggacggagagauaucaaacugauugacaucgcccuguccaaggcugauucucgccgguucgaaaaugccgugugggaccaaugcaaagaucuuugucacaugcauacgggcguuguggucgagaagaagaaaagagggggcaaggaggaaaucacaccccacugcgcccucauggacuguauuauguaugaugcugccgugagcggaggccugaacauccccguucugcgcgcggugcucccucgggacauggucuuuagaaccuccagcccgaaaguggugcuguga

SEQ ID NO: 9174 - RNA, 1710 nt, Artificial Sequence
  derived and/or modified CDS sequence (opt5) from LASV(LASV245-NIG-2011;Clade II)__AIT17655__NP
augagcgccuccaaggaggugaaaucuuuccuguggacccagagccucagacgggaacuguccggcuacugcucuaacaucaaacuucaagucguuaaggacgcucaggcccugcuccacgggcuggauuuuagcgagguguccaaugugcagcgccuuaugagaaagcagaaacgggacgauucugaccugaagcgccucagagaucugaaccaagcggucaauaaccugguggaacucaagagcacccagcagaaauccauucugcggguuggaacgcuuaccagcgacgaucugcucacacuggcugccgaccuugagaagcugaaaucuaaggugauccgcaccgaaaaaccccucuccagcggcgucuauauggggaaucugucuacacagcaacuggagcagagacgggcccuccugaacaugauuggaauggugggcggggcucagggaacccagccuggccgcgauggcguugugagagucugggacgugaagaauccggaucuucugaacaaucaauucgggacaaugcccucccucacccuggccugucuuacgaagcagggacagguggaccugaacgaugcuguccucgcccugaccgaccugggccucaucuacacagcgaaauuuccuaauagcucugaccuggaucggcuuucccaaagccaucccauucugaacaugguugacaccaagaaauccucucucaauaucagcggguauaacuucucccugggagccgcugugaaggccggcgcuugcaugcuugaugggggaaauaugcuggagacaaucaaagugaccccucagacgauggacggcauucucaagagcauccugaaagucaagaagucucugggcauguuuguguccgauacacccggggaacgcaacccuuacgagaacauucucuauaaaaucugucugagcggagacggcuggccguacauugccucuagaaccagcaucguugggcgggcgugggaaaauacaaccguggaucuugaguccgacggaaagccccagaaagucggcaccacagggucuaacaagagccugcaguccgccggauucccuacgggccucaccuauagccaacugaugacacugaaagauucuaugaugcagcuugaccccuccgcuaagaccuggauugauaucgagggccgcccugaagaccccguggagaucgcccucuaccagccgaugagcgggugcuacauucacuuuuucagagaaccuacagaccugaagcaguuuaaacaagaugcuaaguauucucauggaaucgacguugccgaucuguuccccgcccagccuggccucaccuccgcugugauugaggcgcugccccggaauaugguccuuacgugucaggggagcgacgauaucaaaagacugcucgacucccagggacgccgggauauuaagcugaucgacaucgcccugucuaaagcugauagcagacgcuuugaaaacgccgugugggaccaaugcaaggaucuuugucacaugcauacaggcgucgugguugagaagaaaaagagagggggcaaagaggaaauuacaccccacugcgcccucauggacuguaucauguacgaugcugccguguccggaggccugaauauuccuguccugcgggcggugcucccgcgcgacaugguuuuccggaccucuagccccaaggugguccuguga

SEQ ID NO: 9175 - RNA, 1710 nt, Artificial Sequence
  derived and/or modified CDS sequence (opt5) from LASV(LASV246-NIG-2010;Clade II)__AIT17659__NP
augagcgccuccaaggaggugaaaucuuuccuguggacccagagccucagacgggaacuguccggcuacugcucuagcaucaaacuucaagucguuaaggacgcucaggcccugcuccacgggcuggauuuuuccgaggugucuaacgugcagcgccuuaugagaaagcagaaacgggacgauagcgaccugaagcgccucagagaucugaaucaagcggucaacaaucugguggaacucaaguccacacagcagaaaagcguucugcgggugggaacgcuuaccucugacgaucugcucacacuggcugccgaccuugagaagcugaaauccaaggucauucgcaccgaaagaccccucagcucuggcguguauauggggaaccuguccacacagcaacuggagcagcggcgcgcccuccugagcaugaucggaaugguuggcggggcucagggaacccagccuggcagagauggcgugguccgggugugggacgugaaaaauccggaucuucugaacaaucaauucgggacaaugcccucucucacccuggccugucuuacgaagcagggacaggucgaccugaacgaugcuguucucgcccugaccgaccugggccucauuuacacagcgaaguauccuaauuccagcgaccuggaucgccuuucccaaucucaucccauccugaacaugguggacaccaaaaagagcucccucaauauuagcggguacaacuuuucucugggagccgcugugaaagccggcgcuugcaugcuugaugggggaaauaugcuggagacaaucaaggucaccccucagacgauggacggcauccucaaauccauucugaaggugaaaagaagccugggcauguucguuucugauacacccggggaacggaacccuuaugagaauauccucuacaagauuugucugagcggagacggcuggccguauaucgccucccgcaccucuauuguggggagagcgugggaaaacacaaccgucgaucuugagagcgacggaaagccccagaaagugggcaccgccggguccaacaagagccugcagucugcuggauuuccuacaggccucacguacucccaacugaugacccugaaagauagcaugaugcagcuugaccccucugccaagacauggaucgauauugagggccggccugaagaccccguugagaucgcucucuaccagccgauguccgggugcuauauccacuucuuuagagaaccuaccgaccugaaacaguucaagcaagaugccaaguacagccauggaauugacguggccgaucuguuucccgcucagccuggccucacauccgcggucaucgaggcccugccccgcaauauggugcuuaccugucaggggucugacgauauuaaacggcugcucgacagccagggaagacgcgauaucaagcugauugacaucgcucugaacaaagccgauucccggagauucgaaaaugccgucugggaccaaugcaaggaucuuugucacaugcauacgggcgugguuguggagaaaaagaagcgcgggggcaaagaggaaaucacaccccacugcgcucucauggacuguauuauguaugaugccgcggucucuggaggccugaacaucccugugcugcgggcuguucucccgagagacaugguguuucgcaccagcucccccaaggucgugcuguga

SEQ ID NO: 9176 - RNA, 1710 nt, Artificial Sequence
  derived and/or modified CDS sequence (opt5) from LASV(LASV251-NIG-2010;Clade II)__AIT17667__NP
augagcgccuccaaggaggugaaaucuuuccuguggacccagagccucagacgggaacuguccggcuacugcucuagcaucaaacuucaagucguuaaggacgcucaggcccugcuccacgggcuggauuuuuccgaggugucuaacgugcagcgccuuaugagaaagcagaaacgggacgauagcgaccugaagcgccucagagaucugaaucaagcggucaacaaucugguggaacucaaguccacacagcagaaaagcauucugcggguuggaacgcuuaccucugacgaucugcucacacuggcugccgaccuugagaagcugaaauccaaggugauccgcaccgaaagaccccucagcucuggcgucuauauggggaaccuguccacacagcaacuggagcagcggcgcgcccuccugaauaugauuggaauggugggcggggcucagggaacccagccuggcagagauggcguugugcgggucugggacgugaaaaacccggaucuucugaauaaccaauucgggacaaugcccagccucacccuggccugucuuacgaagcagggacagguggaccugaaugaugcuguccucgcccugaccgaccugggccucaucuacacagcgaaguauccuaacucuuccgaccuggaucgccuuagccaaucccaucccauucugaauaugguugacaccaaaaagucuagccucaacaucuccggguacaauuuuagccugggagccgcugugaaagccggcgcuugcaugcuugaugggggaaacaugcuggagacaaucaaggugaccccucagacgauugacggcauccucaaaucuauucugaaggucaaaaagucccugggcauguucgugagcgauacacccggggaaagaaauccuuaugagaacauccucuacaagauuugucugucuggagacggcuggccguauaucgccagccggaccuccauuguugggcgcgcgugggaaaacacaaccguggaucuugagucugacggaaaaccccagaaggucggcaccacagggagcaauaaaucccugcagagcgccggauuuccuacgggccucaccuacucucaacugaugacacugaaggauuccaugaugcagcuugaccccagcgcuaaaaccuggaucgauaucgagggcagaccugaagaccccguggagauugcccucuaccagccgaugucugggugcuauauccacuucuuucgggaaccuacagaccugaagcaguucaagcaagaugcuaaauacucccauggaauugacguuaccgaucuguuucccgcccagccuggccucacgagcgccgugaucgaggcucugcccagaaacaugguccuuacaugucagggguccgaagacauuaagcgccugcucgauucucagggacggagagacaucaaacugaucgauauugcgcugagcaaggccgacucccgccgguucgagaaugcugugugggaucaaugcaaagaccuuugucacaugcauaccggcgucgugguugagaagaagaaaagagggggcaaggaagagaucacaccccacugcgcccucauggauuguauuauguaugacgccgcugugucuggaggccugaacaucccuguccugcgcgccgugcucccgcgggauaugguuuuuagaaccagcucccccaaagugguccuguga

SEQ ID NO: 9177 - RNA, 1710 nt, Artificial Sequence
  derived and/or modified CDS sequence (opt5) from LASV(LASV253-NIG-2011;Clade II)__AIT17671__NP
augagcgccuccaaggaggugaaaucuuuccuguggacccagagccucagacgggaacuguccggcuacugcucuagcaucaaacuucaagucguuaaggacgcucaggcccugcuccacgggcuggauuuuuccgaggugucuaacgugcagcgccuuaugagaaagcagaaacgggacgauagcgaccugaagcgccucagagaucugaaucaagcggucaacaaucugguggaacucaaguccacccagcagaaaagcguucugcgggugggaacgcuuaccucugacgaucugcucacacuggcugccgaccuugagaagcugaaauccaaggucauucgcaccgaaagaccccucagcucuggcguguauauggggaaccuguccacacagcaacuggagcagcggcgcgcccuccugaauaugaucggaaugguuggcggggcucagggaacccagccuggcagagauggcgugguccgggugugggacgugaaaaacccggaucuucugaauaaccaauucgggacaaugcccagccucacccuggccugucuuacgaagcagggacaggucgaccugaaugauguugugcucgcucugaccgaccugggccucauuuacacagccaaguauccuaacucuuccgaccuggaucgccuuagccaaucccaucccauccugaauaugguggacaccaaaaagucuagccucaacauuuccggguacaauuuuagccugggagcggccgucaaagcuggcgccugcaugcuugaugggggaaacaugcuggagacaaucaaggugaccccucagacgauggacggcauccucaaaucuauucugaagguuaaaaagucccugggcauguucgugagcgauacacccggggaaagaaauccuuaugagaacauccucuacaagauuugucugucuggagacggcuggccguauaucgcuagccggaccuccauugucgggcgcgccugggaaaacacaaccguggaucuugagucugacggaaaaccccagaagguuggcaccgcggggagcaauaaaucccugcagagcgccggauuuccuacaggccucacguacucucaacugaugacccugaaggauuccaugaugcagcuugaccccagcgcuaaaacauggaucgauauugagggcagaccugaagaccccguggagaucgcccucuaccagccgaugucugggugcuauauccacuucuuucgggaaccuaccgaccugaagcaguucaagcaagaugcuaaauacucccauggaauugacgucacagaucuguuucccgcccagccuggccucaccagcgccgugaucgaggcucugcccagaaacaugguccuuacgugucagggguccgacgauauuaagcgccugcucgacucucagggacggagagauaucaaacugauugacaucgcgcugagcaaggccgauucccgccgguucgaaaaugcugugugggaccaaugcaaagaucuuugucacaugcauacaggcguuguggucgagaagaagaaaagagggggcaaggaggaaaucacaccccacugcgcccucauggacuguauuauguaugaugccgcugugucuggaggccugaacaucccuguucugcgcgccgugcucccgcgggacauggucuuuagaaccagcucccccaaaguggugcuguga

SEQ ID NO: 9178 - RNA, 1710 nt, Artificial Sequence
  derived and/or modified CDS sequence (opt5) from LASV(LASV254-NIG-2011;Clade II)__AIT17675__NP
augagcgccuccaaggaggugaaaucuuuccuguggacccagagccucagacgggaacuguccggcuacugcucuagcaucaaacuucaagucguuaaggacgcucaggcccugcuccacgggcuggauuuuuccgaggugucuaacgugcagcgccuuaugagaaagcagaaacgggacgauagcgaccugaagcgccucagagaucugaaucaagcggucaacaaucugguggaacucaaguccacacagcagaaaagcguucugcgggugggaacgcuuaccucugacgaucugcucacacuggcugccgaccuugagaagcugaaauccaaggucauucgcaccgaaagaccccucagcucuggcguguauauggggaaccuguccacacagcaacuggagcagcggcgcgcccuccugaauaugaucggaaugguuggcggggcucagggaacccagccuggcagagauggcgugguccgggugugggacgugaaaaacccggaucuucugaauaaccaauucgggacaaugcccagccucacccuggccugucuuacgaagcagggacaggucgaccugaaugaugcuguucucgcccugaccgaccugggccucauuuacacagcgaaguauccuaacucuuccgaccuggaucgccuuagccaaucccaucccauccugaauaugguggacaccaaaaagucuagccucaacauuuccggguacaauuuuagccugggagccgcugugaaagccggcgcuugcaugcuugaugggggaaacaugcuggagacaaucaaggucaccccucagacgauggacggcauccucaaaucuauucugaaggugaaaaagucccugggcauguucguuagcgauacacccggggaaagaaauccuuaugagaacauccucuacaagauuugucugucuggagacggcuggccguauaucgccagccggaccuccauuguggggcgcgcgugggaaaacacaaucgucgaucuugagucugacggaaaaccccagaaggugggcaccgccgggagcaauaaaucccugcagagcgcuggauuuccuaccggccucacauacucucaacugaugacgcugaaggauuccaugaugcagcuugaccccagcgccaaaaccuggauugauaucgagggcagaccugaagaccccguugagaucgcucucuaccagccgaugucugggugcuauauucacuucuuucgggaaccuacagaccugaagcaguucaagcaagaugccaaauacucccauggaaucgacguggccgaucuguuucccgcucagccuggccucaccagcgcggucauugaggcccugcccagaaacauggugcuuacaugucagggguccgacgauaucaagcgccugcucgacucucagggacggagagauauuaaacugaucgacaucgcucugagcaaggccgauucccgccgguucgaaaaugccgucugggaccaaugcaaagaucuuugucacaugcauaccggcgugguuguggagaagaagaaaagagggggcaaggaggaaauuacgccccacugcgcucucauggacuguaucauguaugaugccgcggucucuggaggccugaacauuccugugcugcgcgcuguucucccgcgggacaugguguuuagaacaagcucccccaaagucgugcuguga

SEQ ID NO: 9179 - RNA, 1710 nt, Artificial Sequence
  derived and/or modified CDS sequence (opt5) from LASV(LASV256-NIG-2010;Clade II)__AIT17679__NP
augagcgccuccaaggaggugaaaucuuuccuguggacccagagccucagacgggaacuguccggcuacugcucuagcaucaaacuucaagucguuaaggacgcucaggcccugcuccacgggcuggauuuuuccgaggugucuaacgugcagcgccuuaugagaaagcagaaacgggacgauagcgaccugaagcgccucagagaucugaaucaagcggucaacaaucugguggaacucaaguccacacagcagaaaagcauucugcggguuggaacgcuuaccucugacgaucugcucacacuggcugccgaccuugagaagcugaaauccaaggugauccgcaccgaaagaccccucagcucuggcgucuauauggggaaccuguccacacagcaacuggagcagcggcgcgcccuccugaauaugauuggaauggugggcggggcucagagcacccagccuggaagagauggcguugugcgggucugggacgugaaaaacccggaucuucugaauaaccaauucggcacaaugcccucucucacccuggccugucuuacgaagcagggacagguggaccugaaugaugcuguccucgcccugaccgaccugggacucaucuacacagcgaaguauccuaacuccagcgaccuggaucgccuuucccaaucucaucccauucugaauaugguugacaccaaaaagagcucccucaacaucagcggcuacaauuuuucucugggggccgcugugaaagccggagcuugcaugcuugauggcgggaacaugcuggagacaaucaaggugaccccucagacgauggacgggauucucaaauccauccugaaggucaaaagaagccugggcauguucgugucugauacacccggcgaacggaauccuuaugagaacauucucuacaagaucugucugagcggggacggauggccguauauugccucccgcaccucuaucguuggcagagcgugggaaaacacaaccguggaucuugagagcgacgggaagccccagaaagucggaaccgccggcuccaauaagagccugcagucugcuggguuuccuacaggacucacguacucccaacugaugacccugaaagauagcaugaugcagcuugaccccucugccaagacauggauugauaucgagggccggccugaagaccccguggagaucgcucucuaccagccgauguccggcugcuauauucacuucuuuagagaaccuaccgaccugaaacaguucaagcaagaugccaaguacagccaugggaucgacguugccgaucuguuucccgcucagccuggacucacauccgcggugauugaggcccugccccgcaacaugguccuuaccugucagggcucugacgauaucaaacggcugcucgacagccaggggagacgcgauauuaagcugaucgacaucgcucuguccaaagccgauucucggagauucgaaaaugccgugugggaccaaugcaaggaucuuugucacaugcauacgggagucgugguugagaaaaagaagcgcggcgggaaagaggaaauuacaccccacugcgcucucauggacuguaucauguaugaugccgcggugagcggcggacugaacauuccuguccugcgggcugugcucccgagagacaugguuuuucgcaccuccagccccaaggugguccuguga

SEQ ID NO: 9180 - RNA, 1710 nt, Artificial Sequence
  derived and/or modified CDS sequence (opt5) from LASV(LASV263-NIG-2011;Clade II)__AIT17683__NP
augagcgccuccaaggaggugaaaucuuuccuguggacccagagccucagacgggaacuguccggcuacugcucuaacaucaaacuucaagucguuaaggacgcucaggcccugcuccacgggcuggauuuuagcgagguguccaaugugcagcgccuuaugagaaagcagaaacgggacgauucugaccugaagcgccucagagaucugaaccaagcggucaauaaccugguggaacucaagagcacacagcagaaauccauucugcggguuggaacgcuuaccagcgacgaucugcucacacuggcugccgaccuugagaagcugaaaucuaaggugauccgcaccgaaagaccccucuccagcggcgucuauauggggaaucugucuacacagcaacuggagcagcggcgcgcccuccugaacaugauuggaauggugggcggggcucagggaacccagccuggcagagauggcguugugcgggucugggacgugaaaaauccggaucuucugaacaaucaauucgggacaaugcccucccucacccuggccugucuuacgaagcagggacagguggaccugaacgaugcuguccucgcccugaccgaccugggccucaucuacacagcgaaguauccuaauagcucugaccuggaucgccuuucccaaagccaucccauucugaacaugguugacaccaaaaaguccucucucaauaucagcggguuuaacuucucccugggagccgcugugaaagccggcgcuugcaugcuugaugggggaaauaugcuggagacaaucaaggugaccccucagacgauggacggcauucucaaaagcauccugaaggucaaaaagucucugggcauguuuguguccgauacacccggggaaagaaacccuuacgagaacauucucuauaagaucugucugagcggagacggcuggccguacauugccucucggaccagcaucguugggcgcgcgugggaaaauacaaccguggaucuugaguccgacggaaaaccccagaaggucggcaccgccgggucuaacaaaagccugcaguccgcuggauucccuacaggccucacguauagccaacugaugacccugaaggauucuaugaugcagcuugaccccuccgccaaaacauggauugauaucgagggcagaccugaagaccccguggagaucgcucucuaccagccgaugagcgggugcuacauucacuuuuuccgggaaccuaccgaccugaagcaguuuaagcaagaugccaaauauucucauggaaucgacguugccgaucuguuccccgcucagccuggccucacauccgcggugauugaggcccugcccagaaauaugguccuuaccugucaggggagcgacgauaucaagcgccugcucgacucccagggacggagagauauuaaacugaucgacaucgcucugucuaaggccgauagccgccgguuugaaaacgccgugugggaccaaugcaaagaucuuugucacaugcauacgggcgucgugguugagaagaagaaaagagggggcaaggaggaaauuacaccccacugcgcucucauggacuguaucauguacgaugccgcgguguccggaggccugaauauuccuguccugcgcgcugugcucccgcgggacaugguuuucagaaccucuagccccaaagugguccuguga

SEQ ID NO: 9181 - RNA, 1710 nt, Artificial Sequence
  derived and/or modified CDS sequence (opt5) from LASV(LASV267-NIG-2010;Clade II)__AIT17687__NP
augagcgccuccaaggaggugaaaucuuuccuguggacccagagccucagacgggaacuguccggcuacugcucuagcaucaaacuucaagucguuaaagacgcucaggcccugcuccacgggcuggauuuuuccgaggugucuaacgugcagcgccuuaugagaaagcagaaacgggacgauagcgaccugaagcgccucagagaucugaaucaagcggucaacaaucugguggaacucaaguccacacagcagaaaagcauucugcggguuggaacgcuuaccucugacgaucugcucacacuggcugccgaccuugagaagcugaaauccaaggugauccgcaccgaaagaccccucagcucuggcgucuauauggggaaccuguccgcccagcaacuggagcagcggcgcgcucuccugaauaugauuggaauggugggcggggcccagggaacacagccuggcagagauggcguugugcgggucugggacgugaaaaacccggaucuucugaauaaccaauucgggaccaugcccagccucacacuggcuugucuuaccaagcagggacagguggaccugaaugaugccguccucgcgcugacggaccugggccucaucuacaccgccaaguauccuaacucuuccgaccuggaucgccuuagccaaucccaucccauucugaauaugguugacacaaagaagucuagccucaacaucuccggguacaauuuuagccugggagcugccgugaaagcuggcgccugcaugcuugaugggggaaacaugcuggagaccaucaaggugacaccucagaccauggacggcauucucaaaucuauccugaaggucaaaagaucccugggcauguucgugagcgauacgcccggggaacggaauccuuaugagaacauucucuacaagaucugucugucuggagacggcuggccguauauugcgagccgcacauccaucguugggagagccugggaaaacaccacaguggaucuugagucugacggaaagccccagaaagucggcaccgcugggagcaauaagucccugcagagcgccggauuuccuaccggccucacauacucucaacugaugacgcugaaagauuccaugaugcagcuugaccccagcgcuaagaccuggauugauaucgagggccggccugaagaccccguggagaucgcccucuaccagccgaugucugggugcuauauucacuucuuuagagaaccuacagaccugaaacaguucaagcaagaugccaaguacucccauggaaucgacguugcugaucuguuucccgcgcagccuggccucaccagcgccgugauugaggcucugccccgcaacaugguccuuacaugucagggguccgacgauaucaaacggcugcucgacucucagggaagacgcgauauuaagcugaucgacaucgcccugagcaaagccgauucccggagauucgaaaaugcugugugggaccaaugcaaggaucuuugucacaugcauaccggcgucgugguugagaaaaagaagcgcgggggcaaagaggaaauuacgccccacugcgcccucauggacuguaucauguaugaugcggcugugucuggaggccugaacauuccuguccugcgggccgugcucccgagagacaugguuuuucgcacaagcucccccaaggugguccuguga

SEQ ID NO: 9182 - RNA, 1710 nt, Artificial Sequence
  derived and/or modified CDS sequence (opt5) from LASV(LASV274-NIG-2010;Clade II)__AIT17695__NP
augagcgccuccaaggaggugaaaucuuuccuguggacccagagccucagacgggaacuguccggcuacugcucuaacaucaaacuucaagucguuaaggacgcucaggcccugcuccacgggcuggauuuuagcgagguguccaaugugcagcgccuuaugagaaagcagaaacgggacgauucugaccugaagcgccucagagaucugaaccaagcggucaauaaccugguggaacucaagagcacacagcagaaauccauucugcggguuggaacgcuuaccagcgacgaucugcucacacuggcugccgaccuugagaagcugaaaucuaaggugauccgcaccgaaagaccccucuccagcggcgucuauauggggaaucugucuacacagcaacuggagcagcggcgcgcccuccugaaccuuauuggaauggugggcggggcucagggaacccagccuggcagagauggcguugugcgggucugggacgugaaaaauccggaucugcucaacaaucaauucgggacaaugcccucccugacccuugccugucugacgaagcagggacagguggaccucaacgaugucguucuggcucugaccgaccucggccugaucuacacagccaaguauccuaauagcucugaccuugaucgccugucccaaagccaucccauucucaacaugguggacaccaaaaaguccucucugaauaucagcggguuuaacuucucccuuggagcggccgugaaagcuggcgccugcaugcuggaugggggaaauaugcucgagacaaucaaggucaccccucacacgauggacggcauucugaaaagcauccugaaggugaaaaagucucucggcauguuuguuuccgauacacccggggaaagaaacccuuacgagaacauucuguauaagaucugucuuagcggagacggcuggccguacauugcuucucggaccagcaucguggggcgcgccugggaaaauacaaccgucgaucuggaguccgacggaaaaccccauaaggugggcaccgcggggucuaacaaaagccuccaguccgccggauucccuacaggccugacguauagccagcugaugacccuuaaggauucuaugaugcagcucgaccccuccgcuaaaacauggauugauaucgagggcagaccugaagaccccguugagaucgcccuguaccaaccgaugagcgggugcuacauucacuuuuuccgggaaccuaccgaccugaagcaguuuaagcaggaugcuaaauauucucauggaaucgacguggccgaucucuuccccgcccagccuggccugacauccgcugucauugaggcgcuucccagaaauauggugcugaccugucaagggagcgacgauaucaagcgccuccuggacucccagggacggagagauauuaaacugaucgacaucgcccuuucuaaggcugauagccgccgguuugaaaacgccgucugggaccagugcaaagaucucugucacaugcacacgggcgugguuguggagaagaagaaaagagggggcaaggaggaaauuacaccccauugcgcccugauggacuguaucauguacgaugcugccgucuccggaggccugaauauuccugugcuccgcgcgguucugccgcgggacaugguguucagaaccucuagccccaaagucgugcuuuga

SEQ ID NO: 9183 - RNA, 1710 nt, Artificial Sequence
  derived and/or modified CDS sequence (opt5) from LASV(LASV719-NIG-2009;Clade II)__AIT17705__NP
augagcgccuccaaggaggugaaaucuuuccuguggacccagagccucagacgggaacuguccggcuacugcucuaacaucaaacuucaagucguuaaggacgcucaggcccugcuccacgggcuggauuuuagcgagguguccaaugugcagcgccuuaugagaaagcagaaacgggacgauucugaccugaagcgccucagagaucugaaccaagcggucaauaaccugguggaacucaagagcacacagcagaaauccauucugcggguuggaacgcuuaccagcgacgaucugcucacacuggcugccgaccuugagaagcugaaaucuaaggugauccgcaccgaaagaccccucuccagcggcgucuauauggggaaucugucuacacagcaacuggagcagcggcgcgcccuccugaaccuuauuggaauggugggcggggcucagggaacccagccuggcagagauggcguugugcgggucugggacgugaaaaauccggaucugcucaacaaucaauucgggacaaugcccucccugacccuugccugucugacgaagcagggacagguggaccucaacgaugcuguccuggcccugaccgaccucggccugaucuacacagcgaaguauccuaauagcucugaccuugaucgccugucccaaagccaucccauucucaacaugguugacaccaaaaaguccucucugaauaucagcggguuuaacuucucccuuggagccgcugugaaagccggcgcuugcaugcuggaugggggaaauaugcucgagacaaucaaggugaccccucagacgauggacggcauucugaaaagcauccugaaggucaaaaagucucucggcauguuuguguccgauacacccggggaaagaaacccuuacgagaacauucuguauaagaucugucuuagcggagacggcuggccguacauugccucucggaccagcaucguugggcgcgcgugggaaaauacaaccguggaucuggaguccgacggaaaaccccacaaggucggcaccgccgggucuaacagaagccuccaguccgcuggauucccuacaggccugacguauagccagcugaugacccuuaaagauucuaugaugcaacucgaccccuccgccaagacauggauugauaucgagggccggccugaagaccccguggagaucgcucuguaccagccgaugagcgggugcuacauucacuuuuucagagaaccuaccgaccugaaacaguuuaagcaggaugccaaguauucucauggaaucgacguugccgaucucuuccccgcucaaccuggccugacauccgcggugauugaggcccuuccccgcaauaugguccugaccugucaggggagcgacgauaucaaacggcuccuggacucccagggaagacgcgauauuaagcugaucgacaucgcucuuucuaaagccgauagccggagauuugaaaacgccgugugggaccagugcaaggaucucugucauaugcacacgggcgucgugguugagaaaaagaagcgcgggggcaaagaggaaauuacaccccacugcgcucugauggacuguaucauguacgaugccgcgguguccggaggccugaauauuccuguccuccgggcugugcugccgagagacaugguuuuccgcaccucuagccccaaggugguccuuuga

SEQ ID NO: 9184 - RNA, 1710 nt, Artificial Sequence
  derived and/or modified CDS sequence (opt5) from LASV(LASV737-NIG-2009;Clade II)__AIT17711__NP
augagcgccuccaaggaggugaaaucuuuccuguggacccagagccucagacgggaacuguccggcuacugcucuaacaucaaacuucaagucguuaaggacgcucaggcccugcuccacgggcuggauuuuagcgagguguccaaugugcagcgccuuaugagaaagcagaaacgggacgauucugaccugaagcgccucagagaucugaaccaagcggucaauaaccugguggaacucaagagcacacagcagaaauccauucugcggguuggaacgcuuaccagcgacgaucugcucacacuggcugccgaccuugagaagcugaaaucuaaggugauccgcaccgaaagaccccucuccagcggcgucuauauggggaaucugucuacacagcaacuggagcagcggcgcgcccuccugaaccuuauuggaauggugggcggggcucagggaacccagccuggcagagauggcguugugcgggucugggacgugaaaaauccggaucugcucaacaaucaauucgggacaaugcccucccugacccuugccugucugacgaagcagggacagguggaccucaacgaugcuguccuggcccugaccgaccucggccugaucuacacagcgaaguauccuaauagcucugaccuugaucgccugucccaaagccaucccauucucaacaugguugacaccaaaaaguccucucugaauaucagcggguuuaacuucucccuuggagccgcugugaaagccggcgcuugcaugcuggaugggggaaauaugcucgagacaaucaaggugaccccucagacgauggacggcauucugaaaagcauccugaaggucaaaaagucucucggcauguuuguguccgauacacccggggaaagaaacccuuacgagaacauucuguauaagaucugucuuagcggagacggcuggccguacauugccucucggaccagcaucguugggcgcgcgugggaaaauacaaccguggaucuggaguccgacggaaaaccccacaaggucggcaccgccgggucuagcaaaucccuccagagcgcuggauucccuacaggccugacguauucucagcugaugacccuuaaggauuccaugaugcaacucgaccccagcgccaaaacauggauugauaucgagggcagaccugaagaccccguggagaucgcucuguaccagccgaugucugggugcuacauucacuuuuuccgggaaccuaccgaccugaagcaguuuaagcaggaugccaaauauucccauggaaucgacguugccgaucucuuccccgcucaaccuggccugacaagcgcggugauugaggcccuucccagaaacaugguccugaccugucagggguccgacgauaucaagcgccuccuggacucucagggacggagagauauuaaacugaucgacaucgcucuuagcaaggccgauucccgccgguuugaaaaugccgugugggaccagugcaaagaucucugucauaugcacacgggcgucgugguugagaagaagaaaagagggggcaaggaggaaauuacaccccacugcgcucugauggacuguaucauguacgaugccgcggugucuggaggccugaacauuccuguccuccgcgcugugcugccgcgggacaugguuuucagaaccagcucccccaaagugguccuuuga

SEQ ID NO: 9185 - RNA, 1710 nt, Artificial Sequence
  derived and/or modified CDS sequence (opt5) from LASV(LASV738-NIG-2009;Clade II)__AIT17713__NP
augagcgccuccaaggaggugaaaucuuuccuguggacccagagccucagacgggaacuguccggcuacugcucuaacaucaaacuucaagucguuaaggacgcucaggcccugcuccacgggcuggauuuuagcgagguguccaaugugcagcgccuuaugagaaagcagaaacgggacgauucugaccugaagcgccucagagaucugaaccaagcggucaauaaccugguggaacucaagagcacacagcagaaauccauucugcggguuggaacgcuuaccagcgacgaucugcucacacuggcugccgaccuugagaagcugaaaucuaaggugauccgcaccgaaagaccccucuccagcggcgucuauauggggaaucugucuacacagcaacuggagcagcggcgcgcccuccugaacaugauuggaauggugggcggggcucagggaacccagccuggcagagauggcguugugcgggucugggacgugaaaaauccggaucuucugaacaaucaauucgggacaaugcccucccucacccuggccugucuuacgaagcagggacagguggaccugaacgaugcuguccucgcccugaccgaccugggccucaucuacacagcgaaguauccuaauagcucugaccuggaucgccuuucccaaagccaucccauucugaacaugguugacaucaaaaaguccucucucaauaucagcggguacaacuuuucccugggagccgcugugaaagccggcgcuugcaugcuugaugggggaaauaugcuggagaccauuaaggugacaccucagaccauggacggcauccucaaaagcauucugaaggucaaaaagucucugggcauguucguguccgauacgcccggggaaagaaacccuuaugagaacauccucuacaagauuugucugagcggagacggcuggccguauaucgccucucggacaagcauuguugggcgcgcgugggaaaauaccacaguggaucuugaguccgacggaaaaccccagaaggucggcaccgccgggucuaacaaaagccugcaguccgcuggauuuccuaccggccucacauacagccaacugaugacgcugaaggauucuaugaugcagcuugaccccuccgccaaaaccuggaucgauaucgagggcagaccugaagaccccguggagauugcucucuaccagccgaugagcgggugcuauauccacuucuuucgggaaccuacagaccugaagcaguucaagcaagaugccaaauacucucauggaauugacguugccgaucuguuucccgcucagccuggccucaccuccgcggugaucgaggcccugcccagaaauaugguccuuacaugucaggggagcgacgauauuaagcgccugcucgacucccagggacggagagauaucaaacugaucgacauugcucugaacaaggccgauucucgccgguucgaaaaugccgugugggaccaaugcaaagaucuuugucacaugcauaccggcgucgugguugagaagaagaaaagagggggcaaggaggaaaucacgccccacugcgcucucauggacuguauuauguaugaugccgcggugagcggaggccugaacaucccuguccugcgcgcugugcucccgcgggacaugguuuuuagaacauccucucccaaagugguccuguga

SEQ ID NO: 9186 - RNA, 1710 nt, Artificial Sequence
  derived and/or modified CDS sequence (opt5) from LASV(LASV966-NIG-2009;Clade II)__AIT17719__NP
augagcgccuccaaggaggugaaaucuuuccuguggacccagagccucagacgggaacuguccggcuacugcucuagcaucaaacuucaagucguuaaggacgcucaggcccugcuccacgggcuggauuuuuccgaggugucuaacgugcagcgccuuaugagaaagcagaaacgggacgauagcgaccugaagcgccucagagaucugaaucaagcggucaacaaucugguggaacucaaguccacacagcagaaaagcauucugcggguuggaacgcuuaccucugacgaucugcucacacuggcugccgaccuugagaagcugaaauccaaggugauccgcaccgaaagaccccucagcucuggcgucuauauggggaaccuguccacacagcaacuggagcagcggcgcgcccuccugaauaugauuggaauggugagcggcgcucaggggacccagccuggaagagauggcguugugcgggucugggacgugaaaaacccggagcuucugaauaaccaauucggcacaaugcccucucucacccuggccugucuuacgaagcagggacagguggaucugaaugacgcuguccucgcccugaccgaucugggacucaucuacacagcgaaguauccuaacuccagcgaccuggaccgccuuucccaaucucaucccauucugaauaugguugauaccaaaaagagcucccucaacaucagcggcuacaauuuuucucugggggccgcugugaaagccggagcuugcaugcuugacggcgggaacaugcuggaaacaaucaaggugaccccucagacgauggaugggauucucaaauccauccugaaggucaaaaagagccugggcauguucgugucugacacacccggcgagagaaauccuuaugaaaacauucucuacaagaucugucugagcggggauggauggccguauauugccucccggaccucuaucguuggccgcgcgugggagaacacaaccguggaccuugagagcgaugggaaaccccagaaggucggaaccgccggcuccaauaaaagccugcagucugcuggguuuccuacaggacucacguacucccaacugaugacccugaaggacagcaugaugcagcuugaucccucugccaaaacauggauugacaucgaaggcagaccugaggaucccguggaaaucgcucucuaccagccgauguccggcugcuauauucacuucuuucgggagccuaccgaccugaagcaguucaagcaagacgccaaauacagccaugggaucgauguugccgaccuguuucccgcucagccuggacucacauccgcggugauugaagcccugcccagaaacaugguccuuaccugucagggcucugaugacaucaagcgccugcucgauagccaggggcggagagacauuaaacugaucgauaucucccugucuaaggcugacagccgccgguucgagaaugccgugugggaucaaugcaaagaccuuugucacaugcauacgggagucgugguugagaagaagaaaagaggcgggaaggaagagauuacaccccacugcgcccucauggauuguaucauguaugacgcugccguguccggcggacugaacauuccuguccugcgcgcggugcucccgcgggauaugguuuuuagaaccagcucucccaaagugguccuguga

SEQ ID NO: 9187 - RNA, 1710 nt, Artificial Sequence
  derived and/or modified CDS sequence (opt5) from LASV(LASV969-NIG-2009;Clade II)__AIT17725__NP
augagcgccuccaaggaggugaaaucuuuccuguggacccagagccucagacgggaacuguccggcuacugcucuaacaucaaacuucaagucguuaaagacgcucaggcccugcuccacgggcuggauuuuagcgagguguccaaugugcagcgccuuaugagaaagcagaaacgggacgauucugaccugaagcgccucagagaucugaaccaagcggucaauaaccugguggaacucaagagcacacagcagaaauccauucugcggguuggaacgcuuaccagcgacgaucugcucacacuggcugccgaccuugagaagcugaaaucuaaggugauccgcaccgaaagaccccucuccagcggcgucuauauggggaaucugucugcccagcaacuggagcagcggcgcgcucuccugaacaugauuggaauggugggcggggcccagggaacacagcuuggcagagauggcguugugcgggucugggacgugaaaaauccugaucugcucaacaaucaauucgggaccaugccgucccugacacuugcuugucugaccaagcagggacagguggaccucaacgaugccguccuggcgcugacggaccucggccugaucuacaccgccaaguaucccaauagcucugaccuugaucgccugucccaaagccauccuauucucaacaugguugacacaaagaaguccucucugaauaucagcggguacaacuuuucccuuggagcugccgugaaagcuggcgccugcaugcuggaugggggaaauaugcucgagaccaucaaggugacaccccagaccauggacggcauucugaaaagcauccugaaggucaaaaagucucucggcauguucguguccgauacgccuggggaaagaaaccccuaugagaacauucuguacaagaucugucuuagcggagacggcuggccuuauauugcgucucggacaagcaucguugggcgcgccugggaaaauaccacaguggaucuggaguccgacggaaaaccgcagaaggucggcaccgcugggucuaacaaaagccuccaguccgccggauuucccaccggccugacauacagccaacugaugacgcuuaaggauucuaugaugcagcucgacccuuccgcuaaaaccuggauugauaucgagggcagacccgaagacccuguggagaucgcccuguaccagcccaugagcgggugcuauauucacuucuuucgggaaccgacagaccugaagcaguucaagcaagaugccaaauacucucauggaaucgacguugcugaucucuuuccugcgcagcccggccugaccuccgccgugauugaggcccuuccuagaaauaugguccugacaugucaggggagcgaagacaucaagcgccuccuggauucccagggacggagagacauuaaacugaucgauaucgcucuuucuaaggccgacagccgccgguucgagaacgcugugugggaucaaugcaaagaccucugucacaugcauaccggcgucgugguugagaagaagaaaagagggggcaaggaagagauuacgccccacugcgcccugauggauuguaucauguaugacgcggcuguguccggaggccugaauauucccguccuccgcgccgugcugccucgggauaugguuuuuagaacaucuagcccgaaagugguccuuuga

SEQ ID NO: 9188 - RNA, 1710 nt, Artificial Sequence
  derived and/or modified CDS sequence (opt5) from LASV(LASV971-NIG-2009;Clade II)__AIT17729__NP
augagcgccuccaaggaggugaaaucuuuccuguggacccagagccucagacgggaacuguccggcuacugcucuagcaucaaacuucaagucguuaaggacgcucaggcccugcuccacgggcuggauuuuuccgaggugucuaacgugcagcgccuuaugagaaagcagcggcgcgacgauagcgaccugaaaagacuccgggaucugaaucaagcggucaacaaucugguggaacucaaguccacccagcaaaagagcauucugcgcguuggaacgcuuaccucugacgaucugcucacacuggcugccgaccuugagaaacugaaguccaaagugaucagaaccgaacggccccucagcucuggcgucuauauggggaaccuguccacacagcagcuggagcagcgcagagcccuccugaauaugauuggaauggugggcgggacccagggaacacagccuggccgggauggcguugugcgcgucugggacgugaagaacccggaucuucugaauaaccaauucgggaccaugcccagccucacgcuggcuugucuuaccaaacagggacagguggaccugaaugaugccguccucgcucugacagaccugggccucaucuacaccgccaaguauccuaacucuuccgaccuggauagacuuagccaaucccaucccauucugaauaugguugacacaaagaaaucuagccucaacaucuccggguacaauuuuagccugggagcggccgugaaggcuggcgccugcaugcuugaugggggaaacaugcuggagaccaucaaagugacgccucagacaauggacggcauucucaagucuauccugaaagucaagcggucccugggcauguucgugagcgauacccccggggaacgcaauccuuaugagaacauucucuacaaaaucugucugucuggagacggcuggccguauauugcuagcagaacauccaucguugggcgggccugggaaaacaccaccguggaucuugagucugacggaaagccccagaaggucggcacagcggggagcaauaaaucccugcagagcgccggauuuccuacgggccucaccuacucucaacugaugacacugaaggauuccaugaugcagcuugaccccagcgcuaaaaccuggauugauaucgagggcagaccugaagaccccguggagaucgcccucuaccagccgaugucugggugcuauauucacuucuuucgcgaaccuacagaccugaagcaguucaaacaagaugcuaaguacucccauggaaucgacguugccgaucuguuucccgcccagccuggccucaccagcgcugugauugaggcgcugccccggaacaugguccuuacgugucagggguccgacgauaucaagagacugcucgacucucagggacgccgggauauuaaacugaucgacaucgcccugagcaaggcugauuccagaaaauucgaaaaugccgugugggaccaaugcaaggaucuuugucacaugcauacaggcgucgugguugagaaaaagaagcgcgggggcaaagaggaaauuacaccccacugcgcccucauggacuguaucauguaugaugcugccgugucuggaggccugaacauuccuguccugcgggcggugcucccgagagacaugguuuuucgcaccagcucccccaaggugguccuguga

SEQ ID NO: 9189 - RNA, 1710 nt, Artificial Sequence
  derived and/or modified CDS sequence (opt5) from LASV(LASV975-NIG-2009;Clade II)__AIT17733__NP
augagcgccuccaaggaggugaaaucuuuccuguggacccagagccucagacgggaacuguccggcuacugcucuaacaucaaacuucaagucguuaaagacgcucaggcccugcuccacgggcuggauuuuagcgagguguccaaugugcagcgccuuaugagaaagcagaaacgggacgauucugaccugaagcgccucagagaucugaaccaagcggucaauaaccugguggaacucaagagcacacagcagaaauccauucugcggguuggaacgcuuaccagcgacgaucugcucauccuggcugccgaccuugagaagcugaaaucuaaggugauucgcacagaaagaccccucuccagcggcgucuauauggggaaucugucuacccagcaacuggagcagcggcgcgcccuccugaacaugaucggaauggugggcggggcucagggaacacagccuggcagagauggcguugugcgggucugggacgugaaaaauccggaucuucugaacaaucaauucgggaccaugcccucccucacacuggccugucuuaccaagcagggacagguggaccugaacgaugcuguccucgcccugacggaccugggccucauuuacaccgcgaaguauccuaauagcucugaccuggaucgccuuucccaaagccaucccauccugaacaugguugacacaaagaaguccucucucaauaucagcggguacaacuuuucccugggagccgcugugaaagccggcgcuugcaugcuugaugggggaaauaugcuggagaccauuaaggugacaccucagaccauggacggcauccucaaaagcauucugaaggucaaaaagucucugggcauguucguguccgauacgcccggggaaagaaacccuuaugagaacauccucuacaagauuugucugagcggagacggcuggccguauaucgccucucggacaagcauuguugggcgcgcgugggaaaauaccacaguggaucuugaguccgacggaaaaccccagaaggucggcaccgccgggucuaacaaaagccugcaguccgcuggauuuccuaccggccucacauacagccaacugaugacgcugaaggauucuaugaugcagcuugaccccuccgccaaaaccuggaucgauaucgagggcagaccugaagaccccguggagauugcucucuaccagccgaugagcgggugcuauauccacuucuuucgggaaccuacagaccugaagcaguucaagcaagaugccaaauacucucauggaauugacguugccgaucuguuucccgcucagccuggccucaccuccgcggugaucgaggcccugcccagaaauaugguccuuacaugucaggggagcgacgauauuaagcgccugcucgacucccagggacggagagauaucaaacugaucgacauugcucugucuaaggccgauagccgccgguucgaaaacgccgugugggaccaaugcaaagaucuuugucacaugcauaccggcgucgugguugagaagaagaaaagagggggcaaggaggaaaucacgccccacugcgcucucauggacuguauuauguaugaugccgcgguguccggaggccugaauaucccuguccugcgcgcugugcucccgcgggacaugguuuuuagaacaucuagccccaaagugguccuguga

SEQ ID NO: 9190 - RNA, 1710 nt, Artificial Sequence
  derived and/or modified CDS sequence (opt5) from LASV(LASV978-NIG-2009;Clade II)__AIT17745__NP
augagcgccuccaaggagaucaaaucuuuccuguggacccagagccucagacgggaacuguccggcuacugcucuagcauuaaacuucaaguggucaaggacgcucaggcccugcuccacgggcuggauuuuuccgagguuucuaacgugcagcgccuuaugagaaagcagaaacgggacgauagcgaccugaagcgccucagagaucugaaucaagcggugaacaaucuggucgaacucaaguccacacagcagaaaagcauccugcgggugggaacgcuuaccucugacgaucugcucacacuggcugccgaccuugagaagcugaaauccaagguuauucgcaccgaaagaccccucagcucuggcguguauauggggaaccuguccacacagcaacuggagcagcggcgcgcccuccugaauaugaucggaauggucggcggggcucagggaacccagccuggcagagauggcgugguucgggugugggacgucaaaaacccggaucuucugaauaaccaauucgggacaaugcccagccucacccuggccugucuuacgaagcagggacagguggaccugaaugaugcugugcucgcccugaccgaccugggccucauuuacacagcgaaguauccuaacucuuccgaccuggaucgccuuagccaaucccaucccauccugaauauggucgacaccaaaaagucuagccucaacaucuccggguacaauuuuagccugggagccgcuguuaaagccggcgcuugcaugcuugaugggggaaacaugcuggagacaauuaaggugaccccucagacgauggacggcauccucaaaucuauucugaaggugaaaagaucccugggcauguucgucagcgaugcccccggggaacggaauccuuaugagaacauccucuacaagauuugucugucuggagacggcuggccguauaucgcgagccgcacauccauuguggggagagccugggaaaacaccacaguugaucuugagucugacggaaagccccagaaagugggcaccgcugggagcaauaagucccugcagagcgccggauuuccuaccggccucacauacucucaacugaugacgcugaaagauuccaugaugcagcuugaccccagcgcuaagaccuggaucgauaucgagggccggccugaagaccccgucgagauugcccucuaccagccgaugucugggugcuauauccacuucuuuagagaaccuacagaccugaaacaguucaagcaagaugccaaguacucccauggaauugacguggcugaucuguuucccgcgcagccuggccucaccagcgccguuaucgaggcucugccccgcaacauggugcuuacaugucagggguccgacgauauuaaacggcugcucgacucucagggaagacgcgauaucaagcugaucgacauugcccugagcaaagucgauucccggagauucgaaaaugccgugugggaccaaugcaaggaucuuugucacaugcauaccggcgucgugguugagaaaaagaagcgcgggggcaaagaggaaaucacgccccacugcgcucucauggacuguauuauguaugaugccgcggugucuggaggccugaacaucccuguccugcgggcugugcucccgagagacaugguuuuucgcacaagcucccccaaggugguccuguga

SEQ ID NO: 9191 - RNA, 1710 nt, Artificial Sequence
  derived and/or modified CDS sequence (opt5) from LASV(LASV981-NIG-2009;Clade II)__AIT17753__NP
augagcgccuccaaggaggugaaaucuuuccuguggacccagagccucagacgggaacuguccggcuacugcucuagcaucaaacuucaagucguuaaggacgcucaggcccugcuccacgggcuggauuuuuccgaggugucuaacgugcagcgccuuaugagaaagcagaaacgggacgauagcgaccugaagcgccucagagaucugaaucaagcggucaacaaucugguggaacucaaguccacccagcagaaaagcauucugcggguuggaacgcuuaccucugacgaucugcucacacuggcugccgaccuugagaagcugaaauccaaggugauccgcaccgaaagaccccucagcucuggcgucuauauggggaaccuguccacacagcaacuggagcagcggcgcgcccuccugaauaugauuggaauggugggcggggcucagggaacccagccuggcagagauggcguugugcgggucugggacgugaaaaacccggaucuucugaauaaccaauucgggacaaugcccagccucacccuggccugucuuacgaagcagggacagguggaccugaaugaugcuguccucgcccugaccgaccugggccucaucuacacagcgaaguauccuaacucuuccgaccuggaucgccuuagccaaucccaucccauucugaauaugguugacaccaaaaagucuagccucaacaucuccggguacaauuuuagccugggagccgcugugaaagccggcgcuugcaugcuugaugggggaaacaugcuggagacaaucaaggugaccccucagacgauggacggcauucucaaaucuauccugaaggucaaaagaucccugggcauguucgugagcgauacacccggggaacggaauccuuaugagaacauucucuacaagaucugucugucuggagacggcuggccguauauugccagccgcaccuccaucguugggagagcgugggaaaacacaaccguggaucuugagucugacggaaagccccagaaagucggcaccacagggagcaauaagucccugcagagcgccggauuuccuacgggccucaccuacucucaacugaugacacugaaagauuccaugaugcagcuugaccccagcgcuaagaccuggauugauaucgagggccggccugaagaccccguggagaucgcccucuaccagccgaugucugggugcuauauucacuucuuuagagaaccuacagaccugaaacaguucaagcaagaugcuaaguacucccauggaaucgacguugccgaucuguuucccgcccagccuggccucaccagcgcugugauugaggcgcugccccgcaacaugguccuuacgugucagggguccgacgauaucaaacggcugcucgacucucagggaagacgcgauauuaagcugaucgacaucgcccugagcaaagcugauucccggagauucgaaaaugccgugugggaccaaugcaaggaucuuugucacaugcauacaggcgucgugguugagaaaaagaagcgcgggggcaaagaggaaauuacaccccacugcgcccucauggacuguaucauguaugaugcugccgugucuggaggccugaacauuccuguccugcgggcggugcucccgagagacaugguuuuucgcaccagcucccccaaggugguccuguga

SEQ ID NO: 9192 - RNA, 1710 nt, Artificial Sequence
  derived and/or modified CDS sequence (opt5) from LASV(LASV988-NIG-2009;Clade II)__AIT17759__NP
augagcgccuccaaggaggugaaaucuuuccuguggacccagagccucagacgggaacuguccggcuacugcucuaacaucaaacuucaagucguuaaggacgcucaggcccugcuccacgggcuggauuuuagcgagguguccaaugugcagcgccuuaugagaaagcagaaacgggacgauucugaccugaagcgccucagagaucugaaccaagcggucaauaaccugguggaacucaagagcacacagcagaaauccauucugcggguuggaacgcuuaccagcgacgaucugcucacacuggcugccgaccuugagaagcugaaaucuaaggugauccgcaccgaaagaccccucuccagcggcgucuauauggggaaucugaacacacagcaacuggagcagcggcgcgcccuccugaauaugauuggaauggcuggcggggcccagggaacccagccuggcagagauggcgugguucgggugugggacgucaaaaacccggaucuucugaauaaccaauucgggacaaugcccucucucacccuggcuugucuuacgaagcagggacagguggaccugaaugaugccgugcucgcgcugaccgaccugggccucaucuacacagccaaguauccuaacuccagcgaccuggaucgccuuucucaaucccaucccauucugaauauggucgacaccaaaaagagcucccucaacaucucuggguacaauuuuagccugggagcugccguuaaagcuggcgccugcaugcuugaugggggaaacaugcuggagacaaucaaggugaccccucagacgauggacggcauucucaaauccauccugaaggugaaaaagagccugggcauguucgucucugauacacccggggaaagaaacccuuaugagaauauucucuacaagaucugucuguccggagacggcuggccguauauugcgagccggaccucuaucguggggcgcgccugggaaaacacaaccguugaucuugagagcgacggaaaaccccagaaggugggcaccgcuggguccaauaaaucucugcagagcgccggauuuccuacaggccucacguacucccaacugaugacccugaaggauagcaugaugcagcuugaccccucugcuaaaacauggauugauaucgagggcagaccugaagaccccgucgagaucgcccucuaccagccgauguccgggugcuauauucacuucuuucgggaaccuaccgaccugaagcaguucaagcaagaugccaaauacagccauggaaucgacguggcugaucuguuucccgcgcagccuggccucacaucugccguuauugaggcucugcccagaaacauggugcuuaccugucagggguccgacgauaucaagcgccugcucgacagccagggacggagagauauuaaacugaucgacaucgcccuguccaaggccgauucucgccgguucgaaaaugcugucugggaccaaugcaaagaucuuugucacaugcauacgggcguggucguggagaagaagaaaagagggggcaaggaggaaauuacaccccacugcgcccucauggacuguaucauguaugaugcggcuguuagcggaggccugaacauuccugugcugcgcgccguccucccgcgggacaugguguuuagaaccuccucucccaaaguugugcuguga

SEQ ID NO: 9193 - RNA, 1710 nt, Artificial Sequence
  derived and/or modified CDS sequence (opt5) from LASV(LASV989-NIG-2009;Clade II)__AIT17763__NP
augagcgccuccaaggaggugaaaucuuuccuguggacccagagccucagacgggaacuguccggcuacugcucuagcaucaaacuucaagucguuaaggacgcucaggcccugcuccacgggcuggauuuuuccgaggugucuaacgugcagcgccuuaugagaaagcagaaacgggacgauagcgaccugaagcgccucagagaucugaaucaagcggucaacaaucugguggaacucaaguccacacagcagaaaagcauucugcggguuggaacgcuuaccucugacgaucugcucacacuggcugccgaccuugagaagcugaaauccaaggugauccgcaccgaaagaccccucagcucuggcgucuauauggggaaccuguccacacagcaacuggagcagcggcgcgcccuccugaauaugauuggaauggugggcggggcucagggaacccagccuggcagagauggcguugugcgggucugggacgugaaaaacccggaucuucugaauaaccaauucgggacaaugcccagccucacccuggccugucuuacgaagcagggacagguggaccugaaugaugcuguccucgcccugaccgaccugggccucaucuacacagcgaaguauccuaacucuuccgaccuggaucgccuuagccaaucccaucccauucugaauaugguugacaccaaaaagucuagccucaacaucuccggguacaauuuuagccugggagccgcugugaaagccggcgcuugcaugcuugaugggggaaacaugcuggagacaaucaaggugaccccucagacggucgacggcauucucaaaucuauccugaaggugaaaagaucccugggcauguucguuagcgauacacccggggaacggaauccuuaugagaacauucucuacaagaucugucugucuggagacggcuggccguauauugccagccgcaccuccaucguggggagagcgugggaaaacacaaccgucgaucuugagucugacgagaagccccagaaagugggagccgcuggcagcaauaagucccugcagagcgccggguuuccuaccggacucacauacucucaacugaugacgcugaaagauuccaugaugcagcuugaccccagcgcuaagaccuggauugauaucgaaggccggccugaggaccccguugaaaucgcccucuaccagccgaugucuggcugcuauauucacuucuuuagagagccuacagaccugaaacaguucaagcaagaugccaaguacucccaugggaucgacgugaccgaucuguuucccgcucagccuggacucacaagcgcggucauugaagcccugccccgcaacauggugcuuaccugucagggcuccgacgauaucaaacggcugcucgacucucaggggagacgcgauauuaagcugaucgacaucgcucugagcaaagccgauucccggagauucgagaaugccgucugggaccaaugcaaggaucuuugucacaugcauacgggagugguuguggagaaaaagaagcgcggcgggaaagaagagauuacaccccacugcgcucucauggacuguaucauguaugaugccgcggucucuggcggacugaacauuccugugcugcgggcuguucucccgagagacaugguguuucgcaccagcucccccaaggucgugcuguga

SEQ ID NO: 9194 - RNA, 1710 nt, Artificial Sequence
  derived and/or modified CDS sequence (opt5) from LASV(LASV991-NIG-2009;Clade II)__AIT17771__NP
augagcgccuccaaggaggugaaaucuuuccuguggacccagagccucagacgggaacuguccggcuacugcucuagcaucaaacuucaagucguuaaggacgcucaggcccugcuccacgggcuggauuuuuccgaggugucuaacgugcagcgccuuaugagaaagcagaaacgggacgauagcgaccugaagcgccucagagaucugaaucaagcggucaacaaucugguggaacucaaguccacacagcagaaaagcauucugcggguuggaacgcuuaccucugacgaucugcucacacuggcugccgaccuugagaagcugaaauccaaggugauccgcaccgaaagaccccucagcucuggcgucuauauggggaaccuguccacacagcaacuggagcagcggcgcgcccuccugaauaugauuggaauggugggcggggcucagggaacccagccuggcagagauggcguugugcgggucugggacgugaaaaacccggaucuucugaauaaccaauucgggacaaugcccagccucacccuggccugucuuacgaagcagggacagguggaccugaaugaugcuguccucgcccugaccgaccugggccucaucuacacagcgaaguauccuaacucuuccgaccuggaucgccuuagccaaucccaucccauucugaauaugguugacaccaaaaagucuagccucaacaucuccggguacaauuuuagccugggagccgcugugaaagccggcgcuugcaugcuugaugggggaaacaugcuggagacaaucaaggugaccccucagacgauggacggcauucucaaaucuauccugaaggucaaaagaucccugggcauguucgugagcgauacacccggggaacggaauccuuaugagaacauucucuacaagaucugucugucuggagacggcuggccguauauugccagccgcaccuccaucguugggagagcgugggaaaacacaaccguggaucuugagucugacggaaagacccagaaagucagcacagccggcuccaauaagagccugcagucugcuggguuucccacgggacucaccuacucccaacugaugacacugaaagauagcaugaugcagcuugacccuucugccaagaccuggauugauaucgagggccggcccgaagacccuguggagaucgcucucuaccagcccauguccggcugcuauauucacuucuuuagagaaccgacagaccugaaacaguucaagcaagaugccaaguacagccaugggaucgacguuaccgaucuguuuccugcccagcccggacucacguccgcugugauugaggcgcugccucgcaacaugguccuuacaugucagggcucugacgauaucaaacggcugcucgacagccaggggagacgcgauauuaagcugaucgacaucgcccuguccaaagcugauucucggagauucgaaaaugccgugugggaccaaugcaaggaucuuugucacaugcauaccggagucgugguugagaaaaagaagcgcggcgggaaagaggaaauuacaccccacugcgcccucauggacuguaucauguaugaugcugccgugagcggcggacugaacauucccguccugcgggcggugcucccuagagacaugguuuuucgcaccuccagcccgaaggugguccuguga

SEQ ID NO: 9195 - RNA, 1710 nt, Artificial Sequence
  derived and/or modified CDS sequence (opt5) from LASV(LASV993-NIG-2009;Clade II)__AIT17779__NP
augagcgccuccaaggaggugaaaucuuuccuguggacccagagccucagacgggaacuguccggcuacugcucuaacaucaaacuucaagucguuaaggacgcucaggcccugcuccacgggcuggauuuuagcgagguguccaaugugcagcgccuuaugagaaagcagaaacgggacgauggagaccugaagcgccucagagaucugaaccaagcggucaauaaccugguggaacucaagucuacacagcagaaaagcauucugcggguuggcacgcuuaccuccgacgaucugcucacacuggcugccgaccuugagaagcugaaaagcaaggugauccgcaccgaaagaccccucucuuccggggucuauaugggaaaucugagcacacagcaacuggagcagcggcgcgcccuccugaacaugauuggcaugguugggggagcucagggcacccagccuggcagagaugggguggugcgggucugggacgugaaaaauccggaucuucugaacaaucaauucggaacaaugcccucucucacccuggccugucuuacgaagcagggccagguggaccugaacgaugcuguccucgcccugaccgaccuggggcucaucuacacagcgaaguauccuaauuccagcgaccuggaucgccuuucucaaucccaucccauucugaacaugguugacaccaaaaagagcucccucaauaucucuggauacaacuuuagccugggcgccgcugugaaagccggggcuugcaugcuugauggaggcaauaugcuggagacaaucaaggugaccccucagacgauggacggcauucucaaauccauccugaaggucaaaaagagccuggggauguucgugucugauacacccggagaaagaaacccuuaugagaacauucucuacaagaucugucuguccggcgacggguggccguauauugccagccggaccucuaucguuggacgcgcgugggaaaauacaaccguggaucuugagagcgacggcaaaccccagaaggucgggaccgccggauccaacaaaucucugcagagcgcuggcuuuccuacaggccucacguacucccaacugaugacccugaaggauagcaugaugcagcuugaccccucugccaaaacauggauugauaucgaggggagaccugaagaccccguggagaucgcucucuaccagccgauguccggaugcuauauucacuucuuucgggaaccuaccgaccugaagcaguucaagcaagaugccaaauacagccauggcaucgacguuacagaucuguuuucugcccagcccgggcucaccuccgcugugauugaggcgcugccuagaaauaugguccuuacgugucagggaagcgacgauaucaagcgccugcucgacucccagggccggagagauauuaaacugaucgacaucgcccugucuaagacagauagccgccgguucgaaaacgcugugugggaccaaugcaaagaucuuugucacaugcauaccggggucgugguugagaagaagaaaagaggcggaaaggaggaaauuacaccccacugcgcccucauggacuguaucauguaugaugccgcuguguccggcgggcugaauauucccguccugcgcgccgugcucccucgggacaugguuuuuagaaccucuagcccgaaagugguccuguga

SEQ ID NO: 9196 - RNA, 1710 nt, Artificial Sequence
  derived and/or modified CDS sequence (opt5) from LASV(Nig08-04;Clade II)__ADU56611__NP
augagcgccuccaaggaggugaaaucuuuccuguggacccagagccucagacgggaacuguccggcuacugcucuaacaucaaacuucaagucguuaaggacgcucaggcccugcuccacgggcuggauuuuagcgagguguccaaugugcagcgccuuaugagaaagcagaaacgggacgauggagaccugaagcgccucagagaucugaaccaagcggucaauaaccugguggaacucaagucuacccagcagaaaagcguucugcgggugggcacgcuuaccuccgacgaucugcucacacuggcugccgaccuugagaagcugaaaagcaaggucauucgcaccgaaagaccccucucuuccgggguguauaugggaaaucugagcacacagcaacuggagcagcggaaagcccuccugucuaugaucggcaugguugggggagcucagggcacccagccuggccgcgaugggguggucagagugugggacgugaagaacccggaucuucugaauaaccaauucggaacaaugcccucccucacccuggccugucuuacgaagcagggccaggucgaccugaaugaugcuguucucgcccugaccgaccuggggcucauuuacacagcgaaauauccuaacagcucugaccuggaucggcuuucccaaagccaucccauccugaauaugguggacaccaagaaauccucucucaacauuagcggauacaauuuuucccugggcgccgcugugaaggccggggcuugcaugcuugauggaggcaacaugcuggagacaaucaaagucaccccucagacgauggacggcauccucaagagcauucugaaagugaagcgcucucuggggauguucguuuccgauacacccggagaaagaaauccuuaugagaacauccucuacaagauuugucugagcggcgacggguggccguauaucgccucucggaccagcauugugggacgcgcgugggaaaacacaaccgucgaucuugaguccgacggcaaaccccagaagguggggaccgccggaucuaauaaaagccugcaguccgcuggcuuuccuacaggccucacguacagccaacugaugacccugaaggauucuaugaugcagcuugaccccuccgccaaaacauggaucgauauugaggggagaccugaagaccccguugagaucgcucucuaccagccgaugagcggaugcuauauccacuucuuucgggaaccuaccgaccugaagcaguucaagcaagaugccaaauacucucauggcauugacgugacagaucuguuuuccgcccagcccgggcucaccagcgcugucaucgaggcgcugccuagaaacauggugcuuacgugucagggauccgacgauauuaagaaacugcucgacucucagggccgccgggauaucaagcugauugacaucagccugaauaaagccgauuccagacgcuucgaaaacgcugucugggaccaaugcaaggaucuuugucacaugcauacaggggugguuguggagaagaaaaagcggggcggaaaagaggaaaucacaccccacugcgcccucauggacuguauuauguuugaugccgcugucucuggcgggcugaauauccccauucugagagccgugcucccucgcgacaugguuuuccggaccagcuccccgaaggugguccuguga

SEQ ID NO: 9197 - RNA, 1710 nt, Artificial Sequence
  derived and/or modified CDS sequence (opt5) from LASV(Nig08-A47;Clade II)__ADU56631__NP
augagcgccuccaaggaggugaaaucuuuccuguggacccagagccucagacgggaacuguccggcuacugcucuaacaucaaacuucaagucguuaaggacgcucaggcccugcuccacgggcuggauuuuagcgagguguccaaugugcagcgccuuaugagaaagcagaaacgggacgauucugaccugaagcgccucagagaucugaaccaagcggucaauaaccugguggaacucaagagcacccagcagaaauccauucugcggguuggaacgcuuaccagcgacgaucugcucacacuggcugccgaccuugagaagcugaaaucuaaggugauccgcaccgaaagaccccucuccagcggcgucuauauggggaaucugucuacacagcaacuggagcagcggcgcgcccuccugaacaugauuggaauggugggcggggcucagggaacccagccuggcagagauggcguugugcgggucugggacgugaaaaauccggaucuucugaacaaucaauucgggacaaugcccucccucacccuggccugucuuacgaagcagggacagguggaccugaacgaugcuguccucgcccugaccgaccugggccucaucuacacagcgaaguauccuaauagcucugaccuggaucgccuuucccaaagccaucccauucugaacaugguugacaccaaaaaguccucucucaauaucagcggguacaacuuuucccugggagccgcugugaaagccggcgcuugcaugcuugaugggggaaauaugcuggagacaaucaaggugaccccucagacgauggacggcauucucaaaagcauccugaaggucaaaaagucucugggcauguucguguccgauacacccggggaaagaaacccuuaugagaacauucucuacaagaucugucugagcggagacggcuggccguauauugccucucggaccagcaucguugggcgcgcgugggaaaauacaaccguggaucuugaguccgacggaaaaccccagaaggucggcaccgccgggucuaacaaaagccugcaguccgcuggauuuccuacaggccucacguacagccaacugaugacccugaaggauucuaugaugcagcuugaccccuccgccaaaacauggauugauaucgagggcagaccugaagaccccguggagaucgcucucuaccagccgaugagcgggugcuauauucacuucuuucgggaaccuaccgaccugaagcaguucaagcaagaugccaaauacucucauggaaucgacguuacagaucuguuucccgcccagccuggccucaccuccgcugugauugaggcgcugcccagaaauaugguccuuacgugucaggggagcgacgauaucaagcgccugcucgacucccagggacggagagauauuaaacugaucgacaucgcccugucuaaggcugauagccgccgguucgaaaacgccgugugggaccaaugcaaagaucuuugucacaugcauacaggcgucgugguugagaagaagaaaagagggggcaaggaggaaauuacaccccacugcgcccucauggacuguaucauguaugaugcugccguguccggaggccugaauauuccuguccugcgcgcggugcucccgcgggacaugguuuuuagaaccucuagccccaaagugguccuguga

SEQ ID NO: 9198 - RNA, 1713 nt, Artificial Sequence
  derived and/or modified CDS sequence (opt5) from LASV(GA391;Clade III)__AAA46284__NP
augagcgccuccaaggaggugagaucuugccuguggacccagagccuccggcgcgaacuguccggcuacuguucuaacaucaaacuucaagucguuaaggacgcucaggcccugcuccacgggcuggauuucagcgagguguccaaugugcagagacuuaugcggaaacagaagcgcgacgauggagaccugaaaagacuccgggaucugaaccaagcggucaauaaccugguggaacucaagucuacacagcagaaaagcguucugcgcgugggcacgcuuuccagcgacgaucugcucauucuggcugccgaccuugagaaacugaagucuaaagucaccagaacagaacggccccucuccagcgggguguauaugggaaaucugucuucccagcaacuggaucagcgcagagcccuccugaacaugaucggcaugaccgggguuagcggaggcggcaagggggcuucuaauggaauugugcgggucugggacgugaaaaacgccgagcuucugaauaaccaguuuggcacaaugccuucccucacccuggcuugccuuacaaagcaggggcaaguggaucugaaugacgccguccaggcgcucaccgaucugggacugaucuacacggccaaguauccgaacagcuccgaccucgaccgccugucucagagccaucccauucuuaauaugaucgauaccaaaaaguccagccugaacaucucuggcuacaauuucucccucggggcugccguuaaagcuggagccuguaugcuggacggcggcaacaugcuugagacaauuaaggugagcccucaaaccauggaugggauccugaaaucuauucucaaggugaaaaagagccugggaauguuugucuccgacacacccggcgaaagaaacccuuaugagaauauccuguacaagauuugccucucuggggauggauggagcuauaucgcgucccggaccagcauugugggccgcgccugggaaaacacgguuguggaccuggagcaggauaauaaaccccagaagaucgggaacggaggcucuaauaaaucccuucagagcgcuggcuucgccgcugggcugaucuacucucaacucaugacacugaaggacuuuaaauguuucaaccugauuccuaaugccaagaccuggauggauaucgagggaagaccggaagaccccgucgagauugcccuuuaccagccuuccagcggcugcuaugugcacuuuuuccgggaacccacagaucucaagcaguuuaaacaggacgcuaaguacucccaugggagagacguuaccgaucuguucgcggcccaaccuggacugaccucugcugugaucgaggcccucccccgcaacauggucauuacaugucagggcagcgaagacauccggaaacugcuugagucccaggggagacgcgauaucaagcugauugacaucacgcucucuaaagccgauagccggaaguuugagaaugcugugugggaccaguucaaggaucugugccacaugcauaccggcgucgugguugaaaagaagaaaagaggaggcaaggaggaaauuacaccgcacugugcccugauggacugcaucauguuugaugcggcuguguccgggggacuugacgccaaaguccuccgcgugguucugccucgggauaugguguucagaaccagcacacccaaggucgugcuguga

SEQ ID NO: 9199 - RNA, 1710 nt, Artificial Sequence
  derived and/or modified CDS sequence (opt5) from LASV(ISTH2121-NIG-2012;Clade III)__AIT17541__NP
augagcgccuccaaggaggugaaaucuuuccuguggacccagagccucagacgggaacuguccggcuacugcucuaacaucaaacuucaagucguuaaagacgcucaggcccugcuccacgggcuggauuuuagcgagguguccaaugugcagcgccuuaugagaaagcagaaacgggacgauggagaccugaagcgccucagagaucugaaccaagcggucaauaaccugguggaacucaagucuacacagcagaaaagcguucugcgggugggcacgcuuuccagcgacgaucugcucacccuggcugccgaccuugagaagcugaaaucuaaggucauucgcacagaaagaccccucuccagcgggguguauaugggaaaucugucuucccagcaacuggaucagcggcgcgcccuccugaacaugaucggcaugaccagcgacagacagggggcuucuacaggacgggauggcauuguucgcgugugggacgucaaaaaugccgagcuucugaacaaucaguucggcaccgugccuucccucacacuggcuugucuuaccaagcaaggacagguggaucugaacgacgccguccaggcgcucacggaccuggggcugaucuacaccgccaaguauccgaauagcuccgaucucgacagacugucucaaagccaucccauucuuaacaugaucgauacaaagaaguccagccugaauaucucuggcuacaacuuuucccucggggcugccguuaaagcuggagccugcaugcuggacggcgggaauaugcuugagaccauuaaggugagcccucagacaauggauggaauccugaaaucuauucucaaggugaaacggagccugggcauguucgucuccgacauccccggcgaacgcaacccuuaugagaacauucuguacaagaucugucucucuggggauggauggcccuauauugcgagcagaaccuccaucacgggccgggccugggaaaauacaaucguggaccuggagagcgauucuaagccucagaaaccggggaacuccggaagcaauagaucucuucaguccgcuggcuuucccgccgggcugaccuacagccaacucaugacacugaaggacuccaugcugcagcuugauccuaacgcuaaaaccuggauggacauugagggacgccccgacgauccuguugaaaucgcccucuaccagcccucuagcggcugcuauauucacuucuuucgggagccgaccgaccugaagcaguucaaacaagaugccaaguacucccauggcaucgacgugggggaucuguuugcugcgcagccuggacucacaucugccgucauugaagcucugcccagaaauauggugaucacgugucagggcagcgaggacaucaagaaacuucuggaaucccaggggcgcaaggauauuaaacucguugacaucagcaugucuaagccugauucccggaaauucgagaacgccgugugggaccaauauaaggaucugugccacaugcauaccggaauugucguggagaagaaaaagagaggcgggaaagaagagaucacaccccacugugcccugauggacugcauuauguuugaugcugccgucgugggcggacuugacgcgcgcauccuccgggcuguucugcccagagacaugguguuccgcaccagcacaccuaaggucgugcuguga

SEQ ID NO: 9200 - RNA, 1710 nt, Artificial Sequence
  derived and/or modified CDS sequence (opt5) from LASV(Nig08-A18;Clade III)__ADU56615__NP
augagcgccuccaaggaggugaaaucuuuccuguggacccagagccucagacgggaacuguccggcuacugcucuaacaucaagcugcaagucguuaaagacgcucaggcccugcuccacgggcuggauuuuagcgagguguccaaugugcagcgccuuaugagaaagcagaaacgggacgauucugaccugaagcgccucagagaucugaaccaagcggucaauaaccugguggaacucaagagcacacagcagaaauccguucugcggauuggaacgcuuagcucugacgaucugcucauccuggcugccgaccuugagaagcugaaauccaaggugguccgcaccgaaagaccccucagcucuggcauuuauauggggaaucuguccagccagcaacuggaucagcggaaagcccuccugaacaugaucggaaugacaggcgggaauggaggccgcaacgcuaccucugacggcauugugagaguuugggaugugaagaaugccgagcuucugaacaaucaguucgggacaaugccuucccucacccuggcuugucuuacaaagcagggacaagucgaccugaacgaugccgugcaggcgcucaccgaccugggccugaucuacacggccaaauauccgaauagcuccgaccucgaucggcuggcucagucucaucccauccuuaacaugauugacaccaagaaaagcucccugaauaucagcggguacaacuuuucucucggagccgcugugaaggccggcgcgugcaugcuggaugggggaaacaugcuugagacaauuaaagucuccccucaaaccauggacggcauccuuaagagcauucucaaaguuaagcgcucucugggcauguucaucagcgauacacccggggaaagaaauccuuaugagaacauucuguacaagaucugucucuccggagacggcuggcccuauaucgccucucggaccagcauuguggggcgcgcuugggaaaauacgguggucgaucuggagacagacaacaaaccucagaagaccggaaauggcggguccaacaaaagccuucagucugccggauuugcugccggccugacauacucccagcucaugacccugaaggauagcaugcugcaacuugacccgaaugccaaaaccuggauggauaucgagggcagacccgaagacccuguggagauugcucucuaccagcccguuucugggugcuauauccacuucuuucgggaaccuacagaccugaagcaguucaagcaggaugcgaaauacucccauggaauugacgugacggaucuguuugccgcucaacccggccucaccagcgccgucaucgaggcccugccgagaaacauggugaucacaugucagggguccgaagacauucgcaaacuucuggagucucagggacggagagauaucaagcucauugacaucagccuguccaagguugauucucgcaaauucgagaaugcugugugggaccaguuuaaggaucugugccacaugcauaccggcauugucguggaaaagaaaaagagagggggcaaagaggaaaucacaccucacugugcccuuauggacugcaucauguucgaugcggcugucagcggaggcguggacgccaagguucuccgggccgugcugccccgcgauauggucuuucggaccuccacgccuaaagugguucuguga

SEQ ID NO: 9201 - RNA, 1710 nt, Artificial Sequence
  derived and/or modified CDS sequence (opt5) from LASV(Nig08-A19;Clade III)__ADU56619__NP
augagcgccuccaaggaggugaaaucuuuccuguggacccagagccucagacgggaacuguccggcuacugcucuaacaucaaacuucaagucguuaaggacgcucaggcccugcuccacgggcuggauuuuagcgagguguccaaugugcagcgccuuaugagaaagcagaaacgggacgauggagaccugaagcgccucagagaucugaaccaagcggucaauaaccugguggaacucaagucuacacagcagaaaagcguucugcgggugggcacgcuuuccagcgacgaucugcucguccuggcugccgaccuugagaagcugaaaucuaaggugguucgcaccgaaagaccccucuccagcgggauuuauaugggaaaucugucuucccagcaacuggaucagcggaaagcccuccugaacaugaucggcaugacagggggaaauggcggccgcaacaccacaagcgacgggauugugagagucugggaugugaagaaugcugagcuucugaacaaucaguucggaaccaugccuucucucacacuggccugucuuaccaagcagggccaaguggaccugaacgaugcuguccaggcccucacggaccuggggcugaucuacaccgcgaaauaucccaauuccagcgaccucgaucggcuggcccagucccauccgauucuuaacaugaucgacacaaagaaaucuagccugaauaucuccggauacaacuuuagccucggcgcugccguuaaggcuggggccugcaugcuggauggaggcaacaugcuugagaccauuaaagugucuccucaaacaauggacggcauccugaaguccauucucaaagugaagcgcagccuggggauguucaucucugauacccccggagaaagaaauccuuaugagaacauucuguacaagaucugucucagcggcgacggguggcccuauauugcgucccggacgucuaucgucggacgcgccugggaaaauacagugguugaucuggagagcgacaacaaaccucagaagaccggcaaugggggauccaacaaaagccuucagucugcuggcuuugccgcuggccugacauacucccagcucaugacccugaaggauagcaugcugcaacuugacccgaaugccaaaaccuggauggauaucgaggggagacccgaagacccuguggagauugcccucuaccagcccucuuccggaugcuauauccacuucuuucgggaaccuacagaccugaagcaguucaagcaggaugcuaaauacagccauggcauugacgucacggaucuguuugcggcccaacccgggcucaccuccgcugugaucgaggcccugccgagaaacaugguuauuacaugucagggaucugaagacauccgcaaacuucuggagagccagggccggagagauaucaagcucauugacaucucccugucuaagguggauagccgcaaauucgagaaugccgucugggaccaguuuaaggaucugugccacaugcauaccgggauuguggucgaaaagaaaaagcggggcggaaaagaggaaaucacaccucacugugcucuuauggacugcauuauguucgaugccgcgguguccggcgggguugacgcuaaggugcucagagccguccugccccgcgauaugguguuucggaccagcacgccuaaaguugugcuguga

SEQ ID NO: 9202 - RNA, 1710 nt, Artificial Sequence
  derived and/or modified CDS sequence (opt5) from LASV(ONM-299;Clade III)__ANH09735__NP
augagcgccuccaaggaggugaaaucuuuccuguggacccagagccucagacgggaacuguccggcuacugcucuaacaucaaacuucaagucguuaaggacgcucaggcccugcuccacgggcuggauuuuagcgagguguccaauauucagcgccuuaugagaaaggaacggcgcgacgauucugaccugaaaagacuccgggaucugaaccaggcggugaauaaccuggucgagcucaagagcacacaacagaaguccgugcugcgcguuggaacgcuuagcucugacgaucugcucacccuggcugccgaccuugaaaaacugaaguccaaagugaucagaacagagcggccccucagcucuggcgucuauauggggaaucuguccacccagcagcuggaucaacgcagagcccuccugaacaugauuggaaugacaaauggcgggcagggagcuaacgccggccgggacggcaucgugcgcguuugggaugugaagaaugcugagcuucugaacaaucaguucgggaccaugccuagccucacacuggccugucuuaccaaacagggacaagucgaccugaacgaugcggugcaggcccucacggaccugggccugauuuacaccgcuaaguaucccaauucuuccgaccucgauagacugagccagaaccaucccauccuuaauaugaucgacacaaagaaauccucucugaacauuagcggguacaacuuuucccucggagccgcugugaaggccggcgcgugcaugcuggaugggggaaauaugcuugaaaccaucaaagucagcccucaaacaauggacggcauucugaagucuauccucaaaguuaagcggucccugggcauguucgugagcgauacccccggggagcgcaacccuuaugaaaauauucuguacaaaaucugucucucuggagacggcuggcccuauguggccagcagaacguccauuaucgggcgggcuugggagaacacagucguggaucuggagucugacagcaagccucagagaccgggauccaaggaaagcaaucgcucucuucagaccgccggcuuucccgcugggcugacauacucccagcucaugacccugaaagauagcaugcugcaacuugacccuaacgccaagaccuggauggauaucgagggacggcccgacgacccuguugaaauugcccucuaccagcccucuuccggcugcuauauccacuucuuuagagagccgacagaucugaaacaguucaagcaggacgcuaaauacagccauggcauugauaucggggaccuguuugcggcccaaccuggacucacguccgcugugauugaagcccugccccgcaauauggucaucaccugucagggcucugaggauaucaagcggcuucuggagagccaggggagaaaggacauucgccucguggauaucucccugucuaaagccgacagccggaaguucgaaaacgcuguuugggaucaguuuaaagaccugugcaauaugcacacaggaguggucguggagaagaaaaagaagggcgggaaagaagagauuaccccucauugugcccuuauggauugcaucauguucgacgcggcugucaugggcggacucgaugccaaggugcugagagccguucugcccaaagacaugguguuucgcacauccaccccgcgggucgugcucuga

SEQ ID NO: 9203 - RNA, 1710 nt, Artificial Sequence
  derived and/or modified CDS sequence (opt5) from LASV(ONM-314;Clade III)__ANH09737__NP
augagcgccuccaaggaggugaaaucuuuccuguggacccagagccucagacgggaacuguccggcuacugcucuaacaucaaacuucaagucguuaaggacgcucaggcccugcuccacgggcuggauuuuagcgagguguccaauauucagcgccuuaugagaaaggaacggcgcgacgauucugaccugaaaagacuccgggaucugaaccaggcggugaauaaccuggucgagcucaagagcacacaacagaaguccgugcugcgcguuggaacgcuuagcucugacgaucugcucacccuggcugccgaccuugaaaaacugaaguccaaagugaucagaacagagcggccccucagcucuggcgucuauauggggaaucuguccacccagcagcuggaucaacgcagagcccuccugaacaugauuggaaugacaaauggcgggcagggagcuaacgccggccgggacggcaucgugcgcguuugggaugugaagaaugcugagcuucugaacaaucaguucgggaccaugccuagccucacacuggccugucuuaccaaacagggacaagucgaccugaacgaugcggugcaggcccucacggaccugggccugauuuacaccgcuaaguaucccaauucuuccgaccucgauagacugagccagaaccauccgauccuuaauaugaucgacacaaagaaauccucucugaacauuagcggguacaacuuuucccucggagccgcugugaaggccggcgcgugcaugcuggaugggggaaauaugcuugaaaccaucaaagucagcccucaaacaauggacggcauucugaagucuauccucaaaguuaagcggucccugggcauguucgugagcgauacccccggggagcgcaacccuuaugaaaauauucuguacaaaaucugucucucuggagacggcuggcccuauguggccagcagaacguccauuaucgggcgggcuugggagaacacagucguggaucuggagucugacagcaagccucagagaccgggauccaaggaaagcaaucgcucucuucagaccgccggcuuucccgcugggcugacauacucccagcucaugacccugaaagauagcaugcugcaacuugacccuaacgccaagaccuggauggauaucgagggacggcccgacgacccuguugaaauugcccucuaccagcccucuuccggcugcuauauccacuucuuuagagagccgacagaucugaaacaguucaagcaggacgcuaaauacagccauggcauugauaugggggaccuguuugcggcccaaccuggacucacguccgcugugaucgaagcccugccccgcaauauggucauuaccugucagggcucugaggauaucaagcggcuucuggagagccaggggagacgcgacauccggcucguggauauuucccugucuaaggccgacagcagaaaauucgaaaacgcuguuugggaucaguuuaaggaccugugcaauaugcacacaggaguggucguggagaaaaagaaaaagggcgggaaggaagagaucaccccucauugugcccuuauggauugcauuauguucgacgcggcugucaugggcggacucgaugccaaagugcugcgcgccguucugcccaaggacaugguguuucggacauccacccccagagucgugcucuga

SEQ ID NO: 9204 - RNA, 1710 nt, Artificial Sequence
  derived and/or modified CDS sequence (opt5) from LASV(ONM-700;Clade III)__ANH09739__NP
augagcgccuccaaggaggugaaaucuuuccuguggacccagagccucagacgggaacuguccggcuacugcucuaacaucaaacuucaagucguuaaggacgcucaggcccugcuccacgggcuggauuuuagcgagguguccaauauucagcgccuuaugagaaaggaacggcgcgacgauucugaccugaaaagacuccgggaucugaaccaggcggugaauaaccuggucgagcucaagagcacacaacagaaguccgugcugcgcguuggaacgcuuagcucugacgaucugcucacccuggcugccgaccuugaaaaacugaaguccaaagugaucagaacagagcggccccucagcucuggcgucuauauggggaaucuguccacccagcagcuggaucaacgcagagcccuccugaacaugauuggaaugacaagcggcgggcagggagcuaaugccggccgggacggcaucgugcgcguuugggaugugaagaacgcugagcuucugaauaaccaguucgggaccaugccuucucucacacuggccugucuuaccaaacagggacaagucgaccugaaugaugcggugcaggcccucacggaccugggccugauuuacaccgcuaaguauccgaacuccagcgaccucgauagacugucccagaaucaucccauccuuaacaugaucgacacaaagaaaucuagccugaauauuuccggguacaacuuuagccucggagccgcugugaaggccggcgcgugcaugcuggaugggggaaacaugcuugaaaccaucaaagucucuccucaaacaauggacggcauucugaaguccauccucaaaguuaagcggagccugggcauguucgugucugauacccccggggagcgcaauccuuaugaaaacauucuguacaaaaucugucucagcggagacggcuggcccuauguggccuccagaacgucuauuaucgggcgggcuugggagaauacagucguggaucuggagagcgacuccaagccucagagaccgggaagcaaggaaucuaaccgcucccuucagaccgccggcuuucccgcugggcugacauacagccagcucaugacccugaaagauucuaugcugcaacuugacccuaaugccaagaccuggauggauaucgagggacggcccgacgacccuguugaaauugcccucuaccagcccuccagcggcugcuauauccacuucuuuagagagccgacagaucugaaacaguucaagcaggacgcuaaauacucccauggcauugauaucggggaccuguuugcggcccaaccuggacucacgucugcugugauugaagcccugccccgcaacauggucaucaccugucagggcagcgaggauaucaagcggcuucuggagucccaggggagacgcgacauucggcucguggauaucucucugagcaaggccgacuccagaaaauucgaaaaugcuguuugggaucaguuuaaggaccugugcaacaugcacacaggaguggucguggagaaaaagaaaaagggcgggaaggaagagauuaccccucauugugcccuuauggauugcaucauguucgacgcggcugucaugggcggacucgaugccaaagugcugcgcgccguucugcccaaggacaugguguuucggacaagcacccccagagucgugcucuga

SEQ ID NO: 9205 - RNA, 1710 nt, Artificial Sequence
  derived and/or modified CDS sequence (opt5) from LASV(Weller;Clade III)__AAT49009__NP
augagcgccuccaaggaggugaaaucuuuccuguggacccagagccucagacgggaacuguccggcuacugcucuaacaucaagcugcaagucguuaaagacgcucaggcccugcuccacgggcuggauuuuagcgagguguccaaugugcagcgccuuaugagaaagcagcggcgcgacgauggagaccugaaaagacuccgggaucugaaccaagcggucaauaaccugguggaacucaagucuacacagcagaaguccguucugcgcgugggcacgcuuaauuccgacgaucugcucguccuggcugccgaccuugagaaacuuaagagcaaagugauuagaaccgaacggccccucucuuccgggaucuauaugggaaaccugagcucucagcaacuggaucagcgcagagcccuccugaauaugauuggcaugacagggggaaaccggggcggcgggaccuccagcgacggaaucguucgcgugugggaugucaagaaugcugagcuucugaacaaucaguucggcacaaugccuucucucacccuggccugucuuacaaaacaggggcaaguggaccugaacgaugcugugcaggcccucaccgaccugggacugauuuacacggcgaaguauccgaauagcagcgaccucgauagacuggcccagucccaucccauccuuaacaugaucgacaccaagaaaucuagccugaauauuuccggcuacaacuuuagccucggggcugccgucaaggcuggagccugcaugcuggauggcggcaacaugcuugagacaaucaaaguuucuccucaaaccauugacgggauccugaagacaauucucaaagugaagaaaucccugggaauguucaucagcgaugugcccggcgaacggaauccuuaugagaacauucuguacaagaucugucucucuggggacggauggcccuauaucgcgagccgcaccuccauugucggcagagccugggaaaauacggugguugaucuggagucugacaacaagccucagaaaacagggaauggaggcagcaacaagucccuucagagcgcuggcuuugccgcugggcugaccuacucucagcucaugacacugaaagauuccaugcugcaacuugacccgaauagcaagaccuggauggauaucgagggacggcccgaagacccuguggagauugcccucuaccagcccaacucuggcugcuauauccacuucuuuagagaaccuaccgaccugaaacaguucaagcaggaugccaaguacucccaugggauugacgucacagaucuguuugcugcgcaacccggacucacgagcgccgugaucgaggcucugccgcgcaauaugguuaucaccugucagggcuccgaagacauucggaaacuucuggagucucaggggagacgcgauaucaagcucauugacaucagccugaacaaagccgauucccggaaguucgagaaugccgugugggaccaguuuaaagaucugugccacaugcauacaggcgucguggucgaaaagaagaaaagaggaggcaaggaggaaauuaccccucacugugcucuuauggacugcaucauguucgaugccgcggugucugggggacucgacgcuaaaguucugcgcgccgugcugccccgggauauggucuuuagaacaagcaccccuaaggugguucucuga

SEQ ID NO: 9206 - RNA, 1710 nt, Artificial Sequence
  derived and/or modified CDS sequence (opt5) from LASV(BA366;Clade IV)__ADI39452__NP
augagcguguccaaggaggucaaaucuuuccuguggacccagagccucagacgggaacuguccggcuacugcucuaacaucaaacuucaaguugugaaggacgcccaggcucugcuccacgggcuggauuuuagcgagguguccaauguccagcgccuuaugagaaagcagcggcgcgacgauaacgaccugaaaagacuccgggaucugaaucaagccgugaacaaucugguugaacucaagucuacacagcaaaagagcgugcugcgcgucggaacgcuuaccuccgacgaucugcucauucuggcggcugaccuugagaaacugaagacaaaagugaccagaacagaacggccccucagcgccggcguuuauauggggaaccugucuucccagcagcuggagcagcgcagagcccuccugaauaugaucggaaugaacggcgggaaucagggagugcaggcuggccgggauggcgucgugcgcgugugggacgucaagaacgccgagcuucugaauaaccaauucgggaccaugccuagccucacacuggcuugucuuaccaaacagggacagguugaucugaaugacgccgugcaagcgcucacggaucugggccugauuuacaccgccaaguauccgaacacaucugaccucgacagacuggcucagucccaucccauccuuaauaugauugauaccaagaaaagcucucugaacaucuccggguacaacuuuagccucggagccgcugugaaggccggcgcgugcaugcuggacgggggaaauaugcuugaaacaaucaaagucuccccucagaccauggauggcauucugaagucuauccucaaagugaagcggacgcugggcauguucguuagcgacacacccggggagcgcaacccuuaugaaaauauucuguacaaaaucugucucuccggagauggcuggcccuauauugccagcagaaccucuaucacagggcgggcuugggagaacaccauuguggaccuggaguccgauggaaagccucagaaggucggcaauaacgggagcaauaaaucucuucaaagcgccggauuuaccgcuggccugacauacucccagcucaugacgcugaaggacgccaugcugcagcuugauccgaacgccaaaaccuggauggacaucgaaggcagacccgaggauccuguggaaguugcucucuaccagcccucuagcgggugcuauauccacuucuuucgcgagccuacagaccugaagcaauucaaacaggacgcgaaguacucccauggaauugaugugaccgaccuguuugccgcucagcccggccucacaagcgccgucaucgaagcccugccgcggaauauggugauuaccugucaggggucugaggaugucagaaaacuucuggagucccaaggacgcaaggacaucaagcucauugauaucgcucugagcaaagccgacucucggaaguaugaaaacgcggugugggaucaguacaaagaccugugccacaugcauacgggcguuguggucgagaagaagaaaagagggggcaaggaagagaugacaccucacugugcucuuauggauugcaucauguucgacgccgccguguccggaggccucagcacccagguucugcgcgcugugcugccccgggauauggucuuuagaaccuccacaccuaaaguggugcucuga

SEQ ID NO: 9207 - RNA, 1710 nt, Artificial Sequence
  derived and/or modified CDS sequence (opt5) from LASV(G1180-SLE-2010;Clade IV)__AIT17169__NP
augagcgccuccaaggagaucaaaucuuuccuguggacccagagccucagacgggaacuguccggcuacugcucuaacauuaagcugcaaguggucaaagacgcucaggcccugcuccacgggcuggauuuuagcgagguuuccaaugugcagcgccuuaugagaaaggaacggcgcgacgauaacgaccugaaaagacuccgggaucugaaucaggcggugaacaaucuggucgagcucaagucuacacaacaaaagagcauccugcgcgugggaacgcuuaccuccgacgaucugcucauucuggcugccgaccuugaaaaacuuaagagcaaaguuaucagaacagagcggccccucucugccggcguguauauggggaaccuguccagccagcagcuggaucagcgcagagcucuccugucuaugauuggaauguccagcggcaaucagcgggcccaggcugggcgcgacggagucgugagaguuugggaugugaagaacgucgagcuucugaauaaccaguucggcaccaugccuucucucacacuggccugucuuaccaaacaaggccagguggaccugaaugaugcggugcaggcccucacagaccuggggcugaucuacaccgcuaaguauccgaacacguccgaccucgaucggcugacccaaagccaucccauccuuaauaugauugacacaaagaaauccucucugaacaucagcggauacaauuuuucccucggcgccgcugucaaggccggggcgugcaugcuggauggaggcaacaugcuugaaaccauuaaaguuagcccucagacaauggacgggauccugaagucuauucucaaagugaagaaagcccugggaauguucaucuccgauacccccggcgagcgcaacccuuaugaaaauauucuguacaagaucugucucagcggcgacggguggcccuauaucgcuucuagaacgagcauuacaggacgggccugggagaacaccguggucgaucuggaguccgacggcaagccucagaaagcugggucuaauaacagcaauaagucccuucagagcgugggauuuacagccggccugaccuacucucaacucaugacccugaaagaugccaugcugcagcuugacccgaacgcuaagacauggauggauaucgaagggagacccgaggacccuguugaaauugcgcucuaccagcccuccagcggaugcuauauccacuucuuucgcgagccuacggaccugaaacaguucaagcaagaugccaaguacucucauggcauugacgugaccgaucuguuugcugcccagcccggccucacauccgccgucaucgacgcucugccgcggaauauggugaucaccugucaggggagcgaugacauuagaaaacuucuggaaucccagggacgcaaggauaucaaacucauugacaucgcccugucuaagacagauagccggaaauaugagaacgcgguuugggaccaauacaaggaucugugccacaugcauaccggcguggucguggagaagaaaaagagagggggaaaagaagagauuacgccucacugugcucuuauggacugcaucauguucgaugccgccgucuccggcgggcucaauacaucugugcugcgcgcuguucugccccgggacaugguguuuagaaccagcaccccucgcgucgugcucuga

SEQ ID NO: 9208 - RNA, 1710 nt, Artificial Sequence
  derived and/or modified CDS sequence (opt5) from LASV(G1190-SLE-2010;Clade IV)__AIT17173__NP
augagcgccuccaaggagaucaaaucuuuccuguggacccagagccucagacgggaacuguccggcuacugcucuaacauuaagcugcaaguggucaaagacgcucaggcccugcuccacgggcuggauuuuagcgagguuuccaaugugcagcgccuuaugagaaaggaacggcgcgacgauaacgaccugaaaagacuccgggaucugaaucaggcggugaacaaucuggucgagcucaagucuacacaacaaaagagcauccugcgcgugggaacgcuuaccuccgacgaucugcucauucuggcugccgaccuugaaaaacuuaagagcaaaguuacaagaaccgagcggccccucucugccggcguguauauggggaaccuguccagccagcagcuggaucagcgcagagcucuccugaauaugaucggaaugucuggcuccaaccagggggcccgggcuggacgcgacggcgucgugagaguuugggaugugaagaaugccgagcuucugaacaaucaguucggcacaaugccuagccucacccuggcgugucuuacaaaacaggggcaagucgaccugaacgaugccgugcaggcucucaccgaccugggacugauuuacacggccaaguauccgaauaccucugaccucgaucggcugacacagucccaucccauccuuaacaugaucgacaccaagaaaagcucccugaauauuucuggcuacaacuuuagccucggggcugccgugaaggcgggagccugcaugcuggauggcgggaacaugcuugaaacaaucaaagucuccccucaaaccauggacggcauucucaagagcauccugaaaguuaagaaagcucugggaauguucauuucugaugcccccggcgagcgcaauccuuaugaaaacauccuguacaagauuugucucuccggggacggauggcccuauaucgcuagcagaacgucuaucacaggccgggccugggagaauaccgugguggaucuggagagcgacgggaagccucagaaagccggauccaacggcucuaauaagagccuucaguccgcuggguuuacagcgggacugaccuacagccagcucaugacccugaaagaugccaugcugcaacuugacccgaacgcuaagacauggauggauauugaaggcagacccgaggacccugucgaaaucgcccucuaccagcccucuuccggcugcuauauucacuucuuucgcgagccuacggaccugaaacaguucaagcaggaugccaaguacagccaugggaucgacgugaccgaucuguuugcugcccaacccggacucacaucugcgguuauugacgcucugccgcggaauauggugaucaccugucagggcuccgaugacaucagaaaacuuuucgaaagccaggggcgcaaggauauuaaacugaucgacauugcccucuccaagacagauucucggaaauaugagaacgccgucugggaccaguacaaggaucugugccacaugcauaccggaaucgugguugagaagaaaaagagaggcgggaaagaagagauuacgccucacugugcucugauggacugcaucauguuugaugccgcugugagcggcggacuuaauacauccguccuccgcgccgugcugccccgggacauggucuucagaaccucuaccccucgcgugguucuguga

SEQ ID NO: 9209 - RNA, 1710 nt, Artificial Sequence
  derived and/or modified CDS sequence (opt5) from LASV(G1200-LIB-2010;Clade IV)__AIT17177__NP
augagcgccuccaaggagaucaaaucuuuccuguggacccagagccucagacgggaacuguccggcuacugcucuaacauuaagcugcaaguggucaaagacgcucaggcccugcuccacgggcuggauuuuagcgagguuuccaaugugcagcgccuuaugagaaagcagcggcgcgacgauaacgaccugaaaagacuccgggaucugaaucaagcggugaacaaucuggucgaacucaagucuacacagcaaaagagcgugcugcgcguuggaacgcuuaccuccgacgaucugcucgugcuggcugccgaccuugagaaacuuaagagcaaagucaucagaacagaacggccccucucugccggcauuuauauggggaaccuguccagccagcagcuggaucagcgcagagcucuccugaauaugaucggaaugucuggcgggaaccagggagcccgggcuggccgcgacggcgugguuagagugugggaugucaagaaugccgaccuucugaacaaucaguucgggaccaugccuucccucacacuggcgugucuuaccaaacaaggacagguggaucugaacgacgugguccaggcccucacagaccugggccugauuuacaccgcuaaguauccgaauacgagcgaucucgaccggcugacccaaucucaucccauccuuaagaugaucgaugccaacaaauccagccugaauauuuccggguacaacuuuucucucggagcugccguuaaggcgggcgccugcaugcuggacgggggaaacaugcuugagacaaucaaagugagcccucagaccauggauggcauucugaaguccauccucaaagugaagaaaagccugggcauguucauuucugacacacccggggagcgcaauccuuaugaaaacauccuguacaagauuugucucuccggagauggcuggcccuauaucgcuagcagaaccucuaucauugggcgggccugggagaauacggucguggaccuggaaagcgauggaaagccucagaaaacaggcuccaacaauucuagcaagucccuucagagcgcuggguuugccgccggacugaccuacucucaacucaugacacugaaagacgcuaugcugcagcuugauccgaacgcgaagaccuggauggacaucgagggcagacccgaggacccuguugaaauugcccucuaccagcccuccagcggcugcuauauccacuucuuucgcgagccuaccgaucugaaacaguucaagcaagacgcuaaguacucucaugggauugaugugacagaccuguuugccgcccagcccggacucacguccgcugucaucgaagcccugccgcggaauauggugaucaccugucagggcagcgaugacauuagaaaacuucuggagucccaggggcgcaaggauaucaaacucauugacaucgcgcugucuaagacagauagccggaaauaugaaaacgcuguuugggaccaauacaaggaucugugccacaugcauaccggaauuguggucgagaagaaaaagagaggcgggaaagaggaaaucacaccucacugugcccuuauggacugcaucauguucgaugccgcuguguccggcggacucaauacccugguccugcgcgccgugcucccccgggacaugguuuuuagaacgucuacaccuaaggugguccuguga

SEQ ID NO: 9210 - RNA, 1710 nt, Artificial Sequence
  derived and/or modified CDS sequence (opt5) from LASV(G1442-SLE-2011;Clade IV)__AIT17181__NP
augagcgccuccaaggaggugaaaucuuuccuguggacccagagccucagacgggaacuguccggcuacugcucuaacaucaaacuucaagucguuaaggacgcucaggcccugcuccacgggcuggauuuuagcgagguguccaaugugcagcgccuuaugagaaagcagcggcgcgacgauaacgaccugaaaagacuccgggaucugaaucaagcggucaacaaucugguggaacucaagucuacacagcaaaagagcguucugcgcgugggaacgcuuaccuccgacgaucugcucguccuggcugccgaccuugagaaacuuaagagcaaagugauuagaacagaacggccccucucugccggcguuuauauggggaaccuguccagccagcagcuggaucagcgcagagcucuccugaauaugaucggaaugucuggcgggauucagggaacccggacaggccgcgacggcguggucagagugugggaugugaagaacgccgaccuucugaauaaccaguucgggaccaugccuucccucacacuggcuugucuuaccaaacaaggacaggucgaucugaaugacguugugcaggcccucacggaccugggccugaucuacaccgcgaaguauccgaacgccagcgaucucgaccggcugacacaaucucaucccauucuuaauaugaucgauaccaagaaauccagccugaacaucuccggguacaauuuuucucucggagcugccgugaaggcuggcgccugcaugcuggacgggggaaacaugcuugagacaauuaaagucagcccucagaccauggauggcauccugaaguccauucucaaagugaagaaaacgcugggcauguucaucagcgacacacccggggagcgcaacccuuaugaaaauauucuguacaagaucugucucucuggagauggcuggcccuauauugcguccagaaccagcaucacagggcgggccugggagaacaccguuguggaccuggaaucugauggaaagccucagaaagcuggcagcaauaacuccaauaagucucuucagagcgccggguuugcugccggacugaccuacucccaacucaugacacugaaagacgccaugcugcagcuugauccgaacgcuaagacguggauggacaucgagggcagacccgaggacccugucgaaauugcgcucuaccagcccagcucuggcugcuauauccacuucuuucgcgagccuaccgaucugaaacaguucaagcaagacgccaaguacucccaugggauugaugugacagaccuguuugcugcccagcccggacucaccagcgccguuaucgaagcucugccgcggaauauggugauuacaugucagggcucugaugacaucaaaaagcugcuggagucccaggggagaaaagauaucaagcucauugacaucgcccugagcaaaaccgauucccgcaaguaugaaaacgcggucugggaccaauacaaggaucugugccacaugcauacgggaguggucguggagaaaaagaaacggggcgggaaggaggaaauuacaccucacugugcucuuauggacugcaucauguucgaugccgccguuucuggcggacucaauacccuggugcugagagcuguccucccccgcgacaugguguuucggaccagcacaccuagaguugugcuguga

SEQ ID NO: 9211 - RNA, 1710 nt, Artificial Sequence
  derived and/or modified CDS sequence (opt5) from LASV(G1529-SLE-2011;Clade IV)__AIT17185__NP
augagcgccuccaaggagaucaaaucuuuccuguggacccagagccucagacgggaacuguccggcuacugcucuaacauuaagcugcaaguggucaaagacgcucaggcccugcuccacgggcuggauuuuagcgagguuuccaaugugcagcgccuuaugagaaagcagcggcgcgacgauggagaccugaaaagacuccgggaucugaaccaagcggugaauaaccuggucgaacucaagucuacacagcaaaagagcgugcugcgcguuggcacgcuuaccuccgacgaucugcucauccuggcugccgaccuugagaaacuuaagagcaaagugacaagaaccgaacggccccucucugccggggucuauaugggaaaucuguccagccagcagcuggaucagcgcagagcucuccugaacaugauuggcaugucugggggaaaucggggcgcccgcacaggcaaggacggggugguuagaaucugggaugugaaaaacgcugaccuucugaauaaccaguucggaaccaugccuucccucacacuggccugucuuaccaagcagggccaagucgaucugaaugacguggugcaggcgcucacggaccuggggcugauuuacaccgccaaguauccgaacacaagcgaucucgaccggcugacccagucucaucccauccuuaauaugaucgauacaaacaaauccagccugaauauuuccggauacaacuuuucucucggcgcugccgucaaggcuggggccugcaugcuggacggaggcaacaugcuugagaccaucaaaguuagcccucaaacgauggauggcauucugaaguccauccucaaagugaagaaaagccuggggauguucauuucugacacacccggagagcgcaauccuuaugaaaacauccuguacaagauuugucucuccggcgauggguggcccuauaucgcgagcagaaccucuaucacaggacgggccugggagaauaccguggucgaccuggaaagcgaugagaagccucagaaagcuggcuccaacaauucuaacaagagccuucaguccaccggguuuacagccggacugacguacagccagcucaugacccugaaagacgcuaugcugcaacuugauccgaaugccaagacauggauggacauugagggcagacccgaagacccuguggagaucgcccucuaccagcccucuuccggcugcuauauucacuucuuucgcgaaccuaccgaucugaaacaguucaagcaggacgcuaaguacagccaugggaucgauguuacagaccuguuugcggcccaacccggacucaccucugcugugauugauacgcugccgcggaacauggucaucacaugucagggcuccgacgauaucagaaaacuucuggagagccaggggcgcaaggacauuaaacucaucgauauugcccuguccaagaccgacucucggaaauaugaaaaugccgugugggaucaguacaaggaccugugccacaugcauaccggaguuguggucgagaagaaaaagagaggcgggaaagaggaaaucacaccucacugugcucuuauggauugcauuauguucgacgccgcggugagcggcggacucaacgcuuccguccugcgcgccgugcugccccgggacaugguuuuuagaaccucuacaccucgcgugguccucuga

SEQ ID NO: 9212 - RNA, 1710 nt, Artificial Sequence
  derived and/or modified CDS sequence (opt5) from LASV(G1618-SLE-2011;Clade IV)__AIT17189__NP
augagcgccuccaaggagaucaaaucuuuccuguggacccagagccucagacgggaacuguccggcuacugcucuaacauuaagcugcaaguggucaaagacgcucaggcccugcuccacgggcuggauuuuagcgagguuuccaaugugcagcgccuuaugagaaaggaacggcgcgacgauaacgaccugaaaagacuccgggaucugaaucaggcggugaacaaucuggucgagcucaagucuacacaacaaaagagcgugcugcgcguuggaacgcuuaccuccgacgaucugcucauccuggcugccgaccuugaaaaacuuaagagcaaagugacaagaaccgagcggccccucucugccggcgucuauauggggaaccuguccagccagcagcuggaucagcgcagagcucuccugucuaugauuggaauguccggcgggaaucagggagcccggacaggccgcgacggcgugguuagagugugggaugucaagaacgcugagcuucugaauaaccaguucgggaccaugccuagccucacacuggccugucuuaccaaacagggacaaguggaccugaaugaugugguccaggcgcucacggaccugggccugaucuacaccgccaaguauccgaacacaucugaccucgaucggcugacccagucccaucccauucuuaauaugaucgacacaaagaaaagcucccugaacaucucuggguacaauuuuagccucggagcugccguuaaggcuggcgccugcaugcuggaugggggaaacaugcuugaaaccauuaaaguguccccucaaacgaucgacggcauucucaagagcauccugaaagugaagaaagcgcugggcauguucauuucugauacacccggggagcgcaacccuuaugaaaauauccuguacaagauuugucucuccggagacggcuggcccuauaucgccagcagaaccucuaucacagggcgggcuugggagaacaccgucguggaucuggagagcgacggaaagccucagaaagccggcuccaauaacucuaauaagagccuucaguccgcuggguuuaccgccggacugacauacagccagcucaugacgcugaaagaugccaugcugcaacuugacccgaacgcuaagaccuggauggauauugaaggcagacccgaggacccuguugaaaucgcgcucuaccagcccucuuccggcugcuauauucacuucuuucgcgagccuacagaccugaaacaguucaagcaggaugccaaguacagccaugggaucgacgugaccgaucuguuugcugcccaacccggacucacaucugccgucauugacgcucugccgcggaauauggugaucaccugucagggcuccgaugacaucagaaaacuucuggaaagccaggggcgcaaggauauuaaacucaucgacauugcccuguccaagacggauucucggaaauaugagaacgcgguuugggaccaguacaaggaucugugccacaugcauacaggaguggucguggagaagaaaaagagaggcgggaaagaagagaucaccccucacugugcucuuauggacugcauuauguucgaugccgccgucagcggcggacucaauucccuggugcugcgcgcuguucucccccgggacaugguguuuagaaccucuacaccucgcgucgugcuguga

SEQ ID NO: 9213 - RNA, 1710 nt, Artificial Sequence
  derived and/or modified CDS sequence (opt5) from LASV(G1646-SLE-2011;Clade IV)__AIT17193__NP
augagcgccuccaaggagaucaaaucuuuccuguggacccagagccucagacgggaacuguccggcuacugcucuaacauuaagcugcaaguggucaaagacgcucaggcccugcuccacgggcuggauuuuagcgagguuuccaaugugcagcgccuuaugagaaaggaacggcgcgacgauaacgaccugaaaagacuccgggaucugaaucaggcggugaacaaucuggucgagcucaagucuacacaacaaaagagcgugcugcgcguuggaacgcuuaccuccgacgaucugcucauccuggcugccgaccuugaaaaacuuaagagcaaagugacaagaaccgagcggccccucucugccggcgucuauauggggaaccuguccagccagcagcuggaucagcgcagagcucuccugucuaugauuggaauguccggcgggaaucagggagcccggacaggccgcgacggcgugguuagagugugggaugucaagaacgcugagcuucugaauaaccaguucgggaccaugccuagccucacacuggccugucuuaccaaacagggacaaguggaccugaaugaugcggugcaggcccucacggaccugggccugaucuacaccgcuaaguauccgaacacaucugaccucgaucggcugacccagucccaucccauucuuaauaugaucgacacaaagaaaagcucccugaacaucucuggguacaauuuuagccucggagccgcugucaaggccggcgcgugcaugcuggaugggggaaacaugcuugaaaccauuaaaguuuccccucaaacgauggacggcauccucaagagcauucugaaagugaagaaagcccugggcauguucaucucugauacacccggggagcgcaacccuuaugaaaauauucuguacaagaucugucucuccggagacggcuggcccuauauugcuagcagaaccucuaucacagggcgggccugggagaacaccguggucgaucuggagagcgacggaaagccucagaaagcuggcaauaacaauuccaacaagucucuucagagcgccggguuuaccgccggacugacauacucccagcucaugacgcugaaagaugcuaugcugcaacuugacccgaaugcgaagaccuggauggauaucgaaggcagacccgaggacccuguggaaauugcccucuaccagcccagcucuggcugcuauauccacuucuuucgcgagccuacagaccugaaacaguucaagcaggaugcuaaguacucccaugggauugacguuaccgaucuguuugccgcccaacccggacucacaagcgcugugaucgacgcccugccgcggaacauggucauuaccugucagggcucugaugacaucagaaaacuucuggaaucccaggggcgcaaggauaucaaacucauugacaucgcgcugagcaagacggauucccggaaauaugagaaugcugugugggaccaguacaaggaucugugccacaugcauacaggaguuguggucgagaagaaaaagagaggcgggaaagaagagauuaccccucacugugcccuuauggacugcaucauguucgaugccgcugugucuggcggacucaacagccugguccugcgcgccgugcucccccgggacaugguuuuuagaaccuccacaccucgcgugguccuguga

SEQ ID NO: 9214 - RNA, 1710 nt, Artificial Sequence
  derived and/or modified CDS sequence (opt5) from LASV(G1647-SLE-2011;Clade IV)__AIT17197__NP
augagcgccuccaaggagaucaaaucuuuccuguggacccagagccucagacgggaacuguccggcuacugcucuaacauuaagcugcaaguggucaaagacgcucaggcccugcuccacgggcuggauuuuagcgagguuuccaaugugcagcgccuuaugagaaaggaacggcgcgacgauaacgaccugaaaagacuccgggaucugaaucaggcggugaacaaucuggucgagcucaagucuacacaacaaaagagcauccugcgcgugggaacgcuuaccuccgacgaucugcucauucuggcugccgaccuugaaaaacuuaagagcaaaguuaucagaacagagcggccccucucugccggcguguauauggggaaccugucccugcagcagcucgaucagcgcagagcucugcuuaauaugauuggaaugagcggcucuaaccaggggguccgggccggacgcgacggcgugguuagagugugggaugucaagaaugcugagcugcucaacaaucaguucggcaccaugccuucccugacacuugccugucugaccaaacaggggcaaguggaccucaacgaugcggugcaggcccugacagaccugggacucaucuacaccgcuaaguauccgaauacgagcgaccuggaucggcuuacccagucucaucccauccugaacaugauugacacaaagaaauccagccucaauaucuccggcuacaacuuuucucugggggccgcugucaaggccggagcgugcaugcuugauggcgggaacaugcuggaaaccauuaaaguuagcccucaaacaauggacggaauccucaaguccauucugaaagugaagaaagcccugggcauguucaucagcgauacccccggcgagcgcaauccuuaugaaaacauucucuacaagaucugucugucuggggacggauggcccuauaucgcuuccagaacgagcauuacaggccgggccugggagaauaccguggucgaucuugagucugacgggaagccucagaaagcuggaagcaacggcuccaauaagucucugcagagcgccggguuuacagccggacucaccuacucccagcugaugacccugaaagaugcuaugcuucaacucgacccgaacgcgaagacauggauggauaucgaaggcagacccgaggacccuguggaaauugcccuguaccagcccagcucuggcugcuauauccacuucuuucgcgagccuacggaccugaaacaguucaagcaggaugcuaaguacucccaugggauugacguuaccgaucucuuugccgcccaacccggacugacaagcgcugugaucgacgcccuuccgcggaauauggucaucaccugucagggcucugaugacauuagaaaacugcucgaaucccaggggcgcaaggauaucaaacugauugacaucgcgcugagcaagacagauucccggaaauaugagaacgcugugugggaccaguacaaggaucuuugccacaugcauaccggaauuguuguggagaagaaaaagagaggcgggaaagaagagaucacgccucacugugcccucauggacugcaucauguucgaugccgcugucucuggcggacugaauacaagcgugcugcgcgccguccucccccgggacaugguguuuagaaccuccaccccucgcguugugcuguga

SEQ ID NO: 9215 - RNA, 1710 nt, Artificial Sequence
  derived and/or modified CDS sequence (opt5) from LASV(G1727-SLE-2011;Clade IV)__AIT17201__NP
augagcgccuccaaggagaucaaaucuuuccuguggacccagagccucagacgggaacuguccggcuacugcucuaacauuaagcugcaaguggucaaagacgcucaggcccugcuccacgggcuggauuuuagcgagguuuccaaugugcagcgccuuaugagaaaggaacggcgcgacgauaacgaccugaaaagacuccgggaucugaaucaggcggugaacaaucuggucgagcucaagucuacacaacaaaagagcauccugcgcgugggaacgcuuaccuccgacgaucugcucauucuggcugccgaccuugaaaaacuuaagagcaaaguuacaagaaccgagcggccccucucugccggcguguauauggggaaccuguccagccagcagcuggaucagcgcagagcucuccugaauaugaucggaaugucuggcuccaaccagggggcccgggcuggacgcgacggcgucgugagaguuugggaugugaagaaugccgagcuucugaacaaucaguucggcacaaugccuagccucacccuggcgugucuuacaaaacaggggcaagucgaccugaacgaugccgugcaggcucucaccgaccugggacugauuuacacggccaaguauccgaauaccucugaccucgaucggcugacacagucccaucccauccuuaacaugaucgacaccaagaaaagcucccugaauauuucuggcuacaacuuuagccucggggcugccgugaaggcgggagccugcaugcuggauggcgggaacaugcuugaaacaaucaaagucuccccucaaaccauggacggcauucuuaagagcauccucaaaguuaagaaagcucugggaauguucauuucugaugcccccggcgagcgcaauccuuaugaaaacauccuguacaagauuugucucuccggggacggauggcccuauaucgcuagcagaacgucuaucacaggccgggccugggagaauaccgugguggaucuggagagcgacgggaagccucagaaagccggauccaacggcucuaauaagagccuucaguccgcuggguuuacagcgggacugaccuacagccagcucaugacccugaaagaugccaugcugcaacuugacccgaacgcuaagacauggauggauauugaaggcagacccgaggacccugucgaaaucgcccucuaccagcccucuuccggcugcuauauucacuucuuucgcgagccuacggaccugaaacaguucaagcaggaugccaaguacagccaugggaucgacgugaccgaucuguuugcugcccaacccggacucacaucugcgguuauugacgcucugccgcggaauauggugaucaccugucagggcuccgaugacaucaaaaagcuguucgaaagccaggggagaaaagauauuaagcugaucgacauugcccucuccaaaacagauucucgcaaguaugagaacgccgucugggaccaguacaaggaucugugccacaugcauaccggaaucgugguugagaaaaagaaacggggcgggaaggaagagauuacgccucacugugcucugauggacugcaucauguuugaugccgcugugagcggcggacuuaauacauccguccucagagccgugcugccccgcgacauggucuuccggaccucuaccccuagagugguucuguga

SEQ ID NO: 9216 - RNA, 1710 nt, Artificial Sequence
  derived and/or modified CDS sequence (opt5) from LASV(G1774-SLE-2011;Clade IV)__AIT17205__NP
augagcgccuccaaggagaucaaaucuuuccuguggacccagagccucagacgggaacuguccggcuacugcucuaacauuaagcugcaaguggucaaagacgcucaggcccugcuccacgggcuggauuuuagcgagguuuccaaugugcagcgccuuaugagaaaggaacggcgcgacgauaacgaccugaaaagacuccgggaucugaaucaggcggugaacaaucuggucgagcucaagucuacacaacaaaagagcauccugcgcgugggaacgcuuaccuccgacgaucugcucauucuggcugccgaccuugaaaaacuuaagagcaaaguuacaagaaccgagcggccccucucugccggcguguauauggggaaccuguccagccagcagcuggaucagcgcaaggcucuccugaauaugaucggaaugucuggcuccaaccagggggccagaauuggacgggacggcgucgugcgcguuugggaugugaaaaaugcugagcuucugaacaaucaguucggcacaaugccuagccucacccuggccugucuuacaaagcaggggcaagucgaccugaacgaugcggugcaggcccucaccgaccugggacugaucuacacggcuaaguauccgaauaccucugaccucgauagacugacacagucccaucccauccuuaacaugauugacaccaaaaagagcucccugaauaucucuggcuacaacuuuagccucggggccgcugugaaagccggagcgugcaugcuggauggcgggaacaugcuugaaacaauuaaggucuccccucaaaccauggacggaauccugaaaagcauucucaagguuaaaaaggcccugggcauguucaucucugauacgcccggcgagcggaauccuuaugaaaacauucuguacaagaucugucucuccggggacggauggcccuauaucgcuagccgcacaucuauuaccggcagagccugggagaauacagugguggaucuggagagcgacgggaaaccucagaaggcuggauccaacucuagcaauaaaucccuucagagcgccggccugaccgccgggcucaccuacucucagcugaugacacugaaggaugcuaugcuucaacucgacccgaacgcgaaaacguggauggauaucgaaggacggcccgaggacccugucgaaauugcccuguaccagcccuccagcggcugcuauauccacuuuuucagagagccuaccgaccugaagcaguuuaagcaggaugcuaaauacucucauggcauugacgugacagaucucuucgccgcccaacccgggcugaccuccgcuguuaucgacgcccuuccgcgcaaucuggugaucacaugucagggaagcgaugacauucggaagcuccuggaaucccagggcagaaaagauaucaagcugauugacaucgcgcuuucuaaaaccgauagccgcaaguaugagaacgcugucugggaccaguacaaggaucucugccacaugcauacggggauugugguugagaaaaagaaacggggaggcaaggaagagaucacaccucacugugcccugauggacugcaucauguuugaugccgcuguguccgggggccugaaugccucuguccucagagcugugcugccccgcgacauggucuuccggaccagcaccccuagagugguucuuuga

SEQ ID NO: 9217 - RNA, 1710 nt, Artificial Sequence
  derived and/or modified CDS sequence (opt5) from LASV(G1792-SLE-2011;Clade IV)__AIT17209__NP
augagcgccuccaaggagaucaaaucuuuccuguggacccagagccucagacgggaacuguccggcuacugcucuaacauuaagcugcaaguggucaaagacgcucaggcccugcuccacgggcuggauuuuagcgagguuuccaaugugcagcgccuuaugagaaaggaacggcgcgacgauaacgaccugaaaagacuccgggaucugaaucaggcggugaacaaucuggucgagcucaagucuacacaacaaaagagcauccugcgcgugggaacgcuuaccuccgacgaucugcucauucuggcugccgaccuugaaaaacuuaagagcaaaguuacaagaaccgagcggccccucucugccggcguguauauggggaaccuguccagccagcagcuggaucagcgcagagcucuccugucuaugaucggaauguccggcgggaaucagggagcccgggcuggccgcgacggcgucgugagaguuugggaugugaagaacgccgagcuucugaauaaccaguucgggacaaugccuagccucacccuggcgugucuuacaaaacagggacaagucgaccugaaugauguggugcaggcccucaccgaccugggccugauuuacacggcuaaguauccgaacaccucugaccucgaucggcugacacagucccaucccauccuuaauaugaucgacaccaagaaaagcucccugaacauuucuggguacaauuuuagccucggagccgcugucaaggccggcgcgugcaugcuggaugggggaaacaugcuugaaacaaucaaaguuuccccucaaaccauggacggcauucuuaagagcauccucaaagugaagaaagcccugggcauguucauuucugauacgcccggggagcgcaacccuuaugaaaauauccuguacaagauuugucucuccggagacggcuggcccuauaucgcuagcagaacaucuaucaccgggcgggccugggagaacacaguggucgaucuggagagcgacggaaagcugcagaaaaccggcuccaauaacucuaauaagagccugcaguccgcuggguuuaccgccggacucacauacagccagcugaugacgcugaaagaugccaugcuucaacucgacccuaacgcuaagauuuggauggauaucgaaggcagaccggaggaccccguggaaauugcgcuguaccagccuucuuccggcugcuauauccacuucuuucgcgagcccaccgaccugaaacaguucaagcaggaugccaaguacagccaugggauugacguuacagaucucuuugcugcccaaccuggacugaccucugccgugaucgacgcccuuccccggaauauggucaucacaugucagggcuccgaugacauuagaaaacugcucgaaagccaggggcgcaaggauaucaaacugauugacaucgcucugaacaagaccgauucccggaaauaugagaaugcggugugggaccaguacaaggaucuuugccacaugcauacgggaguuguggucgagaagaaaaagaaaggcgggaaggaagagauuacaccgcacugugcucucauggacugcaucauguucgaugccgccgugucuggcggacugaacaccagcguccugagagcugugcucccucgcgacaugguuuuucggaccuccacacccagagugguccuguga

SEQ ID NO: 9218 - RNA, 1710 nt, Artificial Sequence
  derived and/or modified CDS sequence (opt5) from LASV(G1897-SLE-2011;Clade IV)__AIT17211__NP
augagcgccuccaaggagaucaaaucuuuccuguggacccagagccucagacgggaacuguccggcuacugcucuaacauuaagcugcaaguggucaaagacgcucaggcccugcuccacgggcuggauuuuagcgagguuuccaaugugcagcgccuuaugagaaaggaacggcgcgacgauaacgaccugaaaagacuccgggaucugaaucaggcggugaacaaucuggucgagcucaagucuacacaacaaaagagcauccugcgcgugggaacgcuuaccuccgacgaucugcucauucuggcugccgaccuugaaaaacuuaagagcaaaguuacaagaaccgagcggccccucucugccggcguguauauggggaaccuguccagccagcagcuggaucagcgcagagcucuccugaauaugaucggaaugucuggcgggaaccagggagcccaggcuggccgggacggcgucgugcgcguuugggaugugaagaaugccgagcuucugaacaaucaguucgggacaaugccuucccucacccuggcgugucuuacaaaacaaggacaggucgaccugaacgaugccgugcaggcucucaccgaccugggccugauuuacacggccaaguauccgaauaccagcgaccucgauagacugacacaaucucaucccauccuuaacaugaucgacaccaagaaauccagccugaauauuuccggguacaacuuuucucucggagcugccgugaaggcgggcgccugcaugcuggaugggggaaacaugcuugaaacaaucaaagucagcccucagaccauggacggcauucugaaguccauccucaaaguuaagaaagcucugggcauguucauuagcgauacgcccggggagcggaauccuuaugaaaacauccuguacaagauuugucucucuggagacggcuggcccuauaucgccucccgcacaagcaucaccgggagagcuugggagaauacagugguggaucuggagucugacggaaagccucagaaagccaacagcaauuccucuaacaagagccuucaguccgccggcuuuaccgcugggcugaccuacagccaacucaugacacugaaagaugcgaugcugcagcuugacccgaaugccaagacguggauggauauugaaggacggcccgaggacccugucgaaaucgcucucuaccagcccucuuccggcugcuauauucacuucuuuagagagccuaccgaccugaaacaguucaagcaagaugccaaguacagccauggcaucgacgugacagaucuguuugccgcucagcccgggcucaccucugccguuauugacgcgcugccgcgcaacauggugaucacaugucagggauccgaugacauccggaaacuucuggaaagccagggcagaaaggauauuaaacucaucgacauugcucuguccaagaccgauucucgcaaauaugagaaugccgucugggaccaauacaaggaucugugccacaugcauacggggaucgugguugagaagaaaaagcggggaggcaaagaagagauuacaccucacugugcccuuauggacugcaucauguucgaugcugccgugagcgggggccucaacaccuccguccugagagcugugcugccccgcgacauggucuuucggaccucuacaccuagagugguucucuga

SEQ ID NO: 9219 - RNA, 1710 nt, Artificial Sequence
  derived and/or modified CDS sequence (opt5) from LASV(G1932-SLE-2011;Clade IV)__AIT17213__NP
augagcgccuccaaggagaucaaaucuuuccuguggacccagagccucagacgggaacuggcuggcuacugcuccaacauuaaacuucaaguggucaaggacgcccaggcgcugcuccacgggcuggauuuuucugagguuagcaaugugcagcgccuuaugagaaaggaacggcgcgacgauaacgaccugaaaagacuccgggaucugaaucaggcugugaacaaucuggucgagcucaaguccacacaacagaagucugugcugcgcguuggaacgcuuaccagcgacgaucugcucauccuggccgccgaccuugaaaaacugaaguccaaagugauuagaacagagcggccccucagcgcuggcgucuauauggggaaccugucuucccagcagcuggaucaacgcagagcccuccugaauaugaucggaaugagcggcucuaaccagggggugcgggcuggacgcgacggcguugugagagucugggaugugaagaaugccgagcuucugaacaaucaguucggcaccaugccuucccucacacuggcgugucuuaccaaacaggggcaaguggaccugaacgaugccguccaggcucucacagaccugggacugauuuacaccgccaaguauccgaauacgagcgaccucgaucggcugacccagucucaucccauccuuaacaugaucgacacaaagaaauccagccugaauauuuccggcuacaacuuuucucucggggcugccguuaaggcgggagccugcaugcuggauggcgggaacaugcuugaaaccaucaaagugagcccucaaacaauggacggcauucugaaguccauccucaaagugaagaaagcucugggaauguucauuagcgauacccccggcgagcgcaauccuuaugaaaacauccuguacaagauuugucucucuggggacggauggcccuauaucgccuccagaacgagcaucacaggccgggcuugggagaauaccgucguggaucuggagucugacgggaagccucagaaagccggaagcaacggcuccaauaagucucuucagagcgccggguuuacagcuggacugaccuacucccagcucaugacccugaaagaugcgaugcugcaacuugacccgaacgccaagacauggauggauauugaaggcagacccgaggacccuguugaaaucgcucucuaccagcccagcucuggcugcuauauucacuucuuucgcgagccuacggaccugaaacaguucaagcaggaugccaaguacucccaugggaucgacgugaccgaucuguuugccgcucaacccggacucacaagcgccgucauugacgcgcugccgcggaauauggugaucaccugucagggcucugaugacaucagaaaacuucuggaaucccaggggcgcaaggauauuaaacucaucgacauugcucugagcaagacagauucccggaaauaugagaacgccguuugggaccaguacaaggaucugugccacaugcauaccggaaucguggucgagaagaaaaagagaggcgggaaagaagagauuacgccucacugugcccuuauggacugcaucauguucgaugcugccgugucuggcggacucaauacaagcguccugcgcgcugugcugccccgggacaugguuuuuagaaccuccaccccucgcgugguccucuga

SEQ ID NO: 9220 - RNA, 1710 nt, Artificial Sequence
  derived and/or modified CDS sequence (opt5) from LASV(G1959-SLE-2011;Clade IV)__AIT17217__NP
augagcgccuccaaggagaucaaaucuuuccuguggacccagagccucagacgggaacuguccggcuacugcucuaacauuaaacuucaaguggucaaagacgcucaggcccugcuccacgggcuggauuuuagcgagguuuccaaugugcagcgccuuaugagaaaggaacggcgcgacgauaacgaccugaaaagacuccgggaucugaaucaggcggugaacaaucuggucgagcucaagucuacacaacaaaagagcauccugcgcgugggaacgcuuaccuccgacgaucugcucauucuggcugccgaccuugaaaaacuuaagagcaaaguuacaagaaccgagcggccccucucugccggcguguauauggggaaccuguccagccagcagcuggaucagcgcagagcucuccugucuaugaucggaauguccagcggcguccagggggcccgggcuggacgcgacggcgugguuagagugugggaugucaagaaugccgagcuucugaacaaucaguucggcacaaugccuucucucacccuggcgugucuuacaaaacaggggcaaguggaccugaacgaugugguccaggcccucaccgaccugggacugauuuacacggcuaaguauccgaauaccuccgaccucgaucggcugacacagagccaucccauccuuaacaugaucgacaccaagaaauccucucugaauauuagcggcuacaacuuuucccucggggccgcuguuaaggccggagcgugcaugcuggauggcgggaauaugcuugaaacaaucaaagugagcccucaaaccauggacggcauucugaagucuauccucaaagugaagaaagcccugggaauguucauuuccgagacgcccggcgaacgcaacccuuaugagaacauccuguacaagauuugucucagcggggauggauggcccuauaucgcuucuagaacaagcaucaccggccgggccugggagaauacagucguggaccuggaauccgaugggaagccucagaaagcuggaucuaacaauagcaacaagucccuucagagcaccggcuuugccgccgggcugaccuacucucagcucaugacacugaaagacgcuaugcugcaacuugauccgaaugcgaagacguggauggacauugagggaagacccgaagauccuguugagguggcccucuaccagcccuccagcggcugcuauauccacuucuuucgcgaaccuaccgaccugaaacaguucaagcaggacgcuaaguacucucauggcauugaugucacagaccuguuugccgcccaacccgggcucaccuccgcugugaucgaugcccugccgcggaacaugguuauuacaugucagggaagcgacgauaucaaaaagcugcuggagucccagggcagaaaagacaucaagcucauugauaucgcgcugucuaaaaccgacagccgcaaguaugagaaugcugugugggaucaguacaaggaccugugccacaugcauacgggggucguggucgaaaagaagaaacggggaggcaaggaggaaauuacaccucacugugcccuuauggauugcaucauguucgacgccgcuguguccgggggccucaacaccucuguucugagagccgugcugccccgcgauauggucuuucggaccagcacaccuagagugguucucuga

SEQ ID NO: 9221 - RNA, 1710 nt, Artificial Sequence
  derived and/or modified CDS sequence (opt5) from LASV(G2141-SLE-2011;Clade IV)__AIT17225__NP
augagcgccuccaaggagaucaaaucuuuccuguggacccagagccucagacgggaacuguccggcuacugcucuaacauuaagcugcaaguggucaaagacgcucaggcccugcuccacgggcuggauuuuagcgagguuuccaaugugcagcgccuuaugagaaagcagcggcgcgacgauaacgaccugaaaagacuccgggaucugaaucaagcggugaacaaucuggucgaacucaagucuacacagcaaaagagcgugcugcgcguuggaacgcuuaccuccgacgaucugcucgugcuggcugccgaccuugagaaacuuaagagcaaagucacaagaaccgaacggccccucucugccggcguguauauggggaaccuguccagccagcagcuggaucagcgcagagcucuccugaauaugaucggaaugucuggcgggaaccagggagcccgggcuggcaaugacggcguugugcgcgucugggaugugaagaacgccgaccuucugaauaaccaguucgggacaaugccuucccucacccuggcgugucuuacaaaacaaggacagguggaucugaaugacgucguucaggcccucaccgaccugggccugauuuacacggcuaaguauccgaacaccagcgaucucgacagacugacacaaucucaucccauccuuaauaugauugauaccaagaaauccagccugaacaucuccggguacaacuuuucucucggagccgcugugaaggccggcgcgugcaugcuggacgggggaaauaugcuugagacaaucaaagugagcccucagaccauggauggcauucugaaguccauccucaaagucaagaaagcccugggcauguucauuagcgacacgcccggggagcggaacccuuaugaaaauauccuguacaagauuugucucucuggagauggcuggcccuauaucgcuucccgcacaagcauuaccgggagagccugggagaacacagugguugaccuggaaucugauggaaagccucagaaaaccggcaauaacagcuccaauaagucucuucagagcgcuggguuuaccgccggacugacauacucccaacucaugacgcugaaagacgccaugcugcagcuugauccgaacgcuaagaccuggauggacaucgagggccggcccgaggacccuguggaagucgcgcucuaccagcccagcucuggcugcuauauccacuucuuuagagagccuacagaucugaaacaguucaagcaagacgccaaguacucccaugggauugaugugaccgaccuguuugcugcccagcccggacucacaagcgccguuaucgaagcucugccgcgcaauauggugauuaccugucagggcucugaugacauccggaaacuucuggagucccaggggagaaaggauauuaaacucaucgacaucgcccugagcaagauugauucccgcaaauaugaaaacgcggucugggaccaauacaaggaucugugccacaugcauacgggaguggucguggagaagaaaaagcggggcgggaaagaggaaaucacaccucacugugcucuuauggacugcauuauguucgaugccgccguuucuggcggacucaauacccuggugcugagagcuguccucccccgcgacaugguguuucggaccagcacaccuaagguugugcuguga

SEQ ID NO: 9222 - RNA, 1710 nt, Artificial Sequence
  derived and/or modified CDS sequence (opt5) from LASV(G2147-SLE-2011;Clade IV)__AIT17229__NP
augagcgccuccaaggagaucaaaucuuuccuguggacccagagccucagacgggaacuguccggcuacugcucuaacauuaagcugcaaguggucaaagacgcucaggcccugcuccacgggcuggauuuuagcgagguuuccaaugugcagcgccuuaugagaaaggaacggcgcgacgauaacgaccugaaaagacuccgggaucugaaucaggcggugaacaaucuggucgagcucaagucuacacaacaaaagagcgugcugcgcguuggaacgcuuaccuccgacgaucugcucauccuggcugccgaccuugaaaaacuuaagagcaaagugauuagaacagagcggccccucucugccggcgucuauauggggaaccuguccagccagcagcuggaucagcgcagagcucuccugucuaugaucggaauguccggcgggaaucagggaacccgggccggccgcgacggcgugguuagagugugggaugucaagaacgcugagcuucugaauaaccaguucgggacaaugccuagccucacccuggccugucuuacaaaacagggacaaguggaccugaaugaugcggugcaggcccucaccgaccugggccugauuuacacggcuaaguauccgaacaccucugaccucgaucggcugacacagucccaucccauccuuaauaugaucgacaccaagaaaagcucccugaacauuucuggguacaauuuuagccucggagccgcugucaaggccggcgcgugcaugcuggaugggggaaacaugcuugaaacaaucaaaguuuccccucaaaccauggacggcauucucaagagcauccugaaagugaagaaagcccugggcauguucauuucugauacgcccggggagcgcaacccuuaugaaaauauccuguacaagauuugucucuccggagacggcuggcccuauaucgcuagcagaacaucuaucaccgggcgggccugggagaacacaguggucgaucuggagagcgacggaaagccucagaaagcuggcuccaauaacucuaauaagagccuucaguccgccggguuuaccgccggacugaccuacagccagcucaugacacugaaagaugcuaugcugcaacuugacccgaacgcgaagacguggauggauauugaaggcagacccgaggacccuguggaaaucgcccucuaccagcccucuuccggcugcuauauucacuucuuucgcgagccuaccgaccugaaacaguucaagcaggaugcuaaguacagccaugggaucgacguuacagaucuguuugccgcccaacccggacucaccucugcugugauugacgcccugccgcggaauauggucaucacaugucagggcuccgaugacaucagaaaacuucuggaaagccaggggcgcaaggauauuaaacucaucgacauugcgcuguccaaggcugauucucggaaauaugagaacgccgugugggaccaguacaaggaucugugccacaugcauaccggaguuguggucgagaagaaaaagagaggcgggaaagaagagaucacgccucacugugcccuuauggacugcauuauguucgaugcugccgugagcggcggacucaauacauccguccugcgcgcugugcugccccgggacaugguuuuuagaaccucuaccccucgcgugguccucuga

SEQ ID NO: 9223 - RNA, 1710 nt, Artificial Sequence
  derived and/or modified CDS sequence (opt5) from LASV(G2165-SLE-2011;Clade IV)__AIT17233__NP
augagcgccuccaaggaggugaaaucuuuccuguggacccagagccucagacgggaacuguccggcuacugcucuaacaucaagcugcaagucguuaaagacgcucaggcccugcuccacgggcuggauuuuagcgagguguccaaugugcagcgccuuaugagaaaggaacggcgcgacgauaacgaccugaaaagacuccgggaucugaaucaggcggucaacaaucugguggagcucaagucuacacaacaaaagagcauucugcgcguuggaacgcuuaccuccgacgaucugcucgugcuggcugccgaccuugaaaaacuuaagagcaaagucacaagaaccgagcggccccucucugccggcguguauauggggaaccuguccagccagcagcuggaucagcgcagagcucuccugucuaugaucggaauguccggcgggaaucagggagcccaggcuggccgggacggcguugugcgcgucugggaugugaagaacgccgagcuucugaauaaccaguucgggacaaugccuagccucacccuggcgugucuuacaaaacaaggacagguggaccugaaugaugccguccaggcucucaccgaccugggccugauuuacacggccaaguauccgaacaccucugaccucgauagacugacacaaucccaucccauccuuaauaugauugacaccaagaaaagcucccugaacaucucuggguacaauuuuagccucggagcugccguuaaggcgggcgccugcaugcuggaugggggaaacaugcuugaaacaaucaaaguguccccucagaccauggacggcauucucaagagcauccugaaagugaagaaagcucugggcauguucauuucugauacgcccggggagcggaacccuuaugaaaauauccuguacaagauuugucucuccggagacggcuggcccuauaucgccagccgcacaucuauuaccgggagagcuugggagaacacagucguggaucuggagagcgacggaaagccucagaaagccggcuccaauaacucuaauaagagccuucaguccgccggguuuaccgcuggacugaccuacagccaacucaugacacugaaagaugcgaugcugcagcuugacccgaacgccaagacguggauggauaucgaaggccggcccgaggacccuguugaaguggcucucuaccagcccucuuccggcugcuauauccacuucuuuagagagccuaccgaccugaaacaguucaagcaagaugccaaguacagccaugggauugacgucacagaucuguuugccgcucagcccggacucaccucugccgugaucgacgcgcugccgcgcaauaugguuauuacaugucagggcuccgaugacauccggaaacuucuggaaagccaggggagaaaggauauuaaacucaucgacaucgcucuguccaagaccgauucucgcaaauaugagaacgccgugugggaccaauacaaggaucugugccacaugcauacgggagucguggucgagaagaaaaagcggggcgggaaagaagagauuacaccucacugugcccuuauggacugcaucauguucgaugcugccgugagcggcggacucaauaccuccguucugagagcugugcugccccgcgacauggucuuucggaccucuacaccuagagugguucucuga

SEQ ID NO: 9224 - RNA, 1710 nt, Artificial Sequence
  derived and/or modified CDS sequence (opt5) from LASV(G2184-SLE-2011;Clade IV)__AIT17237__NP
augagcgccuccaaggagaucaaaucuuuccuguggacccagagccucagacgggaacuguccggcuacugcucuaacauuaagcugcaaguggucaaagacgcucaggcccugcuccacgggcuggauuuuagcgagguuuccaaugugcagcgccuuaugagaaaggaacggcgcgacgauaacgaccugaaaagacuccgggaucugaaucaggcggugaacaaucuggucgagcucaagucuacacaacaaaagagcauccugcgcgugggaacgcuuaccuccgacgaucugcucauucuggcugccgaccuugaaaaacuuaagagcaaaguuacaagaaccgagcggccccucucugccggcguguauauggggaaccuguccagccagcagcuggaucagcgcagagcucuccugucuaugaucggaauguccggcgggaaucagggagcccgggcuggccgcgacggcgucgugagaguuugggaugugaagaacgccgagcuucugaauaaccaguucgggacaaugccuagccucacccuggcgugucuuacaaaacagggacaagucgaccugaaugaugccgugcaggcucucaccgaccugggccugauuuacacggccaaguauccgaacaccucugaccucgaucggcugacacagucccaucccauccuuaauaugaucgacaccaagaaaagcucccugaacauuucuggguacaauuuuagccucggagcugccgugaaggcgggcgccugcaugcuggaugggggaaacaugcuugaaacaaucaaagucuccccucaaaccauggacggcauucucaagagcauccugaaaguuaagaaagcucugggcauguucauuucugauacgcccggggagcgcaacccuuaugaaaauauccuguacaagauuugucucuccggagacggcuggcccuauaucgccagcagaacaucuaucaccgggcgggcuugggagaacacagugguggaucuggagagcgacggaaagccucagaaagccggcuccaauaacucuaauaagagccuucaguccgccggguuuaccgcuggacugaccuacagccagcucaugacacugaaagaugcgaugcugcaacuugacccgaacgccaagacguggauggauauugaaggcagacccgaggacccugucgaaguggcucucuaccagcccucuuccggcugcuauauccacuucuuucgcgagccuaccgaccugaaacaguucaagcaggaugccaaguacagccaugggauugacguuacagaucuguuugccgcucaacccggacucaccucugccgugaucgacgcgcugccgcggaauauggucauuacaugucagggcuccgaugacaucagaaaacuucuggaaagccaggggcgcaaggauaucaaacucauugacaucgcucuguccaagaccgauucucggaaauaugagaacgccgugugggaccaguacaaggaucugugccacaugcauacgggaguuguggucgagaagaaaaagagaggcgggaaagaagagauuacaccucacugugcccuuauggacugcaucauguucgaugcugccgugagcggcggacucaauaccuccguccugcgcgcugugcugccccgggacaugguuuuuagaaccucuacaccucgcgugguccucuga

SEQ ID NO: 9225 - RNA, 1710 nt, Artificial Sequence
  derived and/or modified CDS sequence (opt5) from LASV(G2197-SLE-2011;Clade IV)__AIT17241__NP
augagcgccuccaaggagaucaaaucuuuccuguggacccagagccucagacgggaacuguccggcuacugcucuaacauuaagcugcaaguggucaaagacgcucaggcccugcuccacgggcuggauuuuagcgagguuuccaaugugcagcgccuuaugagaaaggaacggcgcgacgauaacgaccugaaaagacuccgggaucugaaucaggcggugaacaaucuggucgagcucaagucuacacaacaaaagagcauccugcgcgugggaacgcuuaccuccgacgaucugcucauucuggcugccgaccuugaaaaacuuaagagcaaaguuacaagaaccgagcggccccucucugccggcguguauauggggaaccuguccagccagcagcuggaucagcgcagagcucuccugucuaugaucggaauguccggcgggaaucagggagcccgggcuggccgcgacggcgucgugagaguuugggaugugaagaacgccgagcuucugaauaaccaguucgggacaaugccuagccucacccuggcgugucuuacaaaacagggacaagucgaccugaaugaugccgugcaggcucucaccgaccugggccugauuuacacggccaaguauccgaacaccucugaccucgaucggcugacacagucccaucccauccuuaauaugaucgacaccaagaaaagcucccugaacauuucuggguacaauuuuagccucggagcugccgugaaggcgggcgccugcaugcuggaugggggaaacaugcuugaaacaaucaaagucuccccucaaaccauggacggcauucucaagagcauccugaaaguuaagaaagcucugggcauguucauuucugauacgcccggggagcgcaacccuuaugaaaauauccuguacaagauuugucucuccggagacggcuggcccuauaucgccagcagaacaucuaucaccgggcgggcuugggagaacacagugguggaucuggagagcgacggaaagccucagaaagccggcuccaauaacucuaauaagagccuucaguccgccggguuuaccgcuggacugaccuacagccagcucaugacacugaaagaugcgaugcugcaacuugacccgaacgccaagacguggauggauauugaaggcagacccgaggacccugucgaaaucgcucucuaccagcccucuuccggcugcuauauucacuucuuucgcgagccuaccgaccugaaacaguucaagcaggaugccaaguacagccaugggaucgacgugacagaucuguuugccgcucaacccggacucaccucugccguuauugacgcgcugccgcggaauauggugaucacaugucagggcuccgaugacaucagaaaacuuuucgaaagccaggggcgcaaggauauuaaacugaucgacauugcucucuccaagaccgauucucggaaauaugagaacgccgucugggaccaguacaaggaucugugccacaugcauacgggagugguuguggagaagaaaaagagaggcgggaaagaagagaucacaccucacugugcccugauggacugcauuauguuugaugcugccgucagcggcggacuuaauaccuccgugcuccgcgcuguccugccccgggacaugguguucagaaccucuacaccucgcguugugcuguga

SEQ ID NO: 9226 - RNA, 1710 nt, Artificial Sequence
  derived and/or modified CDS sequence (opt5) from LASV(G2222-SLE-2011;Clade IV)__AIT17245__NP
augagcgccuccaaggagaucaaaucuuuccuguggacccagagccucagacgggaacuguccggcuacugcucuaacauuaagcugcaaguggucaaagacgcucaggcccugcuccacgggcuggauuuuagcgagguuuccaaugugcagcgccuuaugagaaaggaacggcgcgacgauaacgaccugaaaagacuccgggaucugaaucaggcggugaacaaucuggucgagcucaagucuacacaacaaaagagcauccugcgcgugggaacgcuuaccuccgacgaucugcucauucuggcugccgaccuugaaaaacuuaagagcaaaguuacaagaaccgagcggccccucucugccggcguguauauggggaaccuguccagccagcagcuggaucagcgcagagcucuccugaauaugaucggaaugucuggcuccaaccagggggcccggacaggacgcgacggcgucgugagaguuugggaugugaagaaugcugagcuucugaacaaucaguucggcaccaugccuagccucacacuggccugucuuaccaaacaggggcaagucgaccugaacgaugcggugcaggcccucacggaccugggacugauuuacaccgcuaaguauccgaauacaucugaccucgaucggcugacccagucccaucccauccuuaacaugaucgacacaaagaaaagcucccugaauauuucuggcuacaacuuuagccucggggccgcugugaaggccggagcgugcaugcuggauggcgggaacaugcuugaaaccaucaaagucuccccucaaacgauggacggcauucucaagagcauccugaaaguuaagaaagcccugggaauguucauuucugauacacccggcgagcgcaauccuuaugaaaacauccuguacaagauuugucucuccggggacggauggcccuauaucgcuagcagaaccucuaucacaggccgggccugggagaauaccgugguggaucuggagagcgacgggaagccucagaaagcuggauccaacaauucuaacaagagccuucaguccgccggccugaccgccgggcucacauacagccagcugaugacgcugaaagaugcuaugcuucaacucgacccgaaugcgaagaccuggauggauauugaaggaagacccgaggacccugucgaaaucgcccuguaccagcccucuuccggcugcuauauucacuuuuuccgcgagccuacagaccugaaacaguuuaagcaggaugcuaaguacagccauggcaucgacguggccgaucucuucgccgcucaacccgggcugaccucugccguuauugacgcgcuuccgcggaaccuggugaucacaugucagggauccgaugacaucagaaaacuccuggaaagccagggccgcaaggauauuaaacugaucgacauugcucuuuccaagaccgauucucggaaauaugagaaugccgucugggaccaguacaaggaucucugccacaugcauacggggaucgugguugagaagaaaaagagaggaggcaaagaagagauuacaccucacugugcccugauggacugcaucauguuugaugcugccgugagcgggggccugaacgcuuccguccuccgcgccgugcugccccgggacauggucuucagaaccucuaccccucgcgugguucuuuga

SEQ ID NO: 9227 - RNA, 1710 nt, Artificial Sequence
  derived and/or modified CDS sequence (opt5) from LASV(G2230-SLE-2012;Clade IV)__AIT17247__NP
augagcgccuccaaggagaucaaaucuuuccuguggacccagagccucagacgggaacuguccggcuacugcucuaacauuaaacuucaaguggucaaggacgcucaggcccugcuccacgggcuggauuuuagcgagguuuccaaugugcagcgccuuaugagaaagcagcggcgcgacgauucugaccugaaaagacuccgggaucugaaccaagcggugaauaaccuggucgaacucaagagcacacagcagaaguccgugcugcgcguuggaacgcuuaccagcgacgaucugcucauccuggcugccgaccuugagaaacugaagucuaaagugauuagaacagaacggccccucuccagcggcgucuauauggggaaucugucuucccagcaacuggaucagcgcagagcccuccugaacaugaucggaaugagcggcgggaaucagggagcucaggugggccgggacggcguugugcgcgucugggaugugaagaacgccgaccuucugaauaaccaauucgggaccaugccuucucucacacuggcuugucuuaccaaacagggacagguggaucugaaugacgucguucaagcccucacagaccugggccugauuuacaccgcgaaguauccgaacacguccgaucucgacagacuggcccagagccaucccauccuuaauaugaucgauaccaagaaauccucucugaacauuagcggguacaauuuuucccucggagcugccgugaaggcuggcgccugcaugcuggacgggggaaacaugcuugagacaaucaaagugagcccucagaccauggauggcauucugaagucuauccucaaagucaagaaagcgcugggcauguucauuuccgagacacccggggaacggaacccuuaugagaauauccuguacaagauuugucucagcggagacggcuggcccuauaucgccucucgcaccagcaucacggggagagcuugggaaaacacaauuguggaucuggaguccgacggaaagccucagaaagccggcucuaauaacagcaauaagucccuucaaagcgcuggguuuaccgccggacugacauacucucagcucaugacccugaaagauuccaugcugcagcuugacccgaacgccaagaccuggauggauaucgagggccggcccgaagacccuguugagguggcucucuaccagcccagcucuggcugcuauauucacuucuuuagagaaccuacagaccugaaacaauucaagcaggaugcgaaguacucccaugggaucgacgucacggaucuguuugccgcucagcccggacucaccagcgccgugauugaggcccugccgcgcaauaugguuaucacaugucagggcuccgacgauauccggaaacuucuggaaucucaagggagaaaggacauuaaacucaucgauauugcucugaacaagaccgacagccgcaaauaugagaaugccgugugggaucaguacaaggaccugugccacaugcauacaggagucguggucgagaagaaaaagcggggcgggaaagaagagaucaccccucacugugcgcuuauggauugcauuauguucgacgcugccguguccggcggacucaagacgcugguucugagagccgugcucccccgcgauauggucuuucggacaucuaccccuaaagugguucuguga

SEQ ID NO: 9228 - RNA, 1710 nt, Artificial Sequence
  derived and/or modified CDS sequence (opt5) from LASV(G2259-SLE-2012;Clade IV)__AIT17251__NP
augagcgccuccaaggagaucaaaucuuuccuguggacccagagccucagacgggaacuguccggcuacugcucuaacauuaaacuucaaguggucaaggacgcucaggcccugcuccacgggcuggauuuuagcgagguuuccaaugugcagcgccuuaugagaaagcagcggcgcgacgauucugaccugaaaagacuccgggaucugaaccaagcggugaauaaccuggucgaacucaagagcacacagcagaaguccgugcugcgcguuggaacgcuuaccagcgacgaucugcucauccuggcugccgaccuugagaaacugaagucuaaagugauuagaacagaacggccccucuccagcggcgucuauauggggaaucugucuucccagcaacuggaucagcgcagagcccuccugaacaugaucggaaugagcggcgggaaucagggagcucaggugggccgggacggcguugugcgcgucugggaugugaagaacgccgaccuucugaauaaccaauucgggaccaugccuucucucacacuggcuugucuuaccaaacagggacagguggaucugaaugacgucguucaagcccucacagaccugggccugauuuacaccgcgaaguauccgaacacguccgaucucgacagacuggcccagagccaucccauccuuaauaugaucgauaccaagaaauccucucugaacauuagcggguacaauuuuucccucggagcugccgugaaggcuggcgccugcaugcuggacgggggaaacaugcuugagacaaucaaagugagcccucagaccauggauggcauucugaagucuauccucaaagucaagaaagcgcugggcauguucauuuccgagacacccggggaacggaacccuuaugagaauauccuguacaagauuugucucagcggagacggcuggcccuauaucgccucucgcaccagcaucacggggagagcuugggaaaacacaauuguggaucuggaguccgacggaaagccucagaaaaccggcucuaauaacagcaauaagucccuucaaagcgccggguuuacagcuggacugaccuacucucagcucaugacccugaaagauuccaugcugcagcuugacccgaacgccaagacauggauggauaucgagggccggcccgaagacccuguugagguggcccucuaccagcccagcucuggcugcuauauucacuucuuuagagaaccuacggaccugaaacaauucaagcaggaugcuaaguacucccaugggaucgacgucaccgaucuguuugcggcccagcccggacucacaagcgcugugauugaggcccugccgcgcaauaugguuaucaccugucagggcuccgacgauauccggaaacuucuggaaucucaagggagaaaggacauuaaacucaucgauauugcccugaacaagacagacagccgcaaauaugagaaugcugugugggaucaguacaaggaccugugccacaugcauaccggagucguggucgagaagaaaaagcggggcgggaaagaagagaucacgccucacugugcccuuauggauugcauuauguucgacgcggcuguguccggcggacucaagacacugguucugagagccgugcucccccgcgauauggucuuucggaccucuaccccuaaagugguucuguga

SEQ ID NO: 9229 - RNA, 1710 nt, Artificial Sequence
  derived and/or modified CDS sequence (opt5) from LASV(G2263-SLE-2012;Clade IV)__AIT17255__NP
augagcgccuccaaggagaucaaaucuuuccuguggacccagagccucagacgggaacuguccggcuacugcucuaacauuaagcugcaaguggucaaagacgcucaggcccugcuccacgggcuggauuuuagcgagguuuccaaugugcagcgccuuaugagaaaggaacggcgcgacgauaacgaccugaaaagacuccgggaucugaaucaggcggugaacaaucuggucgagcucaagucuacacaacaaaagagcgugcugcgcguuggaacgcuuaccuccgacgaucugcucgugcuggcugccgaccuugaaaaacuuaagagcaaagucacaagaaccgagcggccccucucugccggcguguauauggggaaccuguccagccagcagcuggaucagcgcagagcucuccugucuaugaucggaauguccggcgggaaucagcgggcccaggcuggacgcgacggcguugugagagucugggaugugaagaacgccgagcuucugaauaaccaguucggcacaaugccuagccucacccuggcgugucuuacaaaacaaggacagguggaccugaaugaugccguccaggcucucaccgaccugggacugauuuacacgguuaaguauccgaacgccucugaccucgaucggcugacccaaucccaucccauccuuaauaugauugacacaaagaaaagcucccugaacaucucuggcuacaauuuuagccucggggcugccgugaaggcgggagccugcaugcuggauggcgggaacaugcuugaaaccaucaaaguguccccucagacaauggacgggauucucaagagcauccugaaagucaagaaaacccugggcauguucauuucugauacgcccggcgagcgcaacccuuaugaaaauauccuguacaagauuugucucuccggggacggauggcccuauaucgcuagcagaacaucuauuaccggccgggccugggagaacacagugguugaucuggagagcaaugggaagccucagaaagcugacuccaacucuagcaauaagucccuucagagcgccggauuuaccgccggccugaccuacucucaacucaugacacugaaagaugcuaugcugcagcuugacccgaacgcgaagacguggauggauaucgaagggagacccgaggacccuguggaaaucgccuucuaccagcccuccagcggaugcuauauucacuuuuuccgcgagccuaccgaccucaaacaguuuaagcaagaugcuaaguacucucauggcaucgacgucacagaucuguucgccgcccagcccggccugaccuccgcugugauugacgcccucccgcggaauaugguuaucacaugucaggggagcgaugacauuagaaaacugcuugaaucccagggacgcaaggauaucaaacugaucgacauugcgcucucuaagaccgauagccggaaauaugagaacgcugugugggaccaauacaaggaucugugccacaugcauacgggcgucguggucgagaagaaaaagagagggggaaaagaagagaucacaccucacugugcccugauggacugcauuauguuugaugccgcuguguccggcgggcuuaauacccucguucugcgcgccgugcugccccgggacauggucuucagaaccucuacaccucgcgugguucucuga

SEQ ID NO: 9230 - RNA, 1710 nt, Artificial Sequence
  derived and/or modified CDS sequence (opt5) from LASV(G2280-SLE-2012;Clade IV)__AIT17259__NP
augagcgccuccaaggagaucaaaucuuuccuguggacccagagccucagacgggaacuguccucuuacugcagcaacauuaaacuucaaguggucaaggacgcucaggcccugcuccacggccuggauuuuuccgagguuucuaaugugcagcgccuuaugagaaaggaacggcgcgacgauaacgaccugaaaagacuccgggaucugaaucaggcggugaacaaucuggucgagcucaagagcacacaacagaaguccauccugcgcguggggacgcuuaccagcgacgaucugcucauucuggcugccgaccuugaaaaacugaagucuaaaguuacaagaaccgagcggccccucuccgccggaguguauaugggcaaccugagcucucagcagcuggaucaacgcagagcucuccugaauaugcuugggauguccggaagcaaccagggcgcccgggcugggcgcgacggagucgugagaguuugggaugugaagaaugccgagcugcucaacaaucaguucggcacaaugccuucucugacccuugcgugucugacaaaacagggccaagucgaccucaacgaugccgugcaggcucugaccgaccuggggcucaucuacacggccaaguauccgaauaccuccgaccuggaucggcuuacacagagccaucccauucugaacaugaucgacaccaagaaauccucucucaauaucagcggauacaacuuuucccugggcgcugccgugaaggcgggggccugcaugcuugauggaggcaacaugcuggaaacaauuaaagucagcccucaaaccauggacgggauccucaagucuauucugaaaguuaagaaagcucugggaauguucaucuccgauacgcccggcgagcgcaauccuuaugaaaacauucucuacaagaucugucugagcggcgacggguggcccuauauugccucuagaacaagcaucaccggacgggcuugggagaauacagugguggaucuugaguccgacggcaagccucagaaagccgggucuaacagcuccaauaagagccugcagucugccggauuuaccgcuggccucaccuacucccagcugaugacacugaaagaugcgaugcuucaacucgacccgaacgccaagacguggauggauaucgaagggagacccgaggacccugucgaaauugcucuguaccagcccagcucuggaugcuauauccacuucuuucgcgagccuaccgaccugaaacaguucaagcaggaugccaaguacucccauggcauugacgugacagaucucuuugccgcucaacccggccugaccagcgccguuaucgacgcgcuuccgcggaauauggugauuacaugucagggguccgaugacaucagaaaacugcucgaaucucagggacgcaaggauaucaaacugauugacaucgcucugagcaagaccgauucccggaaauaugagaacgccgucugggaccaguacaaggaucuuugccacaugcauacgggcauugugguugagaagaaaaagagagggggaaaagaagagaucacaccucacugugcccucauggacugcauuauguucgaugcugccgugucuggcgggcugaaugcuagcguccugcgcgccgugcucccccgggacauggucuuuagaaccuccaccccucgcgugguucuguga

SEQ ID NO: 9231 - RNA, 1710 nt, Artificial Sequence
  derived and/or modified CDS sequence (opt5) from LASV(G2295-SLE-2012;Clade IV)__AIT17263__NP
augagcgccuccaaggagaucaaaucuuuccuguggacccagagccucagacgggaacuguccggcuacugcucuaacauuaagcugcaaguggucaaagacgcucaggcccugcuccacgggcuggauuuuagcgagguuuccaaugugcagcgccuuaugagaaaggaacggcgcgacgauaacgaccugaaaagacuccgggaucugaaucaggcggugaacaaucuggucgagcucaagucuacacaacaaaagagcgugcugcgcguuggaacgcuuaccuccgacgaucugcucauccuggcugccgaccuugaaaaacuuaagagcaaagugauuagaacagagcggccccucucugccggcgucuauauggggaaccuguccagccagcagcuggaucagcgcagagcucuccugaauaugaucggaaugggcgggucuaaccagggagcccgggcuggccgcgacggcgugguuagagugugggaugucaagaaugccgagcuucugaacaaucaguucgggaccaugccuucccucacacuggcgugucuuaccaaacagggacaaguggaccugaacgaugccgugcaggcucucacagaccugggccugauuuacaccgccaaguauccgaauacgagcgaccucgaucggcugacccagucucaucccauccuuaacaugaucgacacaaagaaauccagccugaauauuuccggguacaacuuuucucucggagcugccgucaaggcgggcgccugcaugcuggaugggggaaacaugcuugaaaccaucaaaguuagcccucaaacaauggacggcauucugaaguccauccucaaagugaagaaagcucugggcauguucauuagcgauacccccggggagcgcaauccuuaugaaaacauccuguacaagauuugucucucuggagacggcuggcccuauaucgccuccagaacgagcaucacagggcgggcuugggagaauaccguggucgaucuggagucugacggaaagccucagaaagccggcagcaacggguccaauaagucucuucagagcgccggauuuacagcuggccugaccuacucccagcucaugacccugaaagaugcgaugcugcaacuugacccgaacacaaagacguggauggauauugaaggcagacccgaggacccuguggaaguugcccucuaccagcccagcucugggugcuauauccacuucuuucgcgagccuaccgaccugaaacaguucaagcaggaugcuaaguacucccauggaauugacgugacagaucuguuugccgcccaacccggccucaccagcgcugucaucgacgcccugccgcggaauauggugauuacaugucaggggucugaugacaucagaaaacuucuggaaucccagggacgcaaggauaucaaacucauugacaucgcgcugagcaagaccgauucccggaaauaugagaacgcuguuugggaccaguacaaggaucugugccacaugcauacgggcauuguggucgagaagaaaaagagagggggcaaagaagagaucacaccucacugugcccuuauggacugcauuauguucgaugccgcugugucuggaggccucaauaccagcguccugcgcgccgugcugccccgggacaugguuuuuagaaccuccacaccucgcgugguccucuga

SEQ ID NO: 9232 - RNA, 1710 nt, Artificial Sequence
  derived and/or modified CDS sequence (opt5) from LASV(G2315-SLE-2012;Clade IV)__AIT17267__NP
augagcgccuccaaggagaucaaaucuuuccuguggacccagagccucagacgggaacuguccggcuacugcucuaacauuaagcugcaaguggucaaagacgcucaggcccugcuccacgggcuggauuuuagcgagguuuccaaugugcagcgccuuaugagaaaggaacggcgcgacgauaacgaccugaaaagacuccgggaucugaaucaggcggugaacaaucuggucgagcucaagucuacacaacaaaagagcgugcugcgcguuggaacgcuuaccuccgacgaucugcucauccuggcugccgaccuugaaaaacuuaagagcaaagugacaagaaccgagcggccccucucugccggcgucuauauggggaaccuguccagccagcagcuggaucagcgcagagcucuccugaauaugauuggaaugucuggcgggaaccagggagcccgggcuggccgcgacggcgugguuagagugugggaugucaagaaugccgagcuucugaacaaucaguucgggacaaugccuucccucacccuggcgugucuuacaaaacagggacaaguggaccugaacgaugccgugcaggcucucaccgaccugggccugaucuacacggccaaguauccgaauaccagcgaccucgaucggcugacacagucucaucccauucuuaacaugaucgacaccaagaaauccagccugaauaucuccggguacaacuuuucucucggagcugccgucaaggcgggcgccugcaugcuggaugggggaaacaugcuugaaacaauuaaaguuagcccucaaaccauggacuccauccucaagagcauucugaaagugaagaaagcucugggcauguucaucucugauacgcccggcgagcgcaauccuuaugaaaacauucuguacaagaucugucucuccggggacggauggcccuauauugccagcagaacaucuaucaccggccgggcuugggagaauacaguggucgaucuggagagcgacgggaagccucagaaagccggauccaacaauucuaacaagagccuucaguccgccggcuuugcugcggggcugaccuacagccagcucaugacccugaaagaugccaugcugcaacuugacccgaaugcuaagacauggauggauaucgaaggaagacccgaggacccuguggaaauugcccucuaccagcccucuuccggcugcuauauccacuucuuucgcgagccuacggaccugaaacaguucaagcaggaugccaaguacagccauggcauugacguuaccgaucuguuugcugcccaacccgggcucacaucugcggugaucgacgcucugccgcggaacauggucauuaccugucagggauccgaugacaucagaaaacuucuggaaagccagggccgcaaggauaucaaacucauugacaucgcccuguccaagacagauucucggaaauaugagaaugccgugugggaccaguacaaggaucugugccacaugcauaccgggguuguggucgagaagaaaaagagaggaggcaaagaagagauuacgccucacugugcucuuauggacugcaucauguucgaugccgcugugagcgggggccucaacacauccguccugcgcgccgugcugccccgggacaugguuuuuagaaccaccacaccucgcgugguccucuga

SEQ ID NO: 9233 - RNA, 1710 nt, Artificial Sequence
  derived and/or modified CDS sequence (opt5) from LASV(G2318-SLE-2012;Clade IV)__AIT17271__NP
augagcgccuccaaggagaucaaaucuuuccuguggacccagagccucagacgggaacuguccggcuacugcucuaacauuaagcugcaaguggucaaagacgcucaggcccugcuccacgggcuggauuuuagcgagguuuccaaugugcagcgccuuaugagaaaggaacggcgcgacgauaacgaccugaaaagacuccgggaucugaaucaggcggugaacaaucuggucgagcucaagucuacacaacaaaagagcauccugcgcgugggaacgcuuaccuccgacgaucugcucauucuggcugccgaccuugaaaaacuuaagagcaaaguuacaagaaccgagcggccccucucugccggcguguauauggggaaccuguccagccagcagcuggaucagcgcagagcucuccugaauaugaucggaaugucuggcgggaaccagggagcccgggcuggccgcgacggcgucgugagaguuugggaugugaagaaugccgagcuucugaacaaucaguucgggacaaugccuucccucacccuggcgugucuuacaaaacagggacaagucgaccugaacgaugccgugcaggcucucaccgaccugggccugauuuacacggccaaguauccgaauaccagcgaccucgaucggcugacacagucucaucccauccuuaacaugaucgacaccaagaaauccagccugaauauuuccggguacaacuuuucucucggagcugccgugaaggcgggcgccugcaugcuggaugggggaaacaugcuugaaacaaucaaagucagcccucaaaccauggacggcauucugaagacgauccucaaaguuaagaaagcucugggcauguucauuuccgauacacccggggagcgcaauccuuaugaaaacauccuguacaagauuugucucagcggagacggcuggcccuauaucgccucuagaaccuccaucacagggcgggcuugggagaauaccgugguggaucuggagagcgacggaaagccucagaaaaccggcucuaacaauagcaacaagucccuucagucugccggguuugccgcuggacugacauacagccagcucaugacgcugaaagaugcgaugcugcaacuugacccgaaugccaagaccuggauggauauugaaggcagacccgaggacccugucgaaaucgcucucuaccagcccuccagcggcugcuauauucacuucuuucgcgagccuacagaccugaaacaguucaagcaggaugccaaguacucucaugggaucgacgugaccgaucuguuugccgcucaacccggacucacauccgccguuauugacgcgcugccgcggaacauggugaucaccugucagggcagcgaugacaucagaaaacuucuggaaucucaggggcgcaaggauauuaaacucaucgacauugcucuguccaaggccgauagccggaaauaugagaaugccgucugggaccaguacaaggaucugugccacaugcauacgggagugguuguggagaagaaaaagagaggcgggaaagaagagaucacaccucacugugcucuuauggacugcauuauguaugaugccgcugucuccggcggacucucuaccagcgugcugcgcgccguccugccccgggacaugguguucagaaccuccacaccucgcguugugcucuga

SEQ ID NO: 9234 - RNA, 1710 nt, Artificial Sequence
  derived and/or modified CDS sequence (opt5) from LASV(G2363-SLE-2012;Clade IV)__AIT17275__NP
augagcgccuccaaggagaucaaaucuuuccuguggacccagagccucagacgggaacuguccggcuacugcucuaacauuaagcugcaaguggucaaagacgcucaggcccugcuccacgggcuggauuuuagcgagguuuccaaugugcagcgccuuaugagaaagcagcggcgcgacgauggagaccugaaaagacuccgggaucugaaccaagcggugaauaaccuggucgaacucaagucuacacagcaaaagagcgugcugcgcguuggcacgcuuaccuccgacgaucugcucacacuggcugccgaccuugagaaacuuaagagcaaagugaccagaacagaacggccccucucugccggggucuauaugggaaaucuguccagccagcagcuggaucagcgcagagcucuccugaacaugaucggcaugucugggggaaaucagggcgcccggaccggcaaggacggggugguucgcauuugggaugugaaaaacgcugaccuucugaauaaccaguucggaacaaugccuucccucacccuggccugucuuacgaagcaaggccaggucgaucugaaugacguggugcaggcgcucaccgaccuggggcugaucuacacagccaaguauccgaacauuagcgaucucgacagacuggcucaaucucaucccauccuuaaaaugaucgauaccuccaagagcucccugaauauuucuggauacaacuuuagccucggcgccgcugucaaagccggggcgugcaugcuggacggaggcaauaugcuugagacaguuaagguguccccucagaccauggauggcauccugaaaagcauucucaaggugaaaaagucucuggggauguucaucuccgacacgcccggagagcggaacccuuaugaaaacauucuguacaagaucugucucagcggcgauggguggcccuauauugccucucgcacaagcaucaccggcagagcuugggagaauacagucguggaccuggaauccgauggaaaaccucagaagguugggucuaacaauagcaacaaaucccuucagagcaccggauuuaccgccggccugacauacucucaacucaugacgcugaaggacgcuaugcugcagcuugauccgaaugccaaaaccuggauggacaucgagggccggcccgaggacccuguggaaauugcccucuaccagcccuccagcgggugcuauauccacuucuuuagagagccuacagaucugaagcaguucaagcaagacgcuaaauacucucauggaauugaugucaccgaccuguuugcggcccagcccggccucacauccgcugugaucgauacccugccgcgcaacaugguuauuacgugucaggggagcgacgauaucggaaaacuucuggaaucccagggccggaaagacaucaagcucauugauaucgcccugucuaaaacagacagcagaaaguaugagaaugccgugugggaucaauacaaggaccugugccacaugcauaccggggucguggucgaaaagaagaaacgcggcggaaaggaggagauuaccccucacugugcucuuauggauugcaucauguucgacgccgcgguguccggcgggcucaacgcuucuguucugcgggccgugcugcccagagacauggucuuucgcacaagcaccccucgggugguucucuga

SEQ ID NO: 9235 - RNA, 1710 nt, Artificial Sequence
  derived and/or modified CDS sequence (opt5) from LASV(G2384-SLE-2012;Clade IV)__AIT17277__NP
augagcgccuccaaggagaucaaaucuuuccuguggacccagagccucagacgggaacuguccucuuacugcagcaacauuaaacuucaaguggucaaggacgcucaggcccugcuccacggccuggauuuuuccgagguuucuaaugugcagcgccuuaugagaaaggaacggcgcgacgauaacgaccugaaaagacuccgggaucugaaucaggcggugaacaaucuggucgagcucaagagcacacaacagaaguccauccugcgcguggggacgcuuaccagcgacgaucugcucauucuggcugccgaccuugaaaaacugaagucuaaaguuacaagaaccgagcggccccucuccgccggaguguauaugggcaaccugagcucucagcagcuggaucaacgcagagcucuccuguccaugaucgggaugagcggaucuaaucagggcgcccgggcugggcgcgacggagucgugagaguuugggaugugaagaacgccgagcuucugaauaaccaguucggcacaaugccuucccucacccuggcgugucuuacaaaacagggccaagucgaccugaaugaugccgugcaggcucucaccgaccuggggcugauuuacacggccaaguauccgaacaccagcgaccucgaucggcugacacagucccaucccauccuuaauaugaucgacaccaagaaaucuagccugaacauuuccggauacaauuuuagccucggcgcugccgugaaggcgggggccugcaugcuggauggaggcaacaugcuugaaacaaucaaagucucuccucaaaccauggacgggauucugaaguccauccucaaaguuaagaaagcucugggaauguucauuagcgauacgcccggcgagcgcaacccuuaugaaaauauccuguacaagauuugucucucuggcgacggguggcccuauaucgccagcagaacauccaucaccggacgggcuugggagaacacagugguggaucuggagucugacggcaagccucagaaagccgggagcaauaacuccaauaagagccuucagucugccggauuuaccgcuggccugaccuacucccagcucaugacacugaaagaugcgaugcugcaacuugacccgaacgccaagacguggauggauauugaagggagacccgaggacccugucgaaguggcucucuaccagcccagcucuggaugcuauauccacuucuuucgcgagccuaccgaccugaaacaguucaagcaggaugccaaguacucccauggcauugacguuacagaucuguuugccgcucaacccggccucaccagcgccgugaucgacgcgcugccgcggaauauggucauuacaugucagggguccgaugacaucagaaaacuucuggaaucucagggacgcaaggauaucaaacucauugacaucgcucugagcaagaccgauucccggaaauaugagaacgccgugugggaccaguacaaggaucugugccacaugcauacgggcguuguggucgagaagaaaaagagagggggaaaagaagagauuacaccucacugugcccuuauggacugcaucauguucgaugcugccgugucuggcgggcucaauaccagcguccugcgcgcugugcugccccgggacaugguuuuuagaaccuccacaccucgcgugguccucuga

SEQ ID NO: 9236 - RNA, 1710 nt, Artificial Sequence
  derived and/or modified CDS sequence (opt5) from LASV(G2392-SLE-2012;Clade IV)__AIT17281__NP
augagcgccuccaaggagaucaaaucuuuccuguggacccagagccucagacgggaacuguccggcuacugcucuaacauuaaacuucaaguggucaaggacgcucaggcccugcuccacgggcuggauuuuagcgagguuuccaaugugcagcgccuuaugagaaaggaacggcgcgacgauucugaccugaaaagacuccgggaucugaaccaggcggugaauaaccuggucgagcucaagagcacacaacagaaguccgugcugcgcguuggaacgcuuaccagcgacgaucugcucgugcuggcugccgaccuugaaaaacugaagucuaaagucacaagaaccgagcggccccucuccgccggcguguauauggggaaucugagcucucagcagcuggaucaacgcagagcucuccuguccaugaucggaaugagcggcgggaaccagggagcccgggcuggccgcgacggcguugugagaauuugggaugucaagaaugccgagcuucugaacaaucaguucgggacaaugccuucucucacccuggcgugucuuacaaaacagggacaaguggaccugaacgaugugguccaggcccucaccgaccugggccugaucuacacggcuaaguauccgaauaccuccgaccucgaucggcugacacagagccaucccauucuuaacaugaucgacaccaagaaauccucucugaauaucagcggguacaacuuuucccucggagccgcuguuaaggccggcgcgugcaugcuggaugggggaaauaugcuugaaacaauuaaagugagcccucaaaccauggacggcauccugaagucuauucucaaagugaagaaagcccugggcauguucaucuccgauacgcccggggagcgcaacccuuaugaaaacauucuguacaagaucugucucagcggagacggcuggcccuauauugcuucuagaacaagcaucaccgggcgggccugggagaauacaaucgucgaucuggaguccgacggaaagccucagaaaaccucuaccacaaacagcaauaagucccuucagagcgcuggcuuugccgccgggcugacguacucucagcucaugacccugaaagaugcuaugcugcaacuugacccgaacgcgaagacauggauggauauugaaggaagacccgaggacccuguggaaaucgcccucuaccagcccuccagcggcugcuauauucacuucuuucgcgagccuaccgaccugaaacaguucaagcaggaugcuaaguacucucauggcaucgacguuacagaucuguuugccgcccaacccgggcucaccuccgcugugauugacacgcugccgcggaauauggucaucacaugucagggaagcgaagauaucagacgccuucuggagucccagggccggaaagacauuaagcucaucgauauugcccugucuaaaaccgacagcagaaaguaugagaacgcggugugggaucaguacaaagaccugugccacaugcauaccgggguuguggucgaaaagaagaaaaagggaggcaaagaggaaaucacaccucacugugcucuuauggauugcauuauguucgacgccgccguguccgggggccucaauaccucuguccugcgcgcugugcugccccgggauaugguuuuuagaacaagcacgccucgcgugguccucuga

SEQ ID NO: 9237 - RNA, 1710 nt, Artificial Sequence
  derived and/or modified CDS sequence (opt5) from LASV(G2405-SLE-2012;Clade IV)__AIT17285__NP
augagcgccuccaaggagaucaaaucuuuccuguggacccagagccucagacgggaacuguccggcuacugcucuaacauuaagcugcaaguggucaaagacgcucaggcccugcuccacgggcuggauuuuagcgagguuuccaaugugcagcgcucuaugagaaaggaacggcgcgacgauaacgaccuuaaaagacugcgggaucucaaucaggcggugaacaaucuggucgagcuuaagagcacacaacagaaguccauccuccgcgugggaacgcugaccagcgacgaucuucugauucucgcugccgaccuggaaaaacuuaagucuaaaguuacaagaaccgagcggccccuguccgccggcguguauauggggaaccucagcucucagcagcuggaucaacgcagagcucugcucaauaugaucggaauguccggcagcaaccagggggcccgggcuggacgcgacggcgucgugagaguuugggaugugaagaaugccgagcugcuuaacaaucaguucggcacaaugccuucucugacccucgcgugucugacaaaacaggggcaagucgaccuuaacgauguggugcaggcccugaccgaccucggacugauuuacacggcuaaguauccgaaugccuccgaccuggaucggcucacccagagccaucccauccugaacaugaucgacacaaagaaauccucucuuaauauuagcggcuacaacuuuucccugggggcugccgucaaggcgggagccugcaugcucgauggcgggaacaugcuggaaaccaucaaaguuagcccucaaacaauggacggcauucuuaagucuauccugaaagugaagaaagcucucggaauguucauuuccgauacccccggcgagcgcaauccuuaugaaaacauccuguacaagauuugucugagcggggacggauggcccuauaucgccucuagaacgagcaucacaggccgggcuugggagaauaccauuguggaucucgaguccgacgggaagccucagaaagccggaaacaauggcucuaacaagagccugcaguccgccggguuuacagcuggacuuaccuacagccagcugaugacccucaaagaugcgaugcugcaacuggacccgaaugccaagacauggauggauaucgaaggcagacccgaggacccugucgaaauugcucuuuaccagcccucuuccggcugcuauauccacuucuuucgcgagccuacggaccucaaacaguucaagcaggaugccaaguacagccaugggauugacgugaccgaucuguuugccgcucaacccggacugacaucugccguuaucgacgcgcucccgcggaaccuggugaucaccugucagggcuccgaugacauuagaaaacuucuggaaagccaggggcgcaaggauaucaaacucauugacaucgcucuguccaagacagauucucggaaauaugagaaugccgucugggaccaguacaaggaucugugccacaugcauaccggaauugugguugagaagaaaaagagaggcgggaaagaagagaucacgccucacugugcccuuauggacugcaucauguucgaugcugccgugagcggcggacucaacacauccguccugcgcgcugugcugccccgggacauggucuuuagaaccucuaccccucgcgugguucucuga

SEQ ID NO: 9238 - RNA, 1710 nt, Artificial Sequence
  derived and/or modified CDS sequence (opt5) from LASV(G2427-SLE-2012;Clade IV)__AIT17289__NP
augagcgccuccaaggagaucaaaucuuuccuguggacccagagccucagacgggaacuguccggcuacugcucuaacauuaaacuucaaguggucaaggacgcucaggcccugcuccacgggcuggauuuuagcgagguuuccaaugugcagcgccuuaugagaaaggaacggcgcgacgauucugaccugaaaagacuccgggaucugaaccaggcggugaauaaccuggucgagcucaagagcacacaacagaaguccgugcugcgcguuggaacgcuuaccagcgacgaucugcucgugcuggcugccgaccuugaaaaacugaagucuaaagucacaagaaccgagcggccccucuccgccggcguguauauggggaaucugagcucucagcagcuggaucaacgcagagcucuccuguccaugaucggaaugagcggcgggaaccagggaguucgggccggccgcgacggcguggucagaauuugggaugugaagaaugcugagcuucugaacaaucaguucgggacaaugccuucucucacccuggccugucuuacaaaacagggacaaguggaccugaacgaugucguucaggcgcucaccgaccugggccugaucuacacggccaaguauccgaauaccuccgaccucgaucggcugacacagagccaucccauucuuaacaugaucgacaccaagaaauccucucugaauaucagcggguacaacuuuucccucggagcugccgugaaggcuggcgccugcaugcuggaugggggaaauaugcuugaaacaauuaaagugagcccucaaaccauggacggcauccugaagucuauucucaaagucaagaaagcgcugggcauguucaucuccgauacgcccggggagcgcaacccuuaugaaaacauucuguacaagaucugucucagcggagacggcuggcccuauauugccucuagaacaagcaucaccgggcgggcuugggagaauacaaucguggaucuggaguccgacggaaagccucagaaaaccggcucuauuaacagcaauaagucccuucagagcaccggguuugccgcuggacugacauacucucagcucaugacgcugaaagaugccaugcugcaacuugacccgaacgccaagaccuggauggauaucgaaggcagacccgaggacccuguugaaauugcucucuaccagcccuccagcggcugcuauauccacuucuuucgcgagccuacagaccugaaacaguucaagcaggaugcgaaguacucucaugggauugacgugaccgaucuguuugccgcucaacccggacucacauccgccgucaucgacgcccugccgcggaauauggugaucaccugucagggcagcgaugacauuagaaaacuucuggaaucccaggggcgcaaggauaucaaacucauugacaucgcucugucuaagacggauagccggaaauaugagaacgccguuugggaccaguacaaggaucugugccacaugcauacaggaauuguggucgagaagaaaaagagaggcgggaaagaagagaucaccccucacugugcgcuuauggacugcaucauguucgaugcugccguguccggcggacucaauaccucuguccugcgcgccgugcugccccgggacaugguuuuuagaacaagcaccccucgcgugguccucuga

SEQ ID NO: 9239 - RNA, 1710 nt, Artificial Sequence
  derived and/or modified CDS sequence (opt5) from LASV(G2431-SLE-2012;Clade IV)__AIT17293__NP
augagcgccuccaaggagaucaaaucuuuccuguggacccagagccucagacgggaacuguccggcuacugcucuaacauuaagcugcaaguggucaaagacgcucaggcccugcuccacgggcuggauuuuagcgagguuuccaaugugcagcgccuuaugagaaagcagcggcgcgacgauaacgaccugaaaagacuccgggaucugaaucaagcggugaacaaucuggucgaacucaagucuacacagcaaaagagcgugcugcgcguuggaacgcuuaccuccgacgaucugcucgugcuggcugccgaccuugagaaacuuaagagcaaagucacaagaaccgaacggccccucucugccggcguguauauggggaaccuguccacacagcagcuggaucagcgcagagcucuccugaauaugaucggaaugagcggcgggaaccagggagcccgggcuggccgcgacggcguugugagagucugggaugugaagaaugccgaccuucugaacaaucaguucgggaccaugccuucucucacacuggcgugucuuaccaaacaaggacagguggaucugaacgacgucguucaggcccucacggaccugggccugauuuacaccgcuaaguauccgaauacauccgaucucgaccggcugacccaaagccaucccauccuuaacaugauugauacaaauaagucuucccugaacaucagcggguacaacuuuucccucggagccgcugugaaagccggcgcgugcaugcuggacgggggaaauaugcuugagaccaucaaggugucuccucagacgauggauggcauucugaaaagcauccucaaggucaaaaaggcccugggcauguucauuuccgacacacccggggagcgcaacccuuaugaaaauauccuguacaaaauuugucucagcggagauggcuggcccuauaucgcuucuagaaccuccauuacagggcgggccugggagaacaccgugguugaccuggaaagcgauggaaagccucagaaggcuggcgggaauaacucuaauaaaagccuucaguccgccggauuuaccgccggccugacauacucucaacucaugacgcugaaggacgcuaugcugcagcuugauccgaacgcgaaaaccuggauggacaucgagggcagacccgaggacccuguggaaaucgcccucuaccagcccagcuccgggugcuauauucacuucuuucgcgagccuacagaucugaagcaguucaaacaagacgcuaaguacagccauggaaucgaugucaccgaccuguuugccgcccagcccggccucacaucugcugugauugaugcccugccgcggaauaugguuaucaccugucagggguccgacgauauuagaaaacuucuggaaagccagggacgcaaggacaucaagcucaucgauauugcgcugucuaaaacggacucccggaaguaugagaacgcugugugggaucaauacaaagaccugugcaauaugcacacaggcaucgucguggaaaagaagaaaagagggggcaaggaggagauuaccccucauugugcccuuauggauugcaucauguucgacgccgcugucagcggaggcaugaacaccuccgugcuccgcgccguucugccccgggacaugguguuuagaacaucuaccccucgcgucgugcuguga

SEQ ID NO: 9240 - RNA, 1710 nt, Artificial Sequence
  derived and/or modified CDS sequence (opt5) from LASV(G2511-SLE-2012;Clade IV)__AIT17295__NP
augagcgccuccaaggagaucaaaucuuuccuguggacccagagccucagacgggaacuguccggcuacugcucuaacauuaagcugcaaguggucaaagacgcucaggcccugcuccacgggcuggauuuuagcgagguuuccaaugugcagcgccuuaugagaaaggaacggcgcgacgauaacgaccugaaaagacuccgggaucugaaucaggcggugaacaaucuggucgagcucaagucuacacaacaaaagagcgugcugcgcguuggaacgcuuaccuccgacgaucugcucauccuggcugccgaccuugaaaaacuuaagagcaaagugauuagaacagagcggccccucucugccggcgucuauauggggaaccuguccagccagcagcuggaucagcgcagagcucuccugaauaugaucggaaugggcgggucuaaccagggagcccgggcuggccgcgacggcgugguuagagugugggaugucaagaaugccgagcuucugaacaaucaguucgggaccaugccuucccucacacuggcgugucuuaccaaacagggacaaguggaccugaacgaugccgugcaggcucucacagaccugggccugauuuacaccgccaaguauccgaauacgagcgaccucgaucggcugacccagucucaucccauccuuaacaugaucgacacaaagaaauccagccugaauauuuccggguacaacuuuucucucggagcugccgucaaggcgggcgccugcaugcuggaugggggaaacaugcuugaaaccaucaaaguuagcccucaaacaauggacggcauucugaaguccauccucaaagugaagaaagcucugggcauguucauuagcgauacccccggggagcgcaauccuuaugaaaacauccuguacaagauuugucucucuggagacggcuggcccuauaucgccuccagaacgagcaucacagggcgggcuugggagaauaccauuguggaucuggagucugacggaaagccucagaaagccggcagcaacggguccaauaagucucuucagagcgccggauuuacagcuggccugaccuacucccagcucaugacccugaaagaugcgaugcugcaacuugacccgaacgccaagacauggauggauaucgaaggcagacccgaggacccugucgaaauugcucucuaccagcccagcucugggugcuauauccacuucuuucgcgagccuacggaccugaaacaguucaagcaggaugccaaguacucccauggaauugacgugaccgaucuguuugccgcucaacccggccucacaagcgccaucaucgacgcgcugccgcggaauaugguuauuaccugucaggggucugaugacaucagaaaacuucuggaaucccagggacgcaaggauauuaaacucaucgacauugcucugagcaagacagauucccggaaauaugagaacgccgugugggaccaguacaaggaucugugccacaugcauaccggcaucgucguggagaagaaaaagagagggggcaaagaagagaucacgccucacugugcccuuauggacugcauuauguucgaugcugccguuucuggaggccucaauacaagcgugcugcgcgcuguccugccccgggacaugguguuuagaaccuccaccccucgcgucgugcucuga

SEQ ID NO: 9241 - RNA, 1710 nt, Artificial Sequence
  derived and/or modified CDS sequence (opt5) from LASV(G2554-SLE-2012;Clade IV)__AIT17299__NP
augagcgccuccaaggagaucaaaucuuuccuguggacccagagccucagacgggaacuguccggcuacugcucuaacauuaagcugcaaguggucaaagacgcucaggcccugcuccacgggcuggauuuuagcgagguuuccaaugugcagcgccuuaugagaaaggaacggcgcgacgauaacgaccugaaaagacuccgggaucugaaucaggcggugaacaaucuggucgagcucaagucuacacaacaaaagagcgugcugcgcguuggaacgcuuaccuccgacgaucugcucgugcuggcugccgaccuugaaaaacuuaagagcaaagucacaagaaccgagcggccccucucugccggcguguauauggggaaccuguccagccagcagcuggaucagcgcagagcucuccugucuaugaucggaauguccggcgggaaucagggagcccggacaggccgcgacggcguugugagagucugggaugugaagaacgcugagcuucugaauaaccaguucgggaccaugccuagccucacacuggccugucuuaccaaacagggacaaguggaccugaaugaugucguucaggcgcucacggaccugggccugauuuacaccgccaaguauccgaacacaucugaccucgaucggcugacccagucccaucccauccuuaauaugauugacacaaagaaaagcucccugaacaucucuggguacaauuuuagccucggagcugccgugaaggcuggcgccugcaugcuggaugggggaaacaugcuugaaaccaucaaaguguccccucaaacgauggacggcauucucaagagcauccugaaagucaagaaagcgcugggcauguucauuucugauacacccggggagcgcaacccuuaugaaaauauccuguacaagauuugucucuccggagacggcuggcccuauaucgccagcagaaccucuauuacagggcgggcuugggagaacaccgugguugaucuggagagcgacggaaagccucagaaagccggcuccaauaacucuaauaagagccuucaguccgcuggguuuaccgccggacugacauacagccagcucaugacgcugaaagaugccaugcugcaacuugacccgaacgcuaagaccuggauggauaucgaaggcagacccgaggacccuguggaaaucgcgcucuaccagcccucuuccggcugcuauauucacuucuuucgcgagccuagcgaccugaaacaguucaagcaggaugccaaguacucucaugggaucgacgucacagaucuguuugcugcccaacccggacucaccuccgccgugauugacgcucugccgcggaauaugguuaucacaugucagggcagcgaugacauuagaaaacuuuucgaaucccaggggcgcaaggauaucaaacugaucgacauugcccucucuaagaccgauagccggaaauaugagaacgcggugugggaccaguacaaggaucugugccacaugcauacgggagucguggucgagaagaaaaagagaggcgggaaagaagagaucacaccucacugugcucugauggacugcauuauguuugaugccgccguguccggcggacuuaauucucucguucugcgcgcugugcugccccgggacauggucuucagaaccagcaccccucgcgugguucucuga

SEQ ID NO: 9242 - RNA, 1710 nt, Artificial Sequence
  derived and/or modified CDS sequence (opt5) from LASV(G2557-SLE-2012;Clade IV)__AIT17303__NP
augagcgccuccaaggagaucaaaucuuuccuguggacccagagccucagacgggaacuguccggcuacugcucuaacauuaaacuucaaguggucaaggacgcucaggcccugcuccacgggcuggauuuuagcgagguuuccaaugugcagcgccuuaugagaaagcagcggcgcgacgauucugaccugaaaagacuccgggaucugaaccaagcggugaauaaccuggucgaacucaagagcacacagcagaaguccgugcugcgcguuggaacgcuuaccagcgacgaucugcucgugcuggcugccgaccuugagaaacugaagucuaaagucaucagaacagaacggccccucuccagcggcguguauauggggaaucugucuucccagcaacuggaucagcgcagagcccuccugaacaugauuggaaugagcggcgggaaucagggagcucagguuggccgggacggcgugguccgcgugugggaugugaagaacgccgaccuucugaauaaccaauucgggaccaugccuucucucacacuggcuugucuuaccaaacagggacaggucgaucugaaugacguugugcaagcccucacagaccugggccugaucuacaccgcgaaguauccgaacacguccgaucucgacagacuggugcagagccaucccauucuuaauaugaucgauaccaagaaauccucucugaacaucagcggguacaauuuuucccucggagccgcugucaaggccggcgcuugcaugcuggacgggggaaacaugcuugagacaauuaaagugagcccucagaccauggauggcauccugaagucuauucucaaaguuaagaaagcccugggcauguucaucuccgagacacccggggaacggaacccuuaugagaauauucuguacaagaucugucucagcggagacggcuggcccuauauugcgucucgcaccagcaucacggggagagccugggaaaacacaaucguggaucuggaguccgacggaaagccucagaaagcuggcucuaauaacagcaauaagucccuucaaagcgccggguuuaccgcuggacugacauacucucagcucaugacccugaaagauuccaugcugcagcuugacccgaacgccaagaccuggauggauauugagggccggcccgaagacccugucgagguggcccucuaccagcccagcucuggcugcuauauccacuucuuuagagaaccuacagaccugaaacaauucaagcaggaugcuaaguacucccaugggauugacguuacggaucuguuugcggcccagcccggacucaccagcgcugugaucgaggcccugccgcgcaauauggucauuacaugucagggcuccgacgauauccggaaacuucuggaaucucaagggagaaaggacaucaaacucauugauaucgcccugaacaagaccgacagccgcaaauaugagaaugcugugugggaucaguacaaggaccugugccacaugcauacaggagucgugguugagaagaaaaagcggggcgggaaagaagagauuaccccucacugugcccuuauggauugcaucauguucgacgcggcuguguccggcggacucaagacgcugguccugagagccgugcucccccgcgauaugguuuuucggacaucuaccccuaaagugguccuguga

SEQ ID NO: 9243 - RNA, 1710 nt, Artificial Sequence
  derived and/or modified CDS sequence (opt5) from LASV(G2565-SLE-2012;Clade IV)__AIT17307__NP
augagcgccuccaaggagaucaaaucuuuccuguggacccagagccucagacgggaacuguccggcuacugcucuaacauuaagcugcaaguggucaaagacgcucaggcccugcuccacgggcuggauuuuagcgagguuuccaaugugcagcgccuuaugagaaaggaacggcgcgacgauaacgaccugaaaagacuccgggaucugaaucaggcggugaacaaucuggucgagcucaagucuacacaacaaaagagcgugcugcgcguuggaacgcuuaccuccgacgaucugcucauccuggcugccgaccuugaaaaacuuaagagcaaagugacaagaaccgagcggccccucucugccggcgucuauauggggaaccuguccagccagcagcuggaucagcgcagagcucuccugucuaugauuggaauguccggcgggaaucagggagcccggacaggccgcgacggcgugguuagagugugggaugucaagaacgcugagcuucugaauaaccaguucgggaccaugccuagccucacacuggccugucuuaccaaacagggacaaguggaccugaaugaugugguccaggcgcucacggaccugggccugaucuacaccgccaaguauccgaacacaucugaccucgaucggcugacccagucccaucccauucuuaauaugaucgacacaaagaaaagcucccugaacaucucuggguacaauuuuagccucggagcugccguuaaggcuggcgccugcaugcuggaugggggaaacaugcuugaaaccauuaaaguguccccucaaacgauggacggcauccuuaagagcauucucaaagugaagaaagcgcugggcauguucaucucugauacacccggggagcgcaacccuuaugaaaauauucuguacaagaucugucucuccggagacggcuggcccuauauugccagcagaaccucuaucacagggcgggcuugggagaacaccgucguggaucuggagagcgacggaaagcugcagaaaaccggcuccaauaacucuaauaagagccugcaguccgccggguuuacagcuggacucacguacagccagcugaugacccugaaagaugccaugcuucaacucgacccuaacgccaagaucuggauggauauugaaggcagaccggaggaccccguugaaaucgcucuguaccagccuucuuccggcugcuauauucacuucuuucgcgagcccacagaccugaaacaguucaagcaggaugcgaaguacagccaugggaucgacgugaccgaucucuuugccgcucaaccuggacugacaucugccgucauugacgcccuuccccggaauauggugaucaccugucagggcuccgaugacaucagaaaacugcucgaaagccaggggcgcaaggauauuaaacugaucgacauugcucugaacaagacggauucccggaaauaugagaaugccguuugggaccaguacaaggaucuuugccacaugcauacaggaguggucguggagaagaaaaagaaaggcgggaaggaagagaucaccccgcacugugcgcucauggacugcauuauguucgaugcugccgucucuggcggacugaacaccagcgugcugagagccguucucccucgcgacaugguguuucggacauccacccccagagucgugcuguga

SEQ ID NO: 9244 - RNA, 1710 nt, Artificial Sequence
  derived and/or modified CDS sequence (opt5) from LASV(G2587-SLE-2012;Clade IV)__AIT17311__NP
augagcgccuccaaggagaucaaaucuuuccuguggacccagagccucagacgggaacuguccggcuacugcucuaacauuaagcugcaaguggucaaagacgcucaggcccugcuccacgggcuggauuuuagcgagguuuccaaugugcagcgccuuaugagaaaggaacggcgcgacgauaacgaccugaaaagacuccgggaucugaaucaggcggugaacaaucuggucgagcucaagucuacacaacaaaagagcgugcugcgcguuggaacgcuuaccuccgacgaucugcucauccuggcugccgaccuugaaaaacuuaagagcaaagugauuagaacagagcggccccucucugccggcgucuauauggggaaccuguccagccagcagcuggaucagcgcagagcucuccugaauaugaucggaaugggcgggucuaaccagggagcccgggcuggccgcgacggcgugguuagagugugggaugucaagaaugccgagcuucugaacaaucaguucgggaccaugccuucccucacacuggcgugucuuaccaaacagggacaaguggaccugaacgaugccgugcaggcucucacagaccugggccugauuuacaccgccaaguauccgaauacgagcgaccucgaucggcugacccagucucaucccauccuuaacaugaucgacacaaagaaauccagccugaauauuuccggguacaacuuuucucucggagcugccgucaaggcgggcgccugcaugcuggaugggggaaacaugcuugaaaccaucaaaguuagcccucaaacaauggacggcauucugaaguccauccucaaagugaagaaagcucugggcauguucauuagcgauacccccggggagcgcaauccuuaugaaaacauccuguacaagauuugucucucuggagacggcuggcccuauaucgccuccagaacgagcaucacagggcgggcuugggagaauaccguggucgaucuggagucugacggaaagccucagaaagccggcagcaacggguccaauaagucucuucagagcgccggauuuacagcuggccugaccuacucccagcucaugacccugaaagaugcgaugcugcaacuugacccgaacgccaagacauggauggauauugaaggcagacccgaggacccuguggaaguugcucucuaccagcccagcucugggugcuauauccacuucuuucgcgagccuacggaccugaaacaguucaagcaggaugccaaguacucccauggaauugacgugaccgaucuguuugccgcucaacccggccucacaagcgccgucaucgacgcgcugccgcggaauauggugauuaccugucaggggucugaugacaucagaaaacuucuggaaucccagggacgcaaggauaucaaacucauugacaucgcucugagcaagacagauucccggaaauaugagaacgccguuugggaccaguacaaggaucugugccacaugcauaccggcauuguggucgagaagaaaaagagagggggcaaagaagagaucacgccucacugugcccuuauggacugcauuauguucgaugcugccgugucuggaggccucaauacaagcguccugcgcgcugugcugccccgggacaugguuuuuagaaccuccaccccucgcgugguccucuga

SEQ ID NO: 9245 - RNA, 1710 nt, Artificial Sequence
  derived and/or modified CDS sequence (opt5) from LASV(G2612-SLE-2012;Clade IV)__AIT17315__NP
augagcgccuccaaggagaucaaaucuuuccuguggacccagagccucagacgggaacuguccggcuacugcucuaacauuaagcugcaaguggucaaagacgcucaggcccugcuccacgggcuggauuuuagcgagguuuccaaugugcagcgccuuaugagaaaggaacggcgcgacgauaacgaccugaaaagacuccgggaucugaaucaggcggugaacaaucuggucgagcucaagucuacacaacaaaagagcgugcugcgcguuggaacgcuuaccuccgacgaucugcucauccuggcugccgaccuugaaaaacuuaagagcaaagugacaagaaccgagcggccccucucugccggcgucuauauggggaaccuguccagccagcagcuggaucagcgcagagcucuccugaauaugauuggaaugucuggcuccaaccagggggcccgggcuggacgcgacggcgugguuagagugugggaugucaagaauguggagcuucugaacaaucaguucggcacaaugccuagccucacccuggccugucuuacaaaacaggggcaaguggaccugaacgaugcgguccaggcccucaccgaccugggacugaucuacacggcuaaguauccgaauaccucugaccucgaucggcugacacagucccaucccauucuuaacaugaucgacaccaagaaaagcucccugaauaucucuggcuacaacuuuagccucggggccgcuguuaaggccggagcgugcaugcuggauggcgggaacaugcuugaaacaauuaaaguguccccucaaaccauggacggaauccucaagagcauucugaaagugaagaaagcccugggcauguucaucucugauacgcccggcgagcgcaauccuuaugaaaacauucuguacaagaucugucucuccggggacggauggcccuauauugcuagcagaacaucuaucaccggccgggccugggagaauacagucguggaucuggagagcgacgggaagccucagaaagcuggauccaacucuagcaauaagucccuucagagcgccggcuuuaccgccgggcugaccuacucucagcucaugacacugaaagaugcuaugcugcaacuugacccgaacgcgaagacguggauggauaucgaaggaagacccgaggacccuguugaaauugcccucuaccagcccuccagcggcugcuauauccacuucuuucgcgagccuaccgaccugaaacaguucaagcaggaugcuaaguacucucauggcauugacgugacagaucuguuugccgcccaacccgggcucaccuccgcugucaucgacgcccugccgcggaauauggugauuacaugucagggaagcgaugacaucagaaaacuucuggaaucccagggccgcaaggauaucaaacucauugacaucgcgcugucuaagaccgauagccggaaauaugagaacgcuguuugggaccaguacaaggaucugugccacaugcauacggggauuguggucgagaagaaaaagaaaggauccaaggaagagaucacaccucacugugcccuuauggacugcauuauguucgaugccgcugugucuggcgggcucaaugccagcguccugagagcugugcugccccgcgacaugguuuuucggaccuccaccccuagagugguccucuga

SEQ ID NO: 9246 - RNA, 1710 nt, Artificial Sequence
  derived and/or modified CDS sequence (opt5) from LASV(G2615-SLE-2012;Clade IV)__AIT17319__NP
augagcgccuccaaggagaucaaaucuuuccuguggacccagagccucagacgggaacuguccggcuacugcucuaacauuaaacuucaaguggucaaggacgcucaggcccugcuccacgggcuggauuuuagcgagguuuccaaugugcagcgccuuaugagaaagcagcggcgcgacgauucugaccugaaaagacuccgggaucugaaccaagcggugaauaaccuggucgaacucaagagcacacagcagaaguccgugcugcgcguuggaacgcuuaccagcgacgaucugcucgugcuggcugccgaccuugagaaacugaagucuaaagucaucagaacagaacggccccucuccagcggcguguauauggggaaucugucuucccagcaacuggaucagcgcagagcccuccugaacaugauuggaaugagcggcgggaaucagggagcucagguuggccgggacggcgugguccgcgugugggaugugaagaacgccgacaugcuuaauaaccaauucgggaccaugccuucucugacacucgcuugucugaccaaacagggacaggucgaucuuaaugacguugugcaagcccugacagaccucggccugaucuacaccgcgaaguauccgaacacguccgaucuggacagacucgcccagagccaucccauucugaauaugaucgauaccaagaaauccucucuuaacaucagcggguacaauuuuucccugggagcugccgugaaggcuggcgccugcaugcucgacgggggaaacaugcuggagacaauuaaagucagcccucagaccauggauggcauccuuaagucuauucugaaagugaagaaagcgcucggcauguucaucuccgagacacccggggaacggaacccuuaugagaauauucuguacaagaucugucugagcggagacggcuggcccuauauugccucucgcaccagcaucacggggagagcuugggaaaacacaaucguugaucucgaguccgacggaaagccucagaaagccggcucuaauaacagcaauaagucccugcaaagcgcuggguuuaccgccggacuuacauacucucagcugaugacccucaaagauuccaugcugcagcuggacccgaacgccaagaccuggauggauauugagggccggcccgaagacccuguggaggucgcucuuuaccagcccagcucuggcugcuauauccacuucuuuagagaaccuacagaccucaaacaauucaagcaggaugcgaaguacucccaugggauugacgugacggaucuguuugccgcucagcccggacugaccagcgccguuaucgaggcccucccgcgcaauauggugauuacaugucagggcuccgacgauauccggaaacugcuugaaucucaagggagaaaggacaucaaacugauugauaucguccucaacaagaccgacagccgcaaauaugagaaugcugugugggaucaguacaaggaccugugccacaugcauacaggagucgugguugagaagaaaaagcggggcgggaaagaagagauuaccccucacugugcccugauggauugcaucauguucgacgcggcuguguccggcggacuuaagacgaugguccucagagccgugcugccccgcgauaugguuuuucggacaucuaccccuaaagugguccuguga

SEQ ID NO: 9247 - RNA, 1710 nt, Artificial Sequence
  derived and/or modified CDS sequence (opt5) from LASV(G2723-SLE-2012;Clade IV)__AIT17323__NP
augagcgccuccaaggagaucaaaucuuuccuguggacccagagccucagacgggaacuguccggcuacugcucuaacauuaaacuucaaguggucaaggacgcucaggcccugcuccacgggcuggauuuuagcgagguuuccaaugugcagcgccuuaugagaaagcagcggcgcgacgauucugaccugaaaagacuccgggaucugaaccaagcggugaauaaccuggucgaacucaagagcacacagcagaaguccgugcugcgcguuggaacgcuuaccagcgacgaucugcucgugcuggcugccgaccuugagaaacugaagucuaaagucaucagaacagaacggccccucuccagcggcguguauauggggaaucugucuucccagcaacuggaucagcgcagagcccuccugaacaugauuggaaugagcggcgggaaucagggagcucagguuggccgggacggcgugguccgcgugugggaugugaagaacgccgaccuucugaauaaccaauucgggaccaugccuucucucacacuggcuugucuuaccaaacagggacaggucgaucugaaugacguugugcaagcccucacagaccugggccugaucuacaccgcgaaguauccgaacacguccgaucucgacagacuggcccagagccaucccauucuuaauaugaucgauaccaagaaauccucucugaacaucagcggguacaauuuuucccucggagcugccgugaaggcuggcgccugcaugcuggacgggggaaacaugcuugagacaauuaaagucagcccucagaccauggauggcauccugaagucuauucucaaagugaagaaagcgcugggcauguucaucuccgagacacccggggaacggaacccuuaugagaauauucuguacaagaucugucucagcggagacggcuggcccuauauugccucucgcaccagcaucacggggagagcuugggaaaacacaaucguugaucuggaguccgacggaaagccucagaaagccggcucuaauaacagcaauaagucccuucaaagcgcuggguuuaccgccggacugacauacucucagcucaugacccugaaagauuccaugcugcagcuugacccgaacgccaagaccuggauggauauugagggccggcccgaagacccuguggaggucgcucucuaccagcccagcucuggcugcuauauccacuucuuuagagaaccuacagaccugaaacaauucaagcaggaugcgaaguacucccaugggauugacgugacggaucuguuugccgcucagcccggacucaccagcgccguuaucgaggcccugccgcgcaauauggugauuacaugucagggcuccgacgauauccggaaacuucuggaaucucaagggagaaaggacaucaaacucauugauaucgcucugaacaagaccgacagccgcaaauaugagaaugccgucugggaucaguacaaggaccugugccacaugcauacaggaguggucguggagaagaaaaagcggggcgggaaagaagagauuaccccucacugugcgcuuauggauugcaucauguucgacgcugccguuuccggcggacucaagacgcuggugcugagagccguccucccccgcgauaugguguuucggacaucuaccccuaaaguugugcuguga

SEQ ID NO: 9248 - RNA, 1710 nt, Artificial Sequence
  derived and/or modified CDS sequence (opt5) from LASV(G2789-SLE-2012;Clade IV)__AIT17325__NP
augagcgccuccaaggagaucaaaucuuuccuguggacccagagccucagacgggaacuguccggcuacugcucuaacauuaagcugcaaguggucaaagacgcucaggcccugcuccacgggcuggauuuuagcgagguuuccaaugugcagcgccuuaugagaaagcagcggcgcgacgauaacgaccugaaaagacuccgggaucugaaucaagcggugaacaaucuggucgaacucaagucuacacagcaaaagagcgugcugcgcguuggaacgcuuaccuccgacgaucugcucgugcuggcugccgaccuugagaaacuuaagagcaaagucacaagaaccgaacggccccucucugccggcguguauauggggaaccuguccagccagcagcuggaucagcgcagagcucuccugaauaugaucggaaugacaggcgggucucggggagcccaggcuggcggcgacgggguugugcgcgucugggaugugaagaacgccgaccuucugaauaaccaguucggaaccaugccuucccucacacuggcgugucuuaccaaacaaggccagguggaucugaaugacgucguucaggcccucacggaccuggggcugauuuacaccgcuaaguauccgaacacaagcgaucucgacagacugacccaaucucaucccauccuuaauaugauugauacaaagaaauccagccugaacaucuccggauacaauuuuucucucggcgccgcugugaaggccggggcgugcaugcuggacggaggcaacaugcuugagaccaucaaagugagcccucagacgauggauggcauucugaaguccauccucaaagucaagaaaagccuggggauguucauuucugacacacccggagagcggaacccuuaugaaaauauccuguacaagauuugucucuccggcgauggguggcccuauaucgccagccgcaccucuauuacaggcagagcuugggagaacaccgugguugaccuggaaagcgauggaaagccucagaaagccgggggaaauaacuccaauaagucucuucagagcgcuggcuuuaccgccggccugacauacucccaacucaugacgcugaaagacaccaugcugcagcuugauccgaacgccaagacauggauggacaucgaggggcggcccgaggacccuguggaagucgcucucuaccagcccagcucuggaugcuauauccacuucuuuagagagccuaccgaucugaaacaguucaagcaagacgcgaaguacucccauggcauugaugugacagaccuguuugccgcucagcccgggcucaccagcgccguuaucgaagcccugccgcgcaauauggugauuacgugucagggaucugaugacauccggaaacuucuggagucccagggcagaaaggauauuaaacucaucgacaucgcucugagcaaggucgauucccgcaaauaugaaaacgccgugugggaccaauacaaggaucugugccacaugcauacaggggucgugguugagaagaaaaagcggggcggaaaagaggaaauuaccccucacugugcgcuuauggacugcaucauguucgaugcugccgugucuggcgggcucaauacccugguccugagagccgugcucccccgcgacaugguuuuucggacaagcaccccuaaggugguccuguga

SEQ ID NO: 9249 - RNA, 1710 nt, Artificial Sequence
  derived and/or modified CDS sequence (opt5) from LASV(G2868-SLE-2012;Clade IV)__AIT17329__NP
augagcgccuccaaggagaucaaaucuuuccuguggacccagagccucagacgggaacuguccggcuacugcucuaacauuaaacuucaaguggucaaggacgcucaggcccugcuccacgggcuggauuuuagcgagguuuccaaugugcagcgccuuaugagaaaggaacggcgcgacgauucugaccugaaaagacuccgggaucugaaccagacagugaauaaccuggucgagcucaagagcacgcaacagaaguccauccugcgcgugggaacccuuacaagcgacgaucugcucauucuggcggcugaccuugaaaaacugaagucuaaaguuaucagaaccgagcggccccucuccgccggcguguauauggggaaucugagcucucagcagcuggaucaacgcagagcccuccugaacaugauuggaauguccagcggcaaucagggggcucaggccggacgggacggcgucgugcgcguuugggaugugaagaacgcugagcuucugaauaaccaguucggcacaaugccuucucucacccuggccugucuuacaaaacaagggcaggucgaccugaaugaugcggugcaggcccucaccgaccugggacugaucuacacggcuaaguauccgaacaccuccgaccucgauagacugacacaaagccaucccauccuuaauaugauugacaccaagaaauccucucugaacaucagcggcuacaauuuuucccucggggccgcugugaaggccggagcgugcaugcuggauggcgggaacaugcuugaaacaauuaaagucagcccucagaccauggacggaauccugaagucuauucucaaaguuaagaaagcccugggcauguucaucuccgauacgcccggcgagcggaacccuuaugaaaauauucuguacaagaucugucucagcggggacggauggcccuauaucgcuucucgcacaagcauuaccggcagagccugggagaacacagugguggaucuggaguccgacgggaugccucagaaggcuggaucuagcuccagcaauaaaucucuucaguccgccggcuuugucgccgggcugaccuacagccaacucaugacccugaaggaugcuaugcugcagcuugacccgaacgcgaaaacauggauggauaucgaaggacggcccgaggacccuguggaaauugcccucuaccagcccucuuccggcugcuauauccacuucuuuagagagccuacggaccugaagcaguucaaacaagaugcuaaguacagccauggcauugacguuaccgaucuguuugccgcccagcccgggcucacauccgcugugaucgacgcccugccgcgcaauauggucaucaccugucagggaucugaugacauucggaaacuucuggaaagccagggcagaaaggauaucaagcucauugacaucgcgcuguccaaagcugauucucgcaaguaugagaacgccgugugggaccaauacaaagaucugugccacaugcauacagggguuguggucgagaagaagaaacggggaggcaaggaagagauuaccccucacugugcccuuauggacugcaucauguaugaugcugccgugagcgggggccucaauacguccguccugagagcugugcugccccgcgacaugguuuuccggacaagcaccccuagagugguccucuga

SEQ ID NO: 9250 - RNA, 1710 nt, Artificial Sequence
  derived and/or modified CDS sequence (opt5) from LASV(G2903-SLE-2012;Clade IV)__AIT17333__NP
augagcgccuccaaggagaucaaaucuuuccuguggacccagagccucagacgggaacuguccggcuacugcucuaacauuaagcugcaaguggucaaagacgcucaggcccugcuccacgggcuggauuuuagcgagguuuccaaugugcagcgccuuaugagaaaggaacggcgcgacgauaacgaccugaaaagacuccgggaucugaaucaggcggugaacaaucuggucgagcucaagucuacacaacaaaagagcgugcugcgcguuggaacgcuuaccuccgacgaucugcucauccuggcugccgaccuugaaaaacuuaagagcaaagugacaagaaccgagcggccccucucugccggcgucuauauggggaaccuguccagccagcagcuggaucagcgcagagcucuccugaauaugauuggaaugucuggcgggaaccagggagcccgggcuggccgcgacggcgugguuagagugugggaugucaagaaugccgagcuucugaacaaucaguucgggacaaugccuucccucacccuggcgugucuuacaaaacagggacaaguggaccugaacgaugccgugcaggcucucaccgaccugggccugaucuacacggccaaguauccgaauaccagcgaccucgaucggcugacacagucucaucccauucuuaacaugaucgacaccaagaaauccagccugaauaucuccggguacaacuuuucucucggagcugccgucaaggcgggcgccugcaugcuggaugggggaaacaugcuugaaacaauuaaaguuagcccucaaaccauggacuccauccucaagagcauucugaaagugaagaaagcucugggcauguucaucucugauacgcccggcgagcgcaauccuuaugaaaacauucuguacaagaucugucucuccggggacggauggcccuauauugccagcagaacaucuaucaccggccgggcuugggagaauacaguggucgaucuggagagcgacgggaagccucagaaagccggauccaacaauucuaacaagagccuucaguccgccggcuuugcugcggggcugaccuacagccagcucaugacccugaaagaugccaugcugcaacuugacccgaaugcuaagacauggauggauaucgaaggaagacccgaggacccuguggaaauugcccucuaccagcccucuuccggcugcuauauccacuucuuucgcgagccuacggaccugaaacaguucaagcaggaugccaaguacagccauggcauugacguuaccgaucuguuugcugcccaacccgggcucacaucugcggugaucgacgcucugccgcggaacauggucauuaccugucagggauccgaugacaucagaaaacuucuggaaagccagggccgcaaggauaucaaacucauugacaucgcccuguccaagacagauucucggaaauaugagaaugccgugugggaccaguacaaggaucugugccacaugcauaccgggauuguuguggagaagaaaaagagaggaggcaaagaagagaucacgccucacugugcucuuauggacugcauuauguucgaugccgcugucagcgggggccucaacacauccgugcugcgcgccguccugccccgggacaugguguuuagaaccucuaccccucgcguugugcucuga

SEQ ID NO: 9251 - RNA, 1710 nt, Artificial Sequence
  derived and/or modified CDS sequence (opt5) from LASV(G2906-SLE-2012;Clade IV)__AIT17335__NP
augagcgccuccaaggagaucaaaucuuuccuguggacccagagccucagacgggaacuguccggcuacugcucuaacauuaaacuucaaguggucaaagacgcucaggcccugcuccacgggcuggauuuuagcgagguuuccaaugugcagcgccuuaugagaaaggaacggcgcgacgauucugaccugaaaagacuccgggaucugaaccaggcggugaauaaccuggucgagcucaagagcacacaacagaaguccauccugcgcgugggaacgcuuaccagcgacgaucugcucauucuggcugccgaccuugaaaaacugaagucuaaaguuacaagaaccgagcggccccucuccgccggcguguauauggggaaucugagcucucagcagcuggaucaacgcagagcucuccuguccaugaucggaaugagcucuggcguccagggggcccgggcuggacgcgacggcgugguuagagugugggaugucaagaacgccgagcuucugaauaaccaguucggcacaaugccuucccucacccuggcgugucuuacaaaacaggggcaaguggaccugaaugaugugguccaggcccucaccgaccugggacugauuuacacggcuaaguauccgaacaccagcgaccucgaucggcugacacagucccaucccauccuuaauaugaucgacaccaagaaaucuagccugaacauuuccggcuacaauuuuagccucggggccgcuguuaaggccggagcgugcaugcuggauggcgggaacaugcuugaaacaaucaaagugucuccucaaaccauggacggcauucugaaguccauccucaaagugaagaaagcccugggaauguucauuagcgagacgcccggcgaacgcaauccuuaugagaacauccuguacaagauuugucucucuggggauggauggcccuauaucgcuagcagaacauccaucaccggccgggccugggagaacacagucguggaccuggaaucugaugggaagccucagaaagcuggaagcaauaacuccaauaagagccuucagucuaccggcuuugccgccgggcugaccuacucccagcucaugacacugaaagacgcuaugcugcaacuugauccgaacgcgaagacguggauggacauugagggaagacccgaagauccuguugagguggcccucuaccagcccagcucuggcugcuauauccacuucuuucgcgaaccuaccgaccugaaacaguucaagcaggacgcuaaguacucccauggcauugaugucacagaccuguuugccgcccaacccgggcucaccagcgcugugaucgaugcccugccgcggaauaugguuauuacaugucagggauccgacgauaucaaaaagcugcuugagucucagggcagaaaagacaucaagcucauugauaucgcgcugagcaaaaccgacucccgcaaguaugagaacgcugugugggaucaguacaaggaccugugccacaugcauacgggggucguggucgaaaagaagaaacggggaggcaaggaggaaauuacaccucacugugcccuuauggauugcaucauguucgacgccgcugugucugggggccucaauaccagcguucugagagccgugcugccccgcgauauggucuuucggaccuccacaccuagagugguucucuga

SEQ ID NO: 9252 - RNA, 1710 nt, Artificial Sequence
  derived and/or modified CDS sequence (opt5) from LASV(G2944-SLE-2012;Clade IV)__AIT17341__NP
augagcgccuccaaggagaucaaaucuuuccuguggacccagagccucagacgggaacuguccggcuacugcucuaacauuaagcugcaaguggucaaagacgcucaggcccugcuccacgggcuggauuuuagcgagguuuccaaugugcagcgccuuaugagaaaggaacggcgcgacgauaacgaccugaaaagacuccgggaucugaaucaggcggugaacaaucuggucgagcucaagucuacacaacaaaagagcauccugcgcgugggaacgcuuaccuccgacgaucugcucauucuggcugccgaccuugaaaaacuuaagagcaaaguuacaagaaccgagcggccccucucugccggcguguauauggggaaccuguccagccagcagcuggaucagcgcagagcucuccugaauaugaucggaaugucuggcgggaaccagggagcccgggcuggccgcgacggcgucgugagaguuugggaugugaagaaugccgagcuucugaacaaucaguucgggacaaugccuucccucacccuggcgugucuuacaaaacagggacaagucgaccugaacgaugccgugcaggcucucaccgaccugggccugauuuacacggccaaguauccgaauaccagcgaccucgaucggcugacacagucucaucccauccuuaacaugaucgacaccaagaaauccagccugaauauuuccggguacaacuuuucucucggagcugccgugaaggcgggcgccugcaugcuggaugggggaaacaugcuugaaacaaucaaagucagcccucaaaccauggacggcauucugaaguccauccucaaaguuaagaaagcucugggcauguucauuagcgaugcccccggggagcgcaauccuuaugaaaacauccuguacaagauuugucucucuggagacggcuggcccuauaucgcuuccagaacgagcaucacagggcgggccugggagaauaccgugguggaucuggagucugacggaaagccucagaaagccggcagcaacggguccaauaagucucuucagagcgcuggauuuacagcgggccugaccuacucccagcucaugacccugaaagaugccaugcugcaacuugacccgaacgcuaagacauggauggauauugaaggcagacccgaggacccugucgaaaucgcccucuaccagcccagcucugggugcuauauucacuucuuucgcgagccuacggaccugaaacaguucaagcaggaugccaaguacucccauggaaucgacgugaccgaucuguuugcugcccaacccggccucacaagcgcgguuauugacgcucugccgcggaauauggugaucaccugucaggggucugaugacaucagaaaacuuuucgaaucccagggacgcaaggauauuaaacugaucgacauugcccucagcaaggccgauucccggaaauaugagaacgcugucugggaccaguacaaggaucugugccacaugcauacaggcgugguuguggagaagaaaaagagagggggcaaagaagagaucaccccucacugugcccugauggacugcauuauguuugaugcugccgucucuggaggccuuaauacgagcgugcuccgcgcgguccugccccgggacaugguguucagaacauccaccccucgcguugugcuguga

SEQ ID NO: 9253 - RNA, 1710 nt, Artificial Sequence
  derived and/or modified CDS sequence (opt5) from LASV(G3010-SLE-2013;Clade IV)__AIT17345__NP
augagcgccuccaaggagaucaaaucuuuccuguggacccagagccucagacgggaacuguccggcuacugcucuaacauuaaacuucaaguggucaaagacgcucaggcccugcuccacgggcuggauuuuagcgagguuuccaaugugcagcgccuuaugagaaaggaacggcgcgacgauaacgaccugaaaagacuccgggaucugaaucaggcggugaacaaucuggucgagcucaagucuacacaacaaaagagcauccugcgcgugggaacgcuuaccuccgacgaucugcucauucuggcugccgaccuugaaaaacuuaagagcaaaguuacaagaaccgagcggccccucucugccggcguguauauggggaaccuguccagccagcagcuggaucagcgcagagcucuccugucuaugaucggaauguccagcggcguccagggggcccgggcuggacgcgacggcgugguuagagugugggaugucaagaaugccgagcuucugaacaaucaguucggcacaaugccuucucucacccuggcgugucuuacaaaacaggggcaaguggaccugaacgaugugguccaggcccucaccgaccugggacugauuuacacggcuaaguauccgaauaccuccgaccucgaucggcugacacagagccaucccauccuuaacaugaucgacaccaagaaauccucucugaauauuagcggcuacaacuuuucccucggggccgcuguuaaggccggagcgugcaugcuggauggcgggaauaugcuugaaacaaucaaagugagcccucaaaccauggacggcauucugaagucuauccucaaagugaagaaagcccugggaauguucauuuccgagacgcccggcgaacgcaacccuuaugagaacauccuguacaagauuugucucagcggggauggauggcccuauaucgcuucuagaacaagcaucaccggccgggccugggagaauacagucguggaccuggaauccgaugggaagccucagaaagcuggaucuaacaauagcaacaagucccuucagagcgccggcuuuaccgccgggcugaccuacucucagcucaugacacugaaagacgcuaugcugcaacuugauccgaaugcgaagacguggauggacauugagggaagacccgaagauccuguugagguggcccucuaccagcccuccagcggcugcuauauccacuucuuucgcgaaccuaccgaccugaaacaguucaagcaggacgcuaaguacucucauggcauugaugucacagaccuguuugccgcccaacccgggcucaccuccgcugugaucgaugcccugccgcggaacaugguuauuacaugucagggaagcgacgauaucaaaaagcugcuggagucccagggcagaaaagacaucaagcucauugauaucgcgcugucuaaaaccgacagccgcaaguaugagaaugcugugugggaucaguacaaggaccugugccacaugcauacgggggucguggucgaaaagaagaaacggggaggcaaggaggaaauuacaccucacugugcccuuauggauugcaucauguucgacgccgcuguguccgggggccucaacaccucuguucugagagccgugcugccccgcgauauggucuuucggaccagcacaccuagagugguucucuga

SEQ ID NO: 9254 - RNA, 1710 nt, Artificial Sequence
  derived and/or modified CDS sequence (opt5) from LASV(G3016-SLE-2013;Clade IV)__AIT17349__NP
augagcgccuccaaggagaucaaaucuuuccuguggacccagagccucagacgggaacuguccggcuacugcucuaacauuaaacuucaaguggucaaggacgcucaggcccugcuccacgggcuggauuuuagcgagguuuccaaugugcagcgccuuaugagaaaggaacggcgcgacgauucugaccugaaaagacuccgggaucugaaccaggcggugaauaaccuggucgagcucaagagcacacaacagaaguccauccugcgcgugggaacgcuuaccagcgacgaucugcucauucuggcugccgaccuugaaaaacugaagucuaaaguuacaagaaccgagcggccccucuccgccggcguguauauggggaaucugagcucucagcagcuggaucaacgcagagcucuccugaacaugcuuggaauguccggcagcaaucagggggcccgggcuggacgcgacggcgucgugagaguuugggaugugaagaacgccgagcugcucaauaaccaguucggcacaaugccuucucugacccuugcgugucugacaaaacaggggcaagucgaccucaaugaugccgugcaggcucugaccgaccugggacucaucuacacggccaaguauccgaacaccuccgaccuggaucggcuuacacagagccaucccauucugaauaugaucgacaccaagaaauccucucucaacaucagcggcuacaauuuuucccugggggcugccgugaaggcgggagccugcaugcuugauggcgggaacaugcuggaaacaauuaaagucagcccucaaaccauggacggaauccucaagucuauucugaaaguuaagaaagcucugggcauguucaucuccgauacgcccggcgagcgcaacccuuaugaaaauauucucuacaagaucugucugagcggggacggauggcccuauauugccucuagaacaagcaucaccggccgggcuugggagaacacagugguggaucuugaguccgacgaaaagccucagaaagccgggucuaauagcuccaacaagagccugcagucugccggauuuaccgcuggccucaccuacucccagcugaugacacugaaagaugcgaugcuucaacucgacccgaaugccaagacguggauggauaucgaggggagacccgaagacccugucgagauugcucuguaccagcccagcucuggaugcuauauccacuucuuucgcgaaccuaccgaccugaaacaguucaagcaggaugccaaguacucccauggcauugacgugacagaucucuuugccgcucaacccggccugaccagcgccguuaucgacgcgcuuccgcggaacauggugauuacaugucagggguccgaugacaucagaaaacugcucgagucucagggacgcaaggauaucaaacugauugacaucgcucugagcaagaccgauucccggaaauaugagaaugccgucugggaccaguacaaggaucuuugccacaugcauacgggcauugugguugaaaagaaaaagagagggggaaaagaggaaaucacaccucacugugcccucauggacugcauuauguucgaugcugccgugucuggcgggcugaacgcuagcguccugcgcgccgugcucccccgggacauggucuuuagaaccuccaccccucgcgugguucuguga

SEQ ID NO: 9255 - RNA, 1710 nt, Artificial Sequence
  derived and/or modified CDS sequence (opt5) from LASV(G3034-SLE-2013;Clade IV)__AIT17351__NP
augagcgccuccaaggagaucaaaucuuuccuguggacccagagccucagacgggaacuguccggcuacugcucuaacauuaagcugcaaguggucaaagacgcucaggcccugcuccacgggcuggauuuuagcgagguuuccaaugugcagcgccuuaugagaaagcagcggcgcgacgauggagaccugaaaagacuccgggaucugaaccaagcggugaauaaccuggucgaacucaagucuacacagcaaaagagcgugcugcgcguuggcacgcuuaccuccgacgaucugcucauccuggcugccgaccuugagaaacuuaagagcaaagugauuagaacagaacggccccucucugccggggucuauaugggaaaucuguccagccagcagcuggagcagcgcagagcucuccugaacaugaucggcaugucuuccgggaaucagggagcccggaccggcaaggauggcgugguucgcauuugggacgugaaaaacgcugaucuucugaauaaccaguucgggacaaugccuagccucacccuggccugucuuacaaagcaaggacaggucgaccugaaugauguggugcaggcgcucaccgaccugggccugaucuacacggccaaguauccgaacaccucugaccucgauagacugacacaaucccaucccauccuuaauauggucgacaccagcaaauccucucugaacauuagcggguacaauuuuucccucggagcugccguuaaggcuggcgccugcaugcuggaugggggaaacaugcuugagacaaucaaagugagcccucagaccauggacggcauucugaagucuauccucaaagugaagaaaucccugggcauguucgucagcgauacgcccggggaacggaacccuuaugagaauauucuguacaagaucugucucucuggagacggcuggcccuauauugcgagccgcacauccaucaccgggagagccugggaaaacacagugguugaucuggagucuaauggaaagccucagaaagcuggcagcaacaauuccaacaagagccuucagucuaccggguuuaccgccggacugacauacucccaacucaugacgcugaaagacgcuaugcugcagcuugauccgaaugccaagaccuggauggacaucgagggccggcccgaagauccuguggagauugcccucuaccagcccagcucuggcugcuauauccacuucuuuagagaaccuacagaccugaaacaguucaagcaagacgcuaaguacucccaugggauugaugucaccgaccuguuugcggcccagcccggacucacaagcgcugugaucgauacccugccgcgcaacaugguuauuacgugucagggcuccgacgauauccggaaacuucuggagucucaggggagaaaggacaucaaacucauugauaucgcccugagcaagauugacucccgcaaauaugaaaaugccgugugggaucaauacaaggaccugugccacaugcauacaggagucguggucgagaagaaaaagcggggcgggaaagaggaaaucaccccucacugugcucuuauggauugcauuauguucgacgccgcggugucuggcggacucaacgcuagcguucugagagccgugcugccccgcgauauggucuuucggaccuccacaccuagagugguucucuga

SEQ ID NO: 9256 - RNA, 1710 nt, Artificial Sequence
  derived and/or modified CDS sequence (opt5) from LASV(G3110-SLE-2013;Clade IV)__AIT17361__NP
augagcgccuccaaggagaucaaaucuuuccuguggacccagagccucagacgggaacuguccggcuacugcucuaacauuaagcugcaaguggucaaagacgcucaggcccugcuccacgggcuggauuuuagcgagguuuccaaugugcagcgccuuaugagaaaggaacggcgcgacgauucugaccugaaaagacuccgggaucugaaccaggcggugaauaaccuggucgagcucaagagcacacaacagaaguccgugcugcgcguuggaacgcuuaccagcgacgaucugcucgugcuggcugccgaccuugaaaaacugaagucuaaagucacaagaaccgagcggccccucuccgccggcguguauauggggaaucugagcucucagcagcuggaucaacgcagagcucuccugaacaugaucggaauguccggcgggaaucagggagcccgggcuggccgcgacggcguugugagaauuugggaugucaagaacgccgagcuucugaauaaccaguucgggacaaugccuagccucacccuggcgugucuuacaaaacagggacaaguggaccugaaugaugugguccaggcccucaccgaccugggccugaucuacacggcuaaguauccgaacaccucugaccucgaucggcugacacagucccaucccauucuuaauaugaucgacaccaagaaaagcucccugaacaucucuggguacaauuuuagccucggagccgcuguuaaggccggcgcgugcaugcuggaugggggaaacaugcuugaaacaauuaaaguguccccucaaaccauggacggcauccuuaagagcauucucaaagugaagaaagcccugggcauguucaucucugauacgcccggggagcgcaacccuuaugaaaauauucuguacaagaucugucucuccggagacggcuggcccuauauugcuagcagaacaucuaucaccgggcgggccugggagaacacaaucgucgaucuggagagcgacggaaagccucagaaaaccaauaacaccaauuccaacaagucucuucagagcgcuggcuuugccgccgggcugacauacucccagcucaugacgcugaaagaugcuaugcugcaacuugacccgaaugcgaagaccuggauggauauugaaggaagacccgaggacccuguggaaaucgcccucuaccagcccagcucuggcugcuauauucacuucuuucgcgagccuacagaccugaaacaguucaagcaggaugcuaaguacucccauggcaucgacguuaccgaucuguuugccgcccaacccgggcucacaagcgcugugauugacacccugccgcggaacauggucaucacgugucagggaucugaagauaucagacgccuucuggagucccagggccggaaagacauuaagcucaucgauauugcccugagcaaaacagacuccagaaaguaugagaaugcggugugggaucaguacaaagaccugugccacaugcauaccgggguuguggucgaaaagaagaaaaagggaggcaaagaggaaaucaccccucacugugcucuuauggauugcauuauguucgacgccgccgugucugggggccucaacacaagcguccugcgcgcugugcugccccgggauaugguuuuuagaaccuccacaccucgcgugguccucuga

SEQ ID NO: 9257 - RNA, 1710 nt, Artificial Sequence
  derived and/or modified CDS sequence (opt5) from LASV(G3148-SLE-2013;Clade IV)__AIT17365__NP
augagcgccuccaaggagaucaaaucuuuccuguggacccagagccucagacgggaacuguccggcuacugcucuaacauuaagcugcaaguggucaaagacgcucaggcccugcuccacgggcuggauuuuagcgagguuuccaaugugcagcgccuuaugagaaaggaacggcgcgacgauaacgaccugaaaagacuccgggaucugaaucaggcggugaacaaucuggucgagcucaagucuacacaacaaaagagcauccugcgcgugggaacgcuuaccuccgacgaucugcucauucuggcugccgaccuugaaaaacuuaagagcaaaguuacaagaaccgagcggccccucucugccggcguguauauggggaaccuguccagccagcagcuggaucagcgcagagcucuccugaauaugaucggaaugucuggcuccaaccagggggcccaggcuggacgggacggcgucgugcgcguuugggaugugaagaaugccgagcuucugaacaaucaguucggcacaaugccuagccucacccuggcgugucuuacaaaacaagggcaggucgaccugaacgaugccgugcaggcucucaccgaccugggacugauuuacacggccaaguauccgaauaccucugaccucgauagacugacacaaucccaucccauccuuaacaugaucgacaccaagaaaagcucccugaauauuucuggcuacaacuuuagccucggggcugccgugaaggcgggagccugcaugcuggauggcgggaacaugcuugaaacaaucaaagucuccccucagaccauggacggcauucucaagagcauccugaaaguuaagaaagcucugggaauguucauuucugaugcccccggcgagcggaauccuuaugaaaacauccuguacaagauuugucucuccggggacggauggcccuauaucgcuagccgcacgucuaucacaggcagagccugggagaauaccgugguggaucuggagagcgacgggaagccucagaaagccggauccaacggcucuaauaagagccuucaguccgcuggguuuacagcgggacugaccuacagccaacucaugacccugaaagaugccaugcugcagcuugacccgaacgcuaagacauggauggauauugaaggccggcccgaggacccugucgaaaucgcccucuaccagcccucuuccggcugcuauauucacuucuuuagagagccuacggaccugaaacaguucaagcaagaugccaaguacagccaugggaucgacgugaccgaucuguuugcugcccagcccggacucacaucugcgguuauugacgcucugccgcgcaauauggugaucaccugucagggcuccgaugacauccggaaacuuuucgaaagccaggggagaaaggauauuaaacugaucgacauugcccucuccaagacagauucucgcaaauaugagaacgccgucugggaccaauacaaggaucugugccacaugcauaccggaaucgugguugagaagaaaaagcggggcgggaaagaagagauuacgccucacugugcucugauggacugcaucauguuugaugccgcugugagcggcggacuuaauacauccguccucagagccgugcugccccgcgacauggucuuccggaccucuaccccuagagugguucuguga

SEQ ID NO: 9258 - RNA, 1710 nt, Artificial Sequence
  derived and/or modified CDS sequence (opt5) from LASV(G3151-SLE-2013;Clade IV)__AIT17369__NP
augagcgccuccaaggagaucaaaucuuuccuguggacccagagccucagacgggaacuguccggcuacugcucuaacauuaaacuucaaguggucaaggacgcucaggcccugcuccacgggcuggauuuuagcgagguuuccaaugugcagcgccuuaugagaaaggaacggcgcgacgauucugaccugaaaagacuccgggaucugaaccaggcggugaauaaccuggucgagcucaagagcacacaacagaaguccgugcugcgcguuggaacgcuuaccagcgacgaucugcucgugcuggcugccgaccuugaaaaacugaagucuaaagucacaagaaccgagcggccccucuccgccggcguguauauggggaaucugagcucucagcagcuggaucaacgcagagcucuccuguccaugaucggaaugagcggcgggaaccagggagcccgggcuggccgcgacggcguugugagaauuugggaugucaagaaugccgagcuucugaacaaucaguucgggacaaugccuucucucacccuggcgugucuuacaaaacagggacaaguggaccugaacgaugugguccaggcccucaccgaccugggccugaucuacacggcuaaguauccgaauaccuccgaccucgaucggcugacacagagccaucccauucuuaacaugaucgacaccaagaaauccucucugaauaucagcggguacaacuuuucccucggagccgcuguuaaggccggcgcgugcaugcuggaugggggaaauaugcuugaaacaauuaaagugagcccucaaaccauggacggcauccugaagucuauucucaaagugaagaaagcccugggcauguucaucuccgauacgcccggggagcgcaacccuuaugaaaacauucuguacaagaucugucucagcggagacggcuggcccuauauugcuucuagaacaagcaucaccgggcgggccugggagaauacaaucgucgaucuggaguccgacggaaagccucagaaaaccucuaacaccaauagcaacaagucccuucagagcgcuggcuuugccgccgggcugacauacucucagcucaugacgcugaaagaugcuaugcugcaacuugacccgaaugcgaagaccuggauggauauugaaggaagacccgaggacccuguggaaaucgcccucuaccagcccuccagcggcugcuauauucacuucuuucgcgagccuacagaccugaaacaguucaagcaggaugcuaaguacucucauggcaucgacguuaccgaucuguuugccgcccaacccgggcucacauccgcugugauugacgcccugccgcggaacauggucaucaccugucagggaagcgaagauaucagaaaacuucuggagucccagggccgcaaggacauuaaacucaucgauauugcgcugucuaagacggacagccggaaauaugagaaugcugugugggaucaguacaaggaccugugccacaugcauacagggguuguggucgaaaagaaaaagaaaggaggcaaggaggaaaucaccccucacugugcccuuauggauugcauuauguucgacgccgcuguguccgggggccucaacaccucuguccugagagccgugcugccccgcgauaugguuuuucggacaagcaccccuagagugguccucuga

SEQ ID NO: 9259 - RNA, 1710 nt, Artificial Sequence
  derived and/or modified CDS sequence (opt5) from LASV(G3157-SLE-2013;Clade IV)__AIT17371__NP
augagcgccuccaaggagaucaaaucuuuccuguggacccagagccucagacgggaacuguccggcuacugcucuaacauuaagcugcaaguggucaaagacgcucaggcccugcuccacgggcuggauuuuagcgagguuuccaaugugcagcgccuuaugagaaaggaacggcgcgacgauaacgaccugaaaagacuccgggaucugaaucaggcggugaacaaucuggucgagcucaagucuacacaacaaaagagcauccugcgcgugggaacgcuuaccuccgacgaucugcucauucuggcugccgaccuugaaaaacuuaagagcaaaguuacaagaaccgagcggccccucucugccggcguguauauggggaaccuguccagccagcagcuggaucagcgcagagcucuccugaauaugaucggaaugucuggcuccaaccagggggcccaggcuggacgggacggcgucgugcgcguuugggaugugaagaaugccgagcuucugaacaaucaguucggcacaaugccuagccucacccuggcgugucuuacaaaacaagggcaggucgaccugaacgaugccgugcaggcucucaccgaccugggacugauuuacacggccaaguauccgaauaccucugaccucgauagacugacacaaucccaucccauccuuaacaugaucgacaccaagaaaagcucccugaauauuucuggcuacaacuuuagccucggggcugccgugaaggcgggagccugcaugcuggauggcgggaacaugcuugaaacaaucaaagucuccccucagaccauggacggcauucucaagagcauccugaaaguuaagaaagcucugggaauguucauuucugaugcccccggcgagcggaauccuuaugaaaacauccuguacaagauuugucucuccggggacggauggcccuauaucgcuagccgcacgucuaucacaggcagagccugggagaauaccgugguggaucuggagagcgacgggaagccucagaaagccggauccaacucuagcaauaagucccuucagagcgcuggcuuuacagcggggcugaccuacucucaacucaugacccugaaagaugccaugcugcagcuugacccgaacgcuaagacauggauggauauugaaggacggcccgaggacccugucgaaaucgcccucuaccagcccuccagcggcugcuauauucacuucuuuagagagccuacggaccugaaacaguucaagcaagaugccaaguacucucauggcaucgacgugaccgaucuguuugcugcccagcccgggcucacauccgcgguuauugacgcucugccgcgcaauauggugaucaccugucagggaagcgaugacauccggaaacuuuucgaaucccagggcagaaaggauauuaaacugaucgacauugcccucucuaagacagauagccgcaaauaugagaacgccgucugggaccaauacaaggaucugugccacaugcauaccgggaucgugguugagaagaaaaagcggggaggcaaagaagagauuacgccucacugugcucugauggacugcaucauguuugaugccgcuguguccgggggccuuaauacaucuguccucagagccgugcugccccgcgacauggucuuccggaccagcaccccuagagugguucuguga

SEQ ID NO: 9260 - RNA, 1710 nt, Artificial Sequence
  derived and/or modified CDS sequence (opt5) from LASV(G3206-SLE-2013;Clade IV)__AIT17379__NP
augagcgccuccaaggagaucaaaucuuuccuguggacccagagccucagacgggaacuguccggcuacugcucuaacauuaaacuucaaguggucaaggacgcucaggcccugcuccacgggcuggauuuuagcgagguuuccaaugugcagcgccuuaugagaaaggaacggcgcgacgauucugaccugaaaagacuccgggaucugaaccaggcggugaauaaccuggucgagcucaagagcacacaacagaaguccgugcugcgcguuggaacgcuuaccagcgacgaucugcucauccuggcugccgaccuugaaaaacugaagucuaaagugacaagaaccgagcggccccucuccgccggcgucuauauggggaaucugagcucucagcagcuggaucaacgcagagcucuccugaacaugauuggaauguccagcggcaaucggggagcccaggcuggacgcgacggcgugguuagagugugggaugucaagaacgccgagcuucugaauaaccaguucggcacaaugccuucucucacccuggcgugucuuacaaaacaggggcaaguggaccugaaugaugccgugcaggcucucaccgaccugggacugaucuacacggccaaguauccgaacaccuccgaccucgaucggcugacacagagccaucccauucuuaauauggucgacaccaagaaauccucucugaacaucagcggcuacaauuuuucccucggggcugccguuaaggcgggagccugcaugcuggauggcgggaacaugcuugaaacaaucaaagugagcccucaaaccauggacgggauucugaagucuauccucaaagugaagaaagcucugggcauguucauuuccgauacgcccggcgagcgcaacccuuaugaaaauauccuguacaagauuugucucagcggggacggauggcccuauaucgccucuagaacaagcauuaccggccgggcuugggagaacacagucguggaucuggaguccgacgggaagccucagaaagccggaucuaauaacagcaauaagucccuucagagcgccggcuuugcugcggggcugaccuacucucagcucaugacccugaaagaugccaugcugcaacuugacccgaacgcuaagacauggauggauaucgaaggaagacccgaggacccuguugaaaucgcccucuaccagcccuccagcggcugcuauauucacuucuuucgcgagccuacggaccugaaacaguucaagcaggaugccaaguacucucauggcaucgacgugaccgaucuguuugcugcccaacccgggcucacauccgcggucauugacgcucugccgcggaauauggugaucaccugucagggaagcgaugacauuagaaaacuucuggaaucccagggccgcaaggauaucaaacucaucgacauugcccugucuaagacagauagccggaaauaugagaacgccguuugggaccaguacaaggaucugugccacaugcauaccgggaucguggucgagaagaaaaagagaggaggcaaagaagagauuacgccucacugugcucuuauggacugcaucauguucgaugccgcuguguccgggggccucaauacaucuguccugcgcgccgugcugccccgggacaugguuuuuagaaccagcaccccucgcgugguccucuga

SEQ ID NO: 9261 - RNA, 1710 nt, Artificial Sequence
  derived and/or modified CDS sequence (opt5) from LASV(G3234-SLE-2013;Clade IV)__AIT17389__NP
augagcgccuccaaggagaucaaaucuuuccuguggacccagagccucagacgggaacuguccggcuacugcucuaacauuaagcugcaaguggucaaagacgcucaggcccugcuccacgggcuggauuuuagcgagguuuccaaugugcagcgccuuaugagaaagcagcggcgcgacgauggagaccugaaaagacuccgggaucugaaccaagcggugaauaaccuggucgaacucaagucuacacagcaaaagagcgugcugcgcguuggcacgcuuaccuccgacgaucugcucauccuggcugccgaccuugagaaacuuaagagcaaagugacaagaaccgaacggccccucucugccggggucuauaugggaaaucuguccagccagcagcuggaucagcgcagagcucuccugaacaugauuggcaugucugggggaaaucagggcgcccggacaggcaaggacggggugguucgcaucugggaugugaaaaacgcugaccuucugaauaaccaguucggaaccaugccuucccucacacuggccugucuuaccaagcaaggccaggucgaucugaaugacguggugcaggcgcucacggaccuggggcugauuuacaccgccaaguauccgaacacaagcgaucucgacagacugacccaaucucaucccauccuuaauaugaucgauacauccaaaagcucccugaacauuucuggauacaauuuuagccucggcgcugccgucaaggcuggggccugcaugcuggacggaggcaacaugcuugagaccaucaaaguuuccccucagacgauggauggcauucucaagagcauccugaaagugaagaaaucucuggggauguucauuuccgacacacccggagagcggaacccuuaugaaaauauccuguacaagauuugucucagcggcgauggguggcccuauaucgcgucucgcaccagcaucacagggagagccugggagaacaccguggucgaccuggaauccgauggcaagccucagaaagcugggucuaauaacagcaauaagucccuucagagcaccggauuuacagccggccugacguacucucaacucaugacccugaaagacgcuaugcugcagcuugauccgaacgccaagacauggauggacauugagggccggcccgaggacccuguggaaaucgcccucuaccagcccuccagcgggugcuauauucacuucuuuagagagccuaccgaucugaaacaguucaagcaagacgcuaaguacucucauggaaucgauguuacagaccuguuugcggcccagcccggccucaccuccgcugugauugauacgcugccgcgcaauauggucaucacaugucaggggagcgacgauauccggaaacuucuggaaucccagggaagaaaggacauuaaacucaucgauauugcccugucuaagaccgacagccgcaaauaugagaacgccgugugggaucaauacaaggaccugugccacaugcauaccggcguuguggucgaaaagaaaaagcggggaggcaaagaggagaucacaccucacugugcucuuauggauugcauuauguucgacgccgcgguguccggaggccucaaugucucugugcugagagcuguucugccccgcgacaugguguuucggaccagcacaccuagagucgugcucuga

SEQ ID NO: 9262 - RNA, 1710 nt, Artificial Sequence
  derived and/or modified CDS sequence (opt5) from LASV(G3278-SLE-2013;Clade IV)__AIT17399__NP
augagcgccuccaaggagaucaaaucuuuccuguggacccagagccucagacgggaacuguccggcuacugcucuaacauuaagcugcaaguggucaaagacgcucaggcccugcuccacgggcuggauuuuagcgagguuuccaaugugcagcgccuuaugagaaagcagcggcgcgacgauucugaccugaaaagacuccgggaucugaaccaagcggugaauaaccuggucgaacucaagagcacacagcagaaguccgugcugcgcguuggaacgcuuaccagcgacgaucugcucgugcuggcugccgaccuugagaaacugaagucuaaagucaucagaacagaacggccccucuccagcggcguguauauggggaaucugucuucccagcaacuggaucagcgcagagcccuccugaacaugauuggaaugagcggcgggaaucagggagcucagguuggccgggacggcgugguccgcgugugggaugugaagaacgccgaccuucugaauaaccaauucgggaccaugccuucucucacacuggcuugucuuaccaaacagggacaggucgaucugaaugacguugugcaagcccucacagaccugggccugaucuacaccgcgaaguauccgaacacguccgaucucgacagacuggcccagagccaucccauucuuaauaugaucgauaccaagaaauccucucugaacaucagcggguacaauuuuucccucggagcugccgugaaggcuggcgccugcaugcuggacgggggaaacaugcuugagacaauuaaagucaccccucagacaauggauggcauccuuaagagcauucucaaagugaagaaagcgcugggcauguucaucucugagacccccggggaacggaacccuuaugagaauauucuguacaagaucugucucuccggagacggcuggcccuauauugccagccgcacgucuaucacagggagagcuugggaaaacaccguuguggaucuggagagcgacggaaagccucagaaagccggcaauaacaauuccaacaagucucuucaaagcgcuggguuuacagccggacugaccuacucccagcucaugacccugaaagauagcaugcugcagcuugacccgaaugccaagacauggauggauaucgagggccggcccgaagacccugucgagguggcucucuaccagcccucuuccggcugcuauauucacuucuuuagagaaccuacggaccugaaacaauucaagcaggaugcgaaguacagccaugggaucgacguuaccgaucuguuugccacacagcccggacucaccucugcugugauugaggcccugccgcgcaacauggucaucacaugucagggcuccgacgauauucggaaacuucuggaaagccaagggagaaaggacaucaaacucaucgauauugcccugaauaagaccgacucccgcaaauaugagaacgcugugugggaucaguacaaggaccugugccacaugcauacgggagucgugguugagaagaaaaagcggggcgggaaagaagagaucacaccucacugugcccuuauggauugcauuauguucgacgcggcugugucuggcggacucaagacccuggcccugagagccguccucccccgcgauaugguguuucggaccagcacaccuaaaguugugcuguga

SEQ ID NO: 9263 - RNA, 1710 nt, Artificial Sequence
  derived and/or modified CDS sequence (opt5) from LASV(G502-SLE-2009;Clade IV)__AIT17127__NP
augagcgccuccaaggagaucaaaucuuuccuguggacccagagccucagacgggaacuguccggcuacugcucuaacauuaagcugcaaguggucaaagacgcucaggcccugcuccacgggcuggauuuuagcgagguuuccaaugugcagcgccuuaugagaaaggaacggcgcgacgauaacgaccugaaaagacuccgggaucugaaucaggcggugaacaaucuggucgagcucaagucuacacaacaaaagagcauccugcgcgugggaacgcuuaccuccgacgaucugcucauucuggcugccgaccuugaaaaacuuaagagcaaaguuaucagaacagagcggccccucucugccggcguguauauggggaaccuguccagccagcagcuggaucagcgcagagcucuccugucuaugauuggaauguccggcgggaaucagggaguccgggccggcaaggacggcgugguucgcgugugggaugucaaaaacgcugagcuucugaauaaccaguucgggaccaugccuagccucacacuggccugucuuaccaagcagggacaaguggaccugaaugaugcggugcaggcccucacagaccugggccugaucuacaccgcuaaguauccgaacacgucugaccucgauagacugacccagucccaucccauccuuaauaugauugacaccaaaaagagcucccugaacaucucuggguacaauuuuagccucggagccgcugucaaagccggcgcgugcaugcuggaugggggaaacaugcuugaaacaauuaagguuuccccucaaacaauggacggcauccugaaaagcauucucaaggugaaaaaggcccugggcauguucaucucugauacccccggggagcggaacccuuaugaaaauauucuguacaagaucugucucuccggagacggcuggcccuauaucgcuagccgcacgucuauuacagggagagccugggagaacaccguggucgaucuggagagcgacggaaaaccucagaaggcuggcuccaauaacucuaauaaaagccuucaguccgccggguuuacagccggacugaccuacagccagcucaugacccugaaggaugcuaugcugcaacuugacccgaacacaaaaacguggauggauaucgaaggccggcccgaggacccuguggaaauugcgcucuaccagcccucuuccggcugcuauauccacuucuuuagagagccuaccgaccugaagcaguucaagcaggaugccaaauacagccaugggauugacguuacagaucuguuugcugcccaacccggacucaccucugccgugaucgacgcucugccgcgcaauauggucaucacaugucagggcuccgaugacauucggaaacuucuggaaagccaggggagaaaggauaucaagcucauugacaucgcccugaacaaaaccgauucccgcaaguaugagaaugcggugugggaccaguacaaggaucugugccacaugcauacgggaguuguggucgagaaaaagaaacggggcgggaaggaagagauuacaccucacugugcucuuauggacugcaucauguucgaugccgccgugucuggcggacucaacaccagcguccugagagcugugcugccccgcgacaugguuuuucggaccuccacaccuagagugguccucuga

SEQ ID NO: 9264 - RNA, 1710 nt, Artificial Sequence
  derived and/or modified CDS sequence (opt5) from LASV(G503-SLE-2009;Clade IV)__AIT17131__NP
augagcgccuccaaggagaucaaaucuuuccuguggacccagagccucagacgggaacuguccggcuacugcucuaacauuaagcugcaaguggucaaagacgcucaggcccugcuccacgggcuggauuuuagcgagguuuccaaugugcagcgccuuaugagaaaggaacggcgcgacgauaacgaccugaaaagacuccgggaucugaaucaggcggugaacaaucuggucgagcucaagucuacacaacaaaagagcauccugcgcgugggaacgcuuuccagcgacgaucugcucguucuggcugccgaccuugaaaaacugaagucuaaagugaccagaacagagcggccccucuccgccggcgucuauauggggaaccugagcucucagcagcuggaucagcgcagagcucuccugaauaugauuggaauguccggcgggaaccagggagcccgggcuggccgcgacggcgugguuagagugugggaugucaagaaugccgagcuucugaacaaucaguucgggaccaugccuagccucacacuggcgugucuuaccaaacagggacaaguggaccugaacgaugugguccaggcccucacagaccugggccugaucuacaccgcuaaguauccgaauacgucugaccucgaucggcugacccagucccaucccauucuuaacaugguugacacaaagaaaagcucccugaauaucucuggguacaacuuuagccucggagccgcugugaaggccggcgcgugcaugcuggaugggggaaacaugcuugaaaccaucaaaguguccccucaaacaauugacggcauccuuaagagcauucucaaagucaagaaagcccugggcauguucaucucugauacccccggggagcgcaauccuuaugaaaacauucuguacaagaucugucucuccggagacggcuggcccuauauugcuagcagaacgucuaucacagggcgggccugggagaauaccgugguugaucuggagagcgacggaaagccucagaaagcuggcuccaacaauucuaacaagagccuucaguccgccggguuuacagccggacugaccuacagccagcucaugacccugaaagaugcuaugcugcaacuugacccgaaugcgaagaucuggauggauauugaaggcagacccgaggacccuguggaaaucgcccucuaccagcccucuuccggcugcuauauucacuucuuucgcgagccuacagaccugaaacaguucaagcaggaugcuaaguacagccaugggaucgacgucacggaucuguuugccgcccaacccggacucaccucugcugugauugacgcccugccgcggaacaugguuaucacaugucagggcgcggaugacaucagaaaacuucuggaaucccaggggcgcaaggauauuaaacucaucgacauugcucugaauaaggccgauagccggaaauaugagaacgccgugugggaccaguacaaggaucugugccacaugcauaccggagucguggucgagaagaaaaagagaggcgggaaagaagagaucacaccucacugugcucuuauggacugcauuauguucgaugccgcuguguccggcggacucaauaccucuguucugcgcgccgugcugccccgggacauggucuuuagaacgagcacaccucgcgugguucucuga

SEQ ID NO: 9265 - RNA, 1710 nt, Artificial Sequence
  derived and/or modified CDS sequence (opt5) from LASV(G610-SLE-2009;Clade IV)__AIT17135__NP
augagcgccuccaaggagaucaaaucuuuccuguggacccagagccucagacgggaacuguccggcuacugcucuaacauuaagcugcaaguggucaaagacgcucaggcccugcuccacgggcuggauuuuagcgagguuuccaaugugcagcgccuuaugagaaaggaacggcgcgacgauaacgaccugaaaagacuccgggaucugaaucaggcggugaacaaucuggucgagcucaagucuacacaacaaaagagcauccugcgcgugggaacgcuuaccuccgacgaucugcucauucuggcugccgaccuugaaaaacuuaagagcaaaguuacaagaaccgagcggccccucucugccggcguguauauggggaaccuguccagccagcagcuggaucagcgcagagcucuccugucuaugaucggaauguccggcgggaaucagggagcccgggcuggccgcgacggcgucgugagaguuugggaugugaagaacgccgagcuucugaauaaccaguucgggacaaugccuagccucacccuggcgugucuuacaaaacagggacaagucgaccugaaugauguggugcaggcccucaccgaccugggccugauuuacacggcuaaguauccgaacaccucugaccucgaucggcugacacagucccaucccauccuuaauaugaucgacaccaagaaaagcucccugaacauuucuggguacaauuuuagccucggagccgcugucaaggccggcgcgugcaugcuggaugggggaaacaugcuugaaacaaucaaaguuuccccucaaaccauggacggcauucuuaagagcauccucaaagugaagaaagcccugggcauguucauuucugauacgcccggggagcgcaacccuuaugaaaauauccuguacaagauuugucucuccggagacggcuggcccuauaucgcuagcagaacaucuaucaccgggcgggccugggagaacacaguggucgaucuggagagcgacggaaagcugcagaaagcuggcuccaauaacucuaauaagagccugcaguccgccggguuuaccgccggacucaccuacagccagcugaugacacugaaagaugcuaugcuucaacucgacccuaacgcgaagacguggauggauauugaaggcagaccggaggaccccguggaaaucgcccuguaccagccuucuuccggcugcuauauucacuucuuucgcgagcccaccgaccugaaacaguucaagcaggaugcuaaguacagccaugggaucgacguuacagaucucuuugccgcccaaccuggacugaccucugcugugauugacgcccuuccccggaauauggucaucacaugucagggcuccgaugacaucagaaaacugcucgaaagccaggggcgcaaggauauuaaacugaucgacauugcgcugaacaagaccgauucccggaaauaugagaaugcugugugggaccaguacaaggaucuuugccacaugcauacgggaguuguggucgagaagaaaaagaaaggcgggaaggaagagaucacaccgcacugugcccucauggacugcauuauguucgaugccgcugugucuggcggacugaacaccagcguccugagagccgugcucccucgcgacaugguuuuucggaccuccacacccagagugguccuguga

SEQ ID NO: 9266 - RNA, 1710 nt, Artificial Sequence
  derived and/or modified CDS sequence (opt5) from LASV(G636-SLE-2009;Clade IV)__AIT17139__NP
augagcgccuccaaggagaucaaaucuuuccuguggacccagagccucagacgggaacuguccggcuacugcucuaacauuaagcugcaaguggucaaagacgcucaggcccugcuccacgggcuggauuuuagcgagguuuccaaugugcagcgccuuaugagaaaggaacggcgcgacgauaacgaccugaaaagacuccgggaucugaaucaggcggugaacaaucuggucgagcucaagucuacacaacaaaagagcgugcugcgcguuggaacgcuuaccuccgacgaucugcucauccuggcugccgaccuugaaaaacuuaagagcaaagugacaagaaccgagcggccccucucugccggcgucuauauggggaaccuguccagccagcagcuggaucagcgcagagcucuccugaauaugauuggaaugucuggcgggaaccagggagcccgggcuggccgcgacggcgugguuagagugugggaugucaagaaugccgagcuucugaacaaucaguucgggacaaugccuucccucacccuggcgugucuuacaaaacagggacaaguggaccugaacgaugccgugcaggcucucaccgaccugggccugaucuacacggccaaguauccgaauaccagcgaccucgaucggcugacacagucucaucccauucuuaacaugaucgacaccaagaaauccagccugaauaucuccggguacaacuuuucucucggagcugccgucaaggcgggcgccugcaugcuggaugggggaaacaugcuugaaacaauuaaaguuagcccucaaaccauggacuccauccucaagagcauucugaaagugaagaaagcucugggcauguucaucucugauacgcccggcgagcgcaauccuuaugaaaacauucuguacaagaucugucucuccggggacggauggcccuauauugccagcagaacaucuaucaccggccgggcuugggagaauacaguggucgaucuggagagcgacgggaagccucagaaagccggauccaacaauucuaacaagagccuucaguccgccggcuuugcugcggggcugaccuacagccagcucaugacccugaaagaugccaugcugcaacuugacccgaaugcuaagacauggauggauaucgaaggaagacccgaggacccuguggaaauugcccucuaccagcccucuuccggcugcuauauccacuucuuucgcgagccuacggaccugaaacaguucaagcaggaugccaaguacagccauggcauugacguuaccgaucuguuugcugcccaacccgggcucacaucugcggugaucgacgcucugccgcggaacauggucauuaccugucagggauccgaugacaucagaaaacuucuggaaagccagggccgcaaggauaucaaacucauugacaucgcccuguccaagacagauucucggaaauaugagaaugccgugugggaccaguacaaggaucugugccacaugcauaccgggauuguuguggagaagaaaaagagaggaggcaaagaagagaucacgccucacugugcucuuauggacugcauuauguucgaugccgcugucagcgggggccucaacacauccgugcugcgcgccguccugccccgggacaugguguuuagaaccaccacaccucgcguugugcucuga

SEQ ID NO: 9267 - RNA, 1710 nt, Artificial Sequence
  derived and/or modified CDS sequence (opt5) from LASV(G676-SLE-2009;Clade IV)__AIT17143__NP
augagcgccuccaaggagaucaaaucuuuccuguggacccagagccucagacgggaacuguccggcuacugcucuaacauuaagcugcaaguggucaaagacgcucaggcccugcuccacgggcuggauuuuagcgagguuuccaaugugcagcgccuuaugagaaaggaacggcgcgacgauaacgaccugaaaagacuccgggaucugaaucaggcggugaacaaucuggucgagcucaagucuacacaacaaaagagcauccugcgcgugggaacgcuuaccuccgacgaucugcucauucuggcugccgaccuugaaaaacuuaagagcaaaguuacaagaaccgagcggccccucucugccggcguguauauggggaaccuguccagccagcagcuggaucagcgcagagcucuccugaauaugaucggaaugucuggcuccaaccagggggcccgggcuggacgcgacggcgucgugagaguuugggaugugaagaaugccgagcuucugaacaaucaguucggcacaaugccuagccucacccuggcgugucuuacaaaacaggggcaagucgaccugaacgaugccgugcaggcucucaccgaccugggacugauuuacacggccaaguauccgaauaccucugaccucgaucggcugacacagucccaucccauccuuaacaugaucgacaccaagaaaagcucccugaauauuucuggcuacaacuuuagccucggggcugccgugaaggcgggagccugcaugcuggauggcgggaacaugcuugaaacaaucaaagucuccccucaaaccauggacggcauucucaagagcauccugaaaguuaagaaagcucugggaauguucauuucugauacgcccggcgagcgcaauccuuaugaaaacauccuguacaagauuugucucuccggggacggauggcccuauaucgccagcagaacaucuaucaccggccgggcuugggagaauacagugguggaucuggagagcgacgggaagccucagaaagccggaaacaauggcuccaacaagucucuucagagcgccggguuuaccgcuggacugaccuacucccagcucaugacacugaaagaugcgaugcugcaacuugacccgaaugccaagacguggauggauauugaaggcagacccgaggacccugucgaaaucgcucucuaccagcccagcucuggcugcuauauucacuucuuucgcgagccuaccgaccugaaacaguucaagcaggaugccaaguacucccaugggaucgacgugacagaucuguuugccgcucaacccggacucaccagcgccguuauugacgcgcugccgcggaaccuugugaucacaugucagggcucugaugacaucagaaaacugcucgaaucccaggggcgcaaggauauuaaacugaucgacauugcucugagcaagaccgauucccggaaauaugagaaugccgucugggaccaguacaaggaucuuugccacaugcauacgggaaucgugguugagaagaaaaagagaggcgggaaagaagagauuacaccucacugugcccucauggacugcaucauguucgaugcugccgugucuggcggacugaacaccagcguccugcgcgcugugcucccccgggacauggucuuuagaaccuccacaccucgcgugguucuguga

SEQ ID NO: 9268 - RNA, 1710 nt, Artificial Sequence
  derived and/or modified CDS sequence (opt5) from LASV(G692-SLE-2009;Clade IV)__AIT17147__NP
augagcgccuccaaggagaucaaaucuuuccuguggacccagagccucagacgggaacuguccggcuacugcucuaacauuaagcugcaaguggucaaagacgcucaggcccugcuccacgggcuggauuuuagcgagguuuccaaugugcagcgccuuaugagaaaggaacggcgcgacgauaacgaccugaaaagacuccgggaucugaaucaggcggugaacaaucuggucgagcucaagucuacacaacaaaagagcgugcugcgcguuggaacgcuuaccuccgacgaucugcucauccuggcugccgaccuugaaaaacuuaagagcaaagugacaagaaccgagcggccccucucugccggcgucuauauggggaaccuguccagccagcagcuggagcagcgcagagcucuccugaauaugauuggaaugucuggcuccaaccagggggcccaggcuggacgggauggcgugguucgcgugugggacgucaagaaugccgaacuucugaacaaucaguucggcacaaugccuagccucacccuggcgugucuuacaaaacaaggacagguggaucugaacgacgccgugcaggcucucaccgaucuggggcugaucuacacggucaaguauccgaauaccucugaccucgacagacugacacaaucccaucccauucuuaacaugaucgauaccaagaaaagcucccugaauaucucuggcuacaacuuuagccucggggccgcuguuaaggccggagcgugcaugcuggacggcgggaacaugcuugagacaauuaaaguguccccucagaccauggauggaauccucaagagcauucugaaagugaagaaagcccugggcauguucaucucugacacgcccggcgaacggaauccuuaugagaacauucuguacaagaucugucucuccggggauggauggcccuauauugcuagccgcacaucuaucaccggcagagccugggagaauacagucguggaccuggaaagcgaugggaagccucagaaagcugacuccaacucuagcaauaagucccuucagagcgccggauuuaccgccggccugaccuacucucaacucaugacacugaaagaugcuaugcugcagcuugacccgaacgcgaagacguggauggauaucgaggggcggcccgaagacccuguugagguggcccucuaccagcccuccagcggaugcuauauucacuucuuuagagaaccuaccgaccugaaacaguucaagcaagaugcuaaguacucucauggcaucgacgucacagaucuguuugccgcccagcccggccucaccuccgcugugauugacgcccugccgcgcaauaugguuaucacaugucaggggagcgaugacauucggaaacuucuggagucccagggaagaaaggauaucaaacucaucgacauugcgcugucuaagaccgauagccgcaaauaugagaacgcugugugggaccaauacaaggaucugugccacaugcauacgggcgucguggucgaaaagaaaaagagagggggaaaagaggaaaucacaccucacugugcccuuauggacugcauuauguucgaugccgcuguguccggcgggcucaauaccucuguucugcgggccgugcugccccgcgacauggucuuucggaccagcacaccuagagugguucucuga

SEQ ID NO: 9269 - RNA, 1710 nt, Artificial Sequence
  derived and/or modified CDS sequence (opt5) from LASV(G733-SLE-2010;Clade IV)__AIT17155__NP
augagcgccuccaaggagaucaaaucuuuccuguggacccagagccucagacgggaacuguccggcuacugcucuaacauuaagcugcaaguggucaaagacgcucaggcccugcuccacgggcuggauuuuagcgagguuuccaaugugcagcgccuuaugagaaaggaacggcgcgacgauaacgaccugaaaagacuccgggaucugaaucaggcggugaacaaucuggucgagcucaagucuacacaacaaaagagcgugcugcgcguuggaacgcuuaccuccgacgaacugcucgugcuggcugccgaucuugagaaacuuaagagcaaagucaucagaacagagcggccccucucugccggcguguauauggggaaccuguccagccagcagcuggaccagcgcagagcucuccugucuaugauuggaauguccggcgggaaucagggagcccggaccggccgcgauggcguugugagagucugggacgugaagaacgcugaacuucugaauaaccaguucgggacaaugccuagccucacccuggccugucuuacaaaacagggacaaguggaucugaaugacgcgguccaggcccucaccgaucugggccugaucuacacggcuaaguauccgaacaccucugaccucgaccggcugacacagucccaucccauucuuaauaugaucgauaccaagaaaagcucccugaacaucucuggguacaauuuuagccucggagccgcuguuaaggccggcgcgugcaugcuggacgggggaaacaugcuugagacaauuaaaguguccccucaaaccauggauggcauccucaagagcauucugaaagugaagaaagcccugggcauguucaucucugacacgcccggggaacgcaacccuuaugagaauauucuguacaagaucugucucuccggagauggcuggcccuauauugcuagcagaacaucuaucaccgggcgggccugggagaacacagucguggaccuggaaagcgauggaaagccucagaaagcuggcuccaauaacucuaauaagagccuucaguccgccggguuuaccgccggacugaccuacagccagcucaugacacugaaagacgcuaugcugcaacuugauccgaacgcgaagacguggauggacaucgagggcagacccgaagauccuguugagauugcccucuaccagcccucuuccggcugcuauauccacuucuuucgcgaaccuaccgaccugaaacaguucaagcaggacgcuaaguacagccaugggauugaugugacagaccuguuugccgcccaacccggacucaccucugcugucaucgaugcccugccgcggaauauggugauuacaugucagggcuccgacgauaucagaaaacuucuggagagccaggggcgcaaggacaucaaacucauugauaucgcgcuguccaagauugacucucggaaauaugagaacgcuguuugggaucaguacaaggaccugugccacaugcauaccggaguggucguggaaaagaaaaagagaggcgggaaagaggaaaucacgccucacugugcccuuauggauugcauuauguucgacgccgcugucagcggcggacucaauucccuggugcugcgcgccguucucccccgggauaugguguuuagaacaucuaccccucgcgucgugcuguga

SEQ ID NO: 9270 - RNA, 1710 nt, Artificial Sequence
  derived and/or modified CDS sequence (opt5) from LASV(G806-SLE-2010;Clade IV)__AIT17161__NP
augagcgccuccaaggagaucaaaucuuuccuguggacccagagccucagacgggaacuguccggcuacugcucuaacauuaagcugcaaguggucaaagacgcucaggcccugcuccacgggcuggauuuuagcgagguuuccaaugugcagcgccuuaugagaaaggaacggcgcgacgauaacgaccugaaaagacuccgggaucugaaucaggcggugaacaaucuggucgagcucaagucuacacaacaaaagagcauccugcgcgugggaacgcuuaccuccgacgaucugcucauucuggcugccgaccuugaaaaacuuaagagcaaaguuacaagaaccgagcggccccucucugccggcguguauauggggaaccuguccagccagcagcuggaucagcgcagagcucuccugaauaugaucggaaugucuggcuccaaccagggggcccggacaggacgcgacggcgucgugagaguuugggaugugaagaaugcugagcuucugaacaaucaguucggcaccaugccuagccucacacuggccugucuuaccaaacaggggcaagucgaccugaacgaugcggugcaggcccucacggaccugggacugauuuacaccgcuaaguauccgaauacaucugaccucgaucggcugacccagucccaucccauccuuaacaugaucgacacaaagaaaagcucccugaauauuucuggcuacaacuuuagccucggggccgcugugaaggccggagcgugcaugcuggauggcgggaacaugcuugaaaccaucaaagucuccccucaaacgauggacggcauucucaagagcauccugaaaguuaagaaagcccugggaauguucauuucugauacacccggcgagcgcaauccuuaugaaaacauccuguacaagauuugucucuccggggacggauggcccuauaucgcuagcagaaccucuaucacaggccgggccugggagaauaccgugguggaucuggagagcgacgggaagccucagaaagcuggauccaacucuagcaauaagucccuucagagcgccggccugaccgccgggcucacauacucucagcugaugacgcugaaagaugcuaugcuucaacucgacccgaacgcgaagaccuggauggauauugaaggaagacccgaggacccugucgaaaucgcccuguaccagcccuccagcggcugcuauauucacuuuuuccgcgagccuacagaccugaaacaguuuaagcaggaugcuaaguacucucauggcaucgacgugaccgaucucuucgccgcccaacccgggcugacauccgcuguuauugacgcccuuccgcggaaucuggugaucaccugucagggaagcgaugacaucagaaaacuccuggaaucccagggccgcaaggauauuaaacugaucgacauugcgcuuucuaagacggauagccggaaauaugagaacgcugucugggaccaguacaaggaucucugccacaugcauacagggaucgugguugagaagaaaaagagaggaggcaaagaagagauuaccccucacugugcccugauggacugcaucauguuugaugccgcuguguccgggggccugaaugccucuguccuccgcgcugugcugccccgggacauggucuucagaaccagcacaccucgcgugguucuuuga

SEQ ID NO: 9271 - RNA, 1710 nt, Artificial Sequence
  derived and/or modified CDS sequence (opt5) from LASV(G808-SLE-2010;Clade IV)__AIT17165__NP
augagcgccuccaaggagaucaaaucuuuccuguggacccagagccucagacgggaacuguccggcuacugcucuaacauuaagcugcaaguggucaaagacgcucaggcccugcuccacgggcuggauuuuagcgagguuaauaacgugcagcgccuuaugagaaaggaacggcgcgacgauaaugaccugaaaagacuccgggaucugaaccaggcggugaauaaccuggucgagcucaaguccacacaacagaagucuauccugcgcgugggaacgcuuaccagcgacgaucugcucauucuggcugccgaccuugaaaaacugaaguccaaaguuacaagaaccgagcggccccucagcgccggcguguauauggggaaucugucuucccagcagcuggaucaacgcagagcucuccugaacaugaucggaaugagcaauggcaaccaggggacacgggccggacgcgacggcgucgugagaguuugggaugugaagaaugcugagcuucugaacaaucaguucggcaccaugccuucucucacacuggccugucuuaccaaacaggggcaagucgaccugaacgauguggugcaggcgcucacggaccugggacugauuuacaccgccaaguauccgaauacauccgaccucgaucggcugacccagagccaucccauccuuaacaugaucgacacaaagaaaucuucccugaacauuagcggcuacaauuuuucccucggggcugccgucaaggcuggagccugcaugcuggauggcgggaacaugcuugaaaccaucaaaguuucuccucaaacgauggacggcauucuuaagagcauccucaaagugaagaaagcgcugggaauguucauuuccgauacacccggcgagcgcaauccuuaugaaaacauccuguacaagauuugucucagcggggacggauggcccuauaucgccucuagaaccuccaucacaggccgggcuugggagaauaccguggucgaucuggagagcgacgggaagccucagaaagccgauucuagcaacuccaauaagucucuucagagcgcuggauuuaccgccggccugacauacucccagcucaugacgcugaaagacgccaugcugcaacuugauccgaacgcuaagaccuggauggacauugaagggagacccgaggacccuguggaaguugcgcucuaccagcccagcucuggaugcuauauccacuucuuucgcgagccuacagaucugaaacaguucaagcaggacgccaaguacucccauggcauugaugugaccgaccuguuugcugcccaacccggccucacaagcgccgucaucgaugcucugccgcggaauauggugauuaccugucaggggucugacgauaucagaaaacuucuggaaucccagggacgcaaggacaucaaacucauugauaucgcccugagcaaggcggacucccggaaauaugagaacgcuguuugggaucagcacaaggaccugugccauaugcacacgggcguggucguggagaagaaaaagagagggggaaaagaagagauuacaccucacugugcccuuauggauugcaucauguacgacgccgcugucucuggcgggcucaauaccagcgugcugcgcgccguucugccccgggacaugguguucagaaccuccacaccucgcgucgugcucuga

SEQ ID NO: 9272 - RNA, 1710 nt, Artificial Sequence
  derived and/or modified CDS sequence (opt5) from LASV(Guinea Faranah;Clade IV)__AMZ00380__NP
augagcguguccaaggaggucaaaucuuuccuguggacccagagccucagacgggaacuguccggcuacugcucuaacaucaaacuucaaguugugaaggacgcccaggcucugcuccacgggcuggauuuuagcgagguguccaauguccagcgccuuaugagaaagcagcggcgcgacgauucugaccugaaaagacuccgggaucugaaccaagccgugaauaaccugguugaacucaagagcacacagcagaaguccgugcugcgcgucggaacgcuuaccagcgacgaucugcucauucuggcggcugaccuugagaaacugaagucuaaagugacaagaaccgaacggccccucuccgccggcguuuauauggggaaucugagcucucagcaacuggaucagcgcagagcccuccugaacaugaucggaaugaauggcgggaaccagggagugcaggcuggccgggacggcgucgugcgcgugugggaugucaagaaugccgagcuucugaacaaucaauucgggacaaugccuucccucacccuggcuugucuuacaaaacagggacagguugaccugaacgaugccgugcaagcgcucaccgaccugggccugauuuacacggccaaguauccgaauaccagcgaccucgauagacuggcucagucucaucccauccuuaacaugauugacacaaagaaauccagccugaauaucuccggguacaacuuuucucucggagccgcugugaaggccggcgcgugcaugcuggaugggggaaacaugcuugagaccaucaaagucagcccucagacaauggacggcauucugaaggccauccucaaagugaagcggacccugggcauguucguuuccgauacgcccggggaacgcaauccuuaugagaacauucuguacaaaaucugucucagcggagacggcuggcccuauauugcuucuagaacauccaucaccgggcgggccugggaaaauacaguggucgaucuggagagcgacggaaagccucagaaggugggcaacaaugggucuaacaaaagccuucaauccgcuggauuuucugccggccugaccuacagccagcucaugacccugaaggaugccaugcugcagcuugacccgaauacaaaaacguggauggauauugagggcagacccgaagacccuguugagguggcucucuaccagcccuccagcgggugcuauauccacuucuuucgcgaaccuaccgaccugaagcaauucaaacaggaugcgaaguacucucauggaaucgacgucacagaucuguuugccgcucagcccggccucaccuccgccgugauugaggcccugccgcggaacauggucaucacaugucaggggagcgaagacauuagaaaacuucuggagucucaaggacgcaaggauaucaagcucauugacaucgcucuguccaaagccgauagccggaaguaugagaaugcggugugggaccagugcaaagaucugugucacaugcauaccggcaucguuguggaaaagaagaaaagagggggcaaggaggaaauuacgccucacugcgcucuuauggacuguaucauguucgaugccgccgucuccggaggccucaacacacaggugcugcgcgcuguucugccccgggacaugguguuuagaaccucuaccccuaaagucgugcucuga

SEQ ID NO: 9273 - RNA, 1710 nt, Artificial Sequence
  derived and/or modified CDS sequence (opt5) from LASV(GUINEA Z-185a;Clade IV)__AMZ00376__NP
augagcguguccaaggagaucaaaucuuuccuguggacccagagccucagacgggaacuguccggcuacugcucuaacauuaagcugcaagucguuaaagacgcccaggcucugcuccacgggcuggauuuuagcgagguguccaaugugcagcgccuuaugagaaagcagcggcgcgacgauaacgaccugaaaagacuccgggaucugaaucaagccgucaacaaucugguggaacucaagucuacacagcaaaagagcguucugcgcgugggaacgcuuaccuccgacgaucugcucauccuggcggcugaccuugagaaacuuaagagcaaagucacaagaaccgaacggccccucucugccggcguguauauggggaaccuguccagccagcagcuggaucagcgcagagcccuccugaauaugauuggaaugucuggcgggaaccagggagcucagacaggccgggacggcguugugcgcaucugggaugucaagaaugccgagcuucugaacaaucaauucgggaccaugccuucccucacacuggcuugucuuaccaaacagggacagguggaccugaacgaugugguccaagcccucacggaccugggccugauuuacaccgcgaaguauccgaauacaagcgaccucgauagacugacccagucucaucccauccuuaacaugaucgacacaaagaaauccagccugaauauuuccggguacaacuuuucucucggagccgcuguuaaggccggcgcuugcaugcuggaugggggaaacaugcuugagaccaucaaagugagcccucagacgauggacggcauucugaaguccauccucaaagugaagaaagcccugggcauguucauuagcgauacacccggggaacggaauccuuaugagaacauccuguacaagauuugucucucuggagacggcuggcccuauaucgcgucccgcaccagcaucacagggagagccugggaaaauaccgucguggaucuggagucuggagagaagccucagaaaauuggcagcaacaauuccaacaagugccuucaaucugcuggguuuaccgccggacugagcuacucccagcucaugacacugaaagacgcuaugcugcagcuugauccgaaugccaagacguggauggacaucgaaggccggcccgaggauccuguugaaauugcccucuaccagcccagcucuggcuguuauauccacuucuuuagagagccuaccgaccugaaacaauucaagcaggacgcuaaguacucccaugggauugaugugacagaccuguuugcggcccagcccggacucaccagcgcugucaucgaagcccugccgcgcaacauggugaugacaugccagggcucugaugacauccggaaacuucuggagucccaagggagaaaggauauuaaacucaucgacauugcccugagcaagaccgauucccgcaaauaugagaaugcuguuugggaccaguacaaggaucugugucacaugcauacgggaguggucguggaaaagaaaaagaaaggcgggaaggaggaaaucacaccucacugcgcccuuauggacuguauuauguucgaugcggcugucucuggcggacucaacaccagcgugcugcgggccguucugcccagagacaugguguuucgcaccuccacaccuaaagucgugcucuga

SEQ ID NO: 9274 - RNA, 1710 nt, Artificial Sequence
  derived and/or modified CDS sequence (opt5) from MOPV/LASV reassortant(IGS-1;Clade IV)__AFY05578__NP
augagcgccuccaaggagaucaaaucuuuccuguggacccagagccucagacgggaacuguccggcuacugcucuaacauuaaacuucaaguggucaaggacgcucaggcccugcuccacgggcuggauuuuagcgagguuuccaaugugcagcgccuuaugagaaaggaacggcgcgacgauaacgaccugaaaagacuccgggaucugaaucaggcggugaacaaucuggucgagcucaagucuacacaacaaaagagcauccugcgcgugggaacgcuuaccuccgacgaucugcucauucuggcugccgaccuugaaaaacugagaagcaagguuauccggacagagcgcccccucucugccggcguguauauggggaaccuguccagccagcagcuggaucagagacgggcucuccugaauaugauuggaaugucuggcgggaaccagggagcccgcgcuggcagagacggcgucgugcggguuugggaugugaaaaaugccgagcuucuguccaaccaguucgggaccaugccuagccucacacuggcgugucuuaccaagcagggacaagucgaccugaaugaugccgugcaggcucucacagaccugggccugaucuacaccgccaaauauccgaacacgucugaccucgaucgccugacccagucccaucccauccuuaauaugauugacacaaagaaaagcucccugaacaucucuggguacaauuuuagccucggagcugccgugaaggcgggcgccugcaugcuggaugggggaaacaugcuugaaaccauuaaggucuccccucaaacaauggacggcauccugaaaagcauucucaagguuaaaaaggcucugggcauguucaucucugauacccccggggagagaaacccuuaugaaaauauucuguacaaaaucugucucuccggagacggcuggcccuauaucgccagccggacgucuauuacagggagagcuugggagaacaccgugguggaucuggagagcgacggaaagccucagaaggccgauuccaauaacucuagcaaaucccuucagagcgccggcuuuacagcugggcugaccuacucucagcucaugacccugaaggacgcgaugcugcaacuugauccgaaugccaaaacauggauggacaucgaaggacgccccgaggacccugucgaaauugcucucuaccagcccuccagcggcugcuauauccacuucuuucgggagccuacggaucugaagcaguucaaacaggacgccaaguacucucauggcauugaugugaccgaccuguuugccacacaacccgggcucaccuccgcuguuaucgaugcccugccgagaaacauggugaucacaugucagggaagcgacgauauucgcaaacuucuggaaucccagggccggaaggacaucaagcucauugauaucgaccugucuaaaaccgauagcagaaaguaugagaaugcggucugggaccaguacaaagaucugugccacaugcauacgggggugguuguggagaagaagaaacgcggaggcaaggaagagauuacaccucacugugcucuuauggacugcaucauguucgacgccgccgucuccgggggccucaacaccucugugcugcgggcuguccugcccagagauaugguguuucgcaccagcacaccucggguugugcucuga

SEQ ID NO: 9275 - RNA, 1710 nt, Artificial Sequence
  derived and/or modified CDS sequence (opt5) from MOPV/LASV reassortant(IGS-11;Clade IV)__AFY05589__NP
augagcgccuccaaggagaucaaaucuuuccuguggacccagagccucagacgggaacuguccggcuacugcucuaacauuaagcugcaaguggucaaagacgcucaggcccugcuccacgggcuggauuuuagcgagguuuccaaugugcagcgccuuaugagaaaggaacggcgcgacgauaacgaccugaaaagacuccgggaucugaaucaggcggugaacaaucuggucgagcucaagucuacacaacaaaagagcauccugcgcgugggaacgcuuaccuccgacgaucugcucauucuggcugccgaccuugaaaaacuuaagagcaaaguuaucagaacagagcggccccucucugccggcguguauauggggaaccuguccagccagcagcuggaucagcgcagagcucuccugaauaugauuggaaugucuggcgggaaccagggagcccgggcuggccgcgacggcgucgugagaguuugggaugugaagaaugccgagcuucuguccaaccaguucgggaccaugccuagccucacacuggcgugucuuaccaaacagggacaagucgaccugaaugaugccgugcaggcucucacagaccugggccugaucuacaccgccaaguauccgaacacgucugaccucgaucggcugacccagucccaucccauccuuaauaugauugacacaaagaaaagcucccugaacaucucuggguacaauuuuagccucggagcugccgugaaggcgggcgccugcaugcuggaugggggaaacaugcuugaaaccauuaaagucuccccucaaacaauggacggcauccucaagagcauucugaaaguuaagaaagcucugggcauguucaucucugauacccccggggagcgcaacccuuaugaaaauauucuguacaagaucugucucuccggagacggcuggcccuauaucgccagcagaacgucuauuacagggcgggcuugggagaacaccgugguggaucuggagagcgacggaaagccucagaaagccgauuccaauaacucuagcaagucccuucagagcgccggcuuuacagcugggcugaccuacucucagcucaugacccugaaagacgcgaugcugcaacuugauccgaaugccaagacauggauggacaucgaaggaagacccgaggacccugucgaaauugcucucuaccagcccuccagcggcugcuauauccacuucuuucgcgagccuacggaucugaaacaguucaagcaggacgccaaguacucucauggcauugaugugaccgaccuguuugccacacaacccgggcucaccuccgcuguuaucgaugcccugccgcggaacauggugaucacaugucagggaagcgacgauauuagaaaacuucuggaaucccagggccgcaaggacaucaaacucauugauaucgaccugucuaagaccgauagccggaaauaugagaaugcggucugggaccaguacaaggaucugugccacaugcauacgggggugguuguggagaagaaaaagagaggaggcaaagaagagauuacaccucacugugcucuuauggacugcaucauguucgacgccgccgucuccgggggccucaacaccucugugcugcgcgcuguccugccccgggauaugguguuuagaaccagcacaccucgcguugugcucuga

SEQ ID NO: 9276 - RNA, 1710 nt, Artificial Sequence
  derived and/or modified CDS sequence (opt5) from MOPV/LASV reassortant(IGS-12;Clade IV)__AFY05591__NP
augagcgccuccaaggagaucaaaucuuuccuguggacccagagccucagacgggaacuguccggcuacugcucuaacauuaagcugcaaguggucaaagacgcucaggcccugcuccacgggcuggauuuuagcgagguuuccaaugugcagcgccuuaugagaaaggaacggcgcgacgauaacgaccugaaaagacuccgggaucugaaucaggcggugaacaaucuggucgagcucaagucuacacaacaaaagagcauccugcgcgugggaacgcuuaccuccgacgaucugcucauucuggcugccgaccuugaaaaacuuaagagcaaaguuaucagaacagagcggccccucucugccggcguguauauggggaaccuguccagccagcagcuggaucagcgcagagcucuccugaauaugauuggaaugucuggcgggaaccagggagcccgggcuggccgcgacggcgucgugagaguuugggaugugaagaaugucgagcuucuguccaaccaguucgggaccaugccuagccucacacuggccugucuuaccaaacagggacaaguggaccugaaugaugcggugcaggcccucacagaccugggccugaucuacaccgcuaaguauccgaacacgucugaccucgaucggcuggcccagucccaucccauccuuaauaugauugacaccaagaaaagcucccugaacaucucuggguacaauuuuagccucggagcugccgucaaggcgggcgccugcaugcuggaugggggaaacaugcuugaaacaauuaaaguuuccccucaaaccauggacggcauccucaagagcauucugaaagugaagaaagcucugggcauguucaucucugauacacccggggagcgcaacccuuaugaaaauauucuguacaagaucugucucuccggagacggcuggcccuauaucgccagcagaaccucuauuacggggcgggcuugggagaacacaguggucgaucuggagagcgacggaaagccucagaaagccgauuccaauaacucuagcaagucccuucagagcgccggcuuuaccgcugggcugacauacucucagcucaugacccugaaagacgcgaugcugcaacuugauccgaaugccaagaccuggauggacaucgaaggaagacccgaggacccuguggaaauugcucucuaccagcccuccagcggcugcuauauccacuucuuucgcgagccuacagaucugaaacaguucaagcaggacgccaaguacucucauggcauugauguuacggaccuguuugccacccaacccgggcucacauccgcugugaucgaugcccugccgcggaacauggucaucaccugucagggaagcgacgauauuagaaaacuucuggaaucccagggccgcaaggacaucaaacucauugauaucgaccugucuaagacagauagccggaaauaugagaaugcggugugggaccaguacaaggaucugugccacaugcauaccgggguuguggucgagaagaaaaagagaggaggcaaagaagagauuacgccucacugugcucuuauggacugcaucauguucgacgccgccguguccgggggccucaacacaucuguccugcgcgcugugcugccccgggauaugguuuuuagaaccagcaccccucgcgugguccucuga

SEQ ID NO: 9277 - RNA, 1710 nt, Artificial Sequence
  derived and/or modified CDS sequence (opt5) from MOPV/LASV reassortant(IGS-14;Clade IV)__AFY05595__NP
augagcgccuccaaggagaucaaaucuuuccuguggacccagagccucagacgggaacuguccggcuacugcucuaacauuaagcugcaaguggucaaagacgcucaggcccugcuccacgggcuggauuuuagcgagguuuccaaugugcagcgccuuaugagaaaggaacggcgcgacgauaacgaccugaaaagacuccgggaucugaaucaggcggugaacaaucuggucgagcucaagucuacacaacaaaagagcauccugcgcgugggaacgcuuaccuccgacgaucugcucauucuggcugccgaccuugaaaaacuuaagagcaaaguuaucagaacagagcggccccucucugccggcguguauauggggaaccuguccagccagcagcuggaucagcgcagagcucuccugaauaugauuggaaugucuggcgggaaccagggagcccgggcuggccgcgacggcgucgugagaguuugggaugugaagaaugccgagcuucuguccaaccaguucgggaccaugccuagccucacacuggcgugucuuaccaaacagggacaagucgaccugaaugaugccgugcaggcucucacagaccugggccugaucuacaccgccaaguauccgaacacgucugaccucgaucggcuggcucagucccaucccauccuuaauaugauugacaccaagaaaagcucccugaacaucucuggguacaauuuuagccucggagccgcggugaaggccggcgcuugcaugcuggaugggggaaacaugcuugaaacaauuaaagucuccccucaaaccauggacggcauccucaagagcauucugaaaguuaagaaagcccugggcauguucaucucugauacacccggggagcgcaacccuuaugaaaauauucuguacaagaucugucucuccggagacggcuggcccuauaucgcuagcagaaccucuauuacggggcgggccugggagaacacagugguggaucuggagagcgacggaaagccucagaaagccgauuccaauaacucuagcaagucccuucagagcgcuggcuuuaccgcggggcugacauacucucagcucaugacccugaaagacgccaugcugcaacuugauccgaaugcuaagaccuggauggacaucgaaggaagacccgaggacccugucgaaauugcccucuaccagcccuccagcggcugcuauauccacuucuuucgcgagccuacagaucugaaacaguucaagcaggacgccaaguacucucauggcauugaugugacggaccuguuugcuacccaacccgggcucacauccgccguuaucgaugcgcugccgcggaacauggugaucaccugucagggaagcgacgauauuagaaaacuucuggaaucccagggccgcaaggacaucaaacucauugauaucgaccugucuaagacagauagccggaaauaugagaaugcugucugggaccaguacaaggaucugugccacaugcauaccggggugguuguggagaagaaaaagagaggaggcaaagaagagauuacgccucacugugcccuuauggacugcaucauguucgacgccgcugucuccgggggccucaacacaucugugcugcgcgccguccugccccgggauaugguguuuagaaccagcaccccucgcguugugcucuga

SEQ ID NO: 9278 - RNA, 1710 nt, Artificial Sequence
  derived and/or modified CDS sequence (opt5) from MOPV/LASV reassortant(IGS-23;Clade IV)__AFY05610__NP
augagcgccuccaaggagaucaaaucuuuccuguggacccagagccucagacgggaacuguccggcuacugcucuaacauuaagcugcaaguggucaaagacgcucaggcccugcuccacgggcuggauuuuagcgagguuuccaaugugcagcgccuuaugagaaaggaacggcgcgacgauaacgaccugaaaagacuccgggaucugaaucaggcggugaacaaucuggucgagcucaagucuacacaacaaaagagcauccugcgcgugggaacgcuuaccuccgacgaucugcucauucuggcugccgaccuugaaaaacuuaagagcaaaguuaucagaacagagcggccccucucugccggcguguauauggggaaccuguccagccagcagcuggaucagcgcagagcucuccugaauaugauuggaaugucuggcgggaaccagggagcccgggcuggccgcgacggcgucgugagaguuugggaugugaagaaugccgagcuucuguccaaccaguucgggaccaugccuagccucacacuggcgugucuuaccaaacagggacaagucgaccugaaugaugccgugcaggcucucacagaccugggccugaucuacaccgccaaguauccgaacacgucugaccucgaucggcugacccagucccaucccauccuuaauaugauugacacaaagaaaagcucccugaacaucucuggguacaauuuuagccucggagcugccgugaaggcgggcgccugcaugcuggaugggggaaacaugcuugaaaccauuaaagucuccccucaaacaauggacggcauccucaagagcauucugaaaguuaagaaagcucugggcauguucaucucugauacccccggggagcgcaacccuuaugaaaauauucuguacaagaucugucucuccggagacggcuggcccuauaucgccagcagaacgucuauuacagggcgggcuugggagaacaccgugguggaucuggagagcgacggaaagccucagaaagccgauuccaauaacucuagcaagucccuucagagcgccggcuuuacagcugggcugaccuacucucagcucaugacccugaaagacgcgaugcugcaacuugauccgaauacaaagacguggauggacaucgaaggaagacccgaggacccugucgaaauugcccucuaccagcccuccagcggcugcuauauccacuucuuucgcgagccuaccgaucugaaacaguucaagcaggacgcuaaguacucucauggcauugaugugacagaccuguuugccacccaacccgggcucacauccgccguuaucgaugcucugccgcggaacauggugaucaccugucagggaagcgacgauauuagaaaacuucuggaaucccagggccgcaaggacaucaaacucauugauaucgaccugucuaagacggauagccggaaauaugagaaugccgucugggaccaguacaaggaucugugccacaugcauacaggggugguuguggagaagaaaaagagaggaggcaaagaagagauuaccccucacugugcgcuuauggacugcaucauguucgacgcugccgucuccgggggccucaacaccucugugcugcgcgccguccugccccgggauaugguguuuagaacaagcaccccucgcguugugcucuga

SEQ ID NO: 9279 - RNA, 1716 nt, Artificial Sequence
  derived and/or modified CDS sequence (opt5) from MOPV/LASV reassortant(IGS-27;Clade IV)__AFY05618__NP
augagcgccuccaaggagaucaaaucuuuccuguggacccagagccucagacgggaacuguccggcuacugcucuaacauuaaacuucaaguggucaaggacgcucaggcccugcuccacgggcuggauuuuagcgagguuuccaaugugcagcgccuuaugagaaaggaacggcgcgacgauaacgaccugaaaagacuccgggaucugaaucaggcggugaacaaucuggucgagcucaagucuacacaacaaaagagcauccugcgcgugggaacgcuuaccuccgacgaucugcucauucuggcugccgaccuugaaaaacugagaagcaagguuauccggacagagcgcccccucucugccggcguguauauggggaaccuguccagccagcagcuggaucagagacgggcucuccugaauaugauuggaaugucuggcgggaaccagggagcccgcgcuggcagagacggcgucgugcggguuugggaugugaaaaaugccgagcuucuguccaaccaguucgggaccaugccuagccucacacuggcgugucuuaccaagcagggacaagucgaccugaaugaugccgugcaggcucucacagaccugggccugaucuacaccgccaaauauccgaacacgucugaccucgaucgccugacccagucccaucccauccuuaauaugauugacacaaagaaaagcucccugaacaucucuggguacaauuuuagccucggagcugccgugaaggcgggcgccugcaugcuggaugggggaaacaugcuugaaaccauuaaggucuccccucaaacaauggacggcauccugaaaagcauucucaagguuaaaaaggcucugggcauguucaucucugauacccccggggagagaaacccuuaugaaaauauucuguacaaaaucugucucuccggagacggcuggcccuauaucgccagccggacgucuauuacagggagagcuugggagaacaccgugguggaucuggagagcgacggaaagccucagaaggccgauuccaauaacucuagcaaaucccuucagagcgccggcuuuacagcugggcugaccuacucucagcucaugacccugaaggacgcgaugcugcaacuugauccgaaugccaaaacauggauggacaucgaaggacgccccgaggacccugucgaaauugcucucuaccagcccuccagcggcugcuauauccacuucuuucgggagccuacggaucugaagcagaaacaguucaagcaagacgccaaguacucucauggcauugaugugaccgaccuguuugccacacagcccgggcucaccuccgcuguuaucgaugcccugccgagaaacauggugaucacaugucagggaagcgacgauauucgcaaacuucuggaaucccagggccggaaggacaucaaacucauugauaucgaccugucuaagaccgauagcagaaaauaugagaaugcggucugggaccaauacaaggaucugugccacaugcauacgggggugguuguggagaagaaaaagcgcggaggcaaagaagagauuacaccucacugugcucuuauggacugcaucauguucgacgccgccgucuccgggggccucaacaccucugugcugcgggcuguccugcccagagauaugguguuucgcaccagcacaccucggguugugcucuga

SEQ ID NO: 9280 - RNA, 1710 nt, Artificial Sequence
  derived and/or modified CDS sequence (opt5) from MOPV/LASV reassortant(IGS-3;Clade IV)__AFY05580__NP
augagcgccuccaaggagaucaaaucuuuccuguggacccagagccucagacgggaacuguccggcuacugcucuaacauuaaacuucaaguggucaaggacgcucaggcccugcuccacgggcuggauuuuagcgagguuuccaaugugcagcgccuuaugagaaaggaacggcgcgacgauaacgaccugaaaagacuccgggaucugaaucaggcggugaacaaucuggucgagcucaagucuacacaacaaaagagcauccugcgcgugggaacgcuuaccuccgacgaucugcucauucuggcugccgaccuugaaaaacugagaagcaagguuauccggacagagcgcccccucucugccggcguguauauggggaaccuguccagccagcagcuggaucagagacgggcucuccugaauaugauuggaaugucuggcgggaaccagggagcccgcgcuggcagagacggcgucgugcggguuugggaugugaaaaaugccgagcuucuguccaaccaguucgggaccaucccuagccucacacuggcgugucuuaccaagcagggacaagucgaccugaaugaugccgugcaggcucucacagaccugggccugaucuacaccgccaaauauccgaacacgucugaccucgaucgccugacccagucccaucccauucuuaauaugaucgacacaaagaaaagcucccugaacauuucuggguacaauuuuagccucggagcugccgugaaggcgggcgccugcaugcuggaugggggaaacaugcuugaaaccaucaaggucuccccucaaacaauggacggcauucugaaaagcauccucaagguuaaaaaggcucugggcauguucauuucugauacccccggggagagaaacccuuaugaaaauauccuguacaaaaucugucucuccggagacggcuggcccuauauugccagccggacgucuaucacagggagagcuugggagaacaccgugguggaucuggagagcggaggcaagccucagaaggccgacuccaauaacucuagcaaaucccuucagagcgccggguuuacagcuggacugaccuacucucagcucaugacccugaaggaugcgaugcugcaacuugacccgaaugccaaaacauggauggauauugaaggccgccccgaggacccugucgaaaucgcucucuaccagcccuccagcggcugcuauauucacuucuuucgggagccuacggaccugaagcaguucaaacaggaugccaaguacucucaugggaucgacgugaccgaucuguuugccacacaacccggacucaccuccgcuguuaucgacgcccugccgagaaacauggugauuacaugucagggcagcgaugacauccgcaaacuucuggaaucccaggggcggaaggauauuaagcucaucgacauugaucugucuaaaaccgacagcagaaaguaugagaaugcggucugggaucaguacaaagaccugugccacaugcauacgggagugguuguggagaagaagaaacgcggcgggaaggaagagaucacaccucacugugcucuuauggauugcaucauguucgacgccgccgucuccggcggacucaacaccucugugcugcgggcuguccugcccagagacaugguguuucgcaccagcacaccucggguugugcucuga

SEQ ID NO: 9281 - RNA, 1710 nt, Artificial Sequence
  derived and/or modified CDS sequence (opt5) from MOPV/LASV reassortant(IGS-4;Clade IV)__AFY05581__NP
augagcgccuccaaggagaucaaaucuuuccuguggacccagagccucagacgggaacuguccggcuacugcucuaacauuaagcugcaaguggucaaagacgcucaggcccugcuccacgggcuggauuuuagcgagguuuccaaugugcagcgccuuaugagaaaggaacggcgcgacgauaacgaccugaaaagacuccgggaucugaaucaggcggugaacaaucuggucgagcucaagucuacacaacaaaagagcauccugcgcgugggaacgcuuaccuccgacgaucugcucauucuggcugccgaccuugaaaaacuuaagagcaaaguuaucagaacagagcggccccucucugccggcguguauauggggaaccuguccagccagcagcuggaucagcgcagagcucuccugaauaugauuggaaugucuggcgggaaccagggagcccgggcuggccgcgacggcgucgugagaguuugggaugugaagaaugccgagcuucuguccaaccaguucgggaccaucccuagccucacacuggcgugucuuaccaaacagggacaagucgaccugaaugaugccgugcaggcucucacagaccugggccugaucuacaccgccaaguauccgaacacgucugaccucgaucggcugacccagucccaucccauucuuaauaugaucgacacaaagaaaagcucccugaacauuucuggguacaauuuuagccucggagcugccgugaaggcgggcgccugcaugcuggaugggggaaacaugcuugaaaccaucaaagucuccccucaaacaauggacggcauucucaagagcauccugaaaguuaagaaagcucugggcauguucauuucugauacccccggggagcgcaacccuuaugaaaauauccuguacaagaucugucucuccggagacggcuggcccuauauugccagcagaacgucuaucacagggcgggcuugggagaacaccgugguggaucuggagagcggaggcaagccucagaaagccgacuccaauaacucuagcaagucccuucagagcgccggguuuacagcuggacugaccuacucucagcucaugacccugaaagaugcgaugcugcaacuugacccgaaugccaagacauggauggauauugaaggcagacccgaggacccugucgaaaucgcucucuaccagcccuccagcggcugcuauauucacuucuuucgcgagccuacggaccugaaacaguucaagcaggaugccaaguacucucaugggaucgacgugaccgaucuguuugccacacaacccggacucaccuccgcuguuaucgacgcccugccgcggaacauggugauuacaugucagggcagcgaugacaucagaaaacuucuggaaucccaggggcgcaaggauauuaaacucaucgacauugaucugucuaagaccgacagccggaaauaugagaaugcggucugggaucaguacaaggaccugugccacaugcauacgggagugguuguggagaagaaaaagagaggcgggaaagaagagaucacaccucacugugcucuuauggauugcaucauguucgacgccgccgucuccggcggacucaacaccucugugcugaaggcuguccugccccgcgacaugguguuucggaccagcacaccuagaguugugcucuga

SEQ ID NO: 9282 - RNA, 1710 nt, Artificial Sequence
  derived and/or modified CDS sequence (opt5) from MOPV/LASV reassortant(IGS-9;Clade IV)__AFY05585__NP
augagcgccuccaaggagaucaaaucuuuccuguggacccagagccucagacgggaacuguccggcuacugcucuaacauuaaacuucaaguggucaaggacgcucaggcccugcuccacgggcuggauuuuagcgagguuuccaaugugcagcgccuuaugagaaaggaacggcgcgacgauaacgaccugaaaagacuccgggaucugaaucaggcggugaacaaucuggucgagcucaagucuacacaacaaaagagcauccugcgcgugggaacgcuuaccuccgacgaucugcucauucuggcugccgaccuugaaaaacugagaagcaagguuauccggacagagcgcccccucucugccggcguguauauggggaaccuguccagccagcagcuggaucagagacgggcucuccugaauaugauuggaaugucuggcgggaaccagggagcccgcgcuggcagagacggcgucgugcggguuugggaugugaaaaaugccgagcuucuguccaaccaguucgggaccaucccuagccucacacuggcgugucuuaccaagcagggacaagucgaccugaaugaugccgugcaggcucucacagaccugggccugaucuacaccgccaaauauccgaacacgucugaccucgaucgccugacccagucccaucccauucuuaauaugaucgacacaaagaaaagcucccugaacauuucuggguacaauuuuagccucggagcugccgugaaggcgggcgccugcaugcuggaugggggaaacaugcuugaaaccaucaaggucuccccucaaacaauggacggcauucugaaaagcauccucaagguuaaaaaggcucugggcauguucauuucugauacccccggggagagaaacccuuaugaaaauauccuguacaaaaucugucucuccggagacggcuggcccuauauugccagccggacgucuaucacagggagagcuugggagaacaccgugguggaucuggagagcgacggaaagccucagaaggccgauuccaauaacucuagcaaaucccuucagagcgccggcuuuacagcugggcugaccuacucucagcucaugacccugaaggacgcgaugcugcaacuugauccgaaugccaaaacauggauggacauugaaggacgccccgaggacccugucgaaaucgcucucuaccagcccuccagcggcugcuauauucacuucuuucgggagccuacggaucugaagcaguucaaacaggacgccaaguacucucauggcaucgaugugaccgaccuguuugccacacaacccgggcucaccuccgcuguuaucgaugcccugccgagaaacauggugauuacaugucagggaagcgacgauauccgcaaacuucuggaaucccagggccggaaggacauuaagcucaucgauauugaccugucuaaaaccgauagcagaaaguaugagaaugcggucugggaccaguacaaagaucugugccacaugcauacgggggugguuguggagaagaagaaacgcggaggcaaggaagagaucacaccucacugugcucuuauggacugcaucauguucgacgccgccgucuccgggggccucaacaccucugugcugcgggcuguccugcccagagauaugguguuucgcaccagcacaccucggguugugcucuga

SEQ ID NO: 9283 - RNA, 1710 nt, Artificial Sequence
  derived and/or modified CDS sequence (opt5) from LASV(LM032-SLE-2010;Clade IV)__AIT17803__NP
augagcgccuccaaggagaucaaaucuuuccuguggacccagagccucagacgggaacuguccggcuacugcucuaacauuaagcugcaaguggucaaagacgcucaggcccugcuccacgggcuggauuuuagcgagguuuccaaugugcagcgccuuaugagaaaggaacggcgcgacgauaacgaccugaaaagacuccgggaucugaaucaggcggugaacaaucuggucgagcucaagucuacacaacaaaagagcauccugcgcgugggaacgcuuaccuccgacgaucugcucauucuggcugccgaccuugaaaaacuuaagagcaaaguuaucagaacagagcggccccucucugccggcguguauauggggaaccuguccagccagcagcuggaucagcgcagagcucuccugucuaugauuggaauguccggcgggagccaggaggcccgggcuggacgcgacggcgucgugagaguuugggaugugaagaaugccgaacuucugaacaaucaguucggcaccaugccuucucucacacuggcgugucuuaccaaacaggggcaagucgaccugaacgaugccgugcaggcucucacagaccugggacugaucuacaccgccaaguauccgaauacguccgaccucgaucggcugacccagagccaucccauccuuaacaugauugacacaaagaaauccucucugaauaucagcggcuacaacuuuucccucggggcugccgugaaggcgggagccugcaugcuggauggcgggaauaugcuugagaccauuaaagucagcccucaaacaguugacggaauccugaagucuauucucaaagugaagaaagcucugggcauguucaucuccgauacccccggcgaacgcaacccuuaugagaacauucuguacaagaucugucucagcggggacggauggcccuauaucgccucuagaacgagcauuacaggccgggcuugggagaauaccguggucgaucuggaauccgacgggaagccucagaaagccggaucuaacaauagcaacaagucccuucagagcgccggcuuuacagcugggcugaccuacucucagcucaugacccugaaagaugcgaugcugcaacuugacccgaaugccaagacauggauggauaucgagggaagacccgaagacccuguggagauugcucucuaccagcccuccagcggcugcuauauccacuucuuucgcgaaccuacggaccugaaacaguucaagcaggaugccaaguacucucauggcauugacguuaccgaucuguuugccgcucaacccgggcucacauccgccgugaucgacgcgcugccgcggaacauggucaucaccugucagggaagcgaugacauuagaaaacuucuggagucccagggccgcaaggauaucaaacucauugacaucgcucugucuaagacagauagccggaaauaugagaaugccgugugggaccaguacaaggaucugugccacaugcauaccgggguuguggucgaaaagaaaaagaaaggaggcaaggaggaaauuacgccucacugugcccuuauggacugcaucauguucgaugcugccguguccgggggccucaacacaucuguccugagagcugugcugccccgcgacaugguuuuucggaccagcaccccuagagugguccucuga

SEQ ID NO: 9284 - RNA, 1710 nt, Artificial Sequence
  derived and/or modified CDS sequence (opt5) from LASV(LM395-SLE-2009;Clade IV)__AIT17811__NP
augagcgccuccaaggagaucaaaucuuuccuguggacccagagccucagacgggaacuguccggcuacugcucuaacauuaagcugcaaguggucaaagacgcucaggcccugcuccacgggcuggauuuuagcgagguuuccaaugugcagcgccuuaugagaaaggaacggcgcgacgauaacgaccugaaaagacuccgggaucugaaucaggcggugaacaaucuggucgagcucaagucuacacaacaaaagagcauccugcgcgugggaacgcuuaccuccgacgaucugcucauucuggcugccgaccuugaaaaacuuaagagcaaaguuacaagaaccgagcggccccucucugccggcguguauauggggaaccuguccagccagcagcuggaucagcgcagagcucuccugaauaugaucggaaugucuggcuccaaccagggggcccgggcuggacgcgacggcgucgugagaguuugggaugugaagaaugccgagcuucugaacaaucaguucggcacaaugccuagccucacccuggcgugucuuacaaaacaggggcaagucgaccugaacgaugccgugcaggcucucaccgaccugggacugauuuacacggccaaguauccgaauaccucugaccucgaucggcugacacagucccaucccauccuuaacaugaucgacaccaagaaaagcucccugaauauuucuggcuacaacuuuagccucggggcugccgugaaggcgggagccugcaugcuggauggcgggaacaugcuugaaacaaucaaagucuccccucaaaccauggacggcauucucaagagcauccugaaaguuaagaaagcucugggaauguucauuucugauacgcccggcgagcgcaauccuuaugaaaacauccuguacaagauuugucucuccggggacggauggcccuauaucgccagcagaacaucuaucaccggccgggcuugggagaauacagugguggaucuggagagcgacgggaagccucagaaagccggauccaacggcucuaauaagagccuucaguccgccggguuuaccgcuggacugaccuacagccagcucaugacacugaaagaugcgaugcugcaacuugacccgaacgccaagacguggauggauauugaaggcagacccgaggacccugucgaaaucgcuuucuaccagcccucuuccggcugcuauauucacuuuuuccgcgagccuaccgaccucaaacaguuuaagcaggaugccaaguacagccaugggaucgacgugacagaucuguucgccgcucaacccggacugaccucugccguuauugacgcgcucccgcggaaucuggugaucacaugucagggcuccgaugacaucagaaaacuuuuugaaagccaggggcgcaaggauauuaaacugaucgacauugcucucuccaagaccgauucucggaaauaugagaacgccgucugggaccaguacaaggaucugugccacaugcauacgggaaucgugguugagaagaaaaagagaggcgggaaagaagagauuacaccucacugugcccugauggacugcaucauguucgaugcugccgugagcggcggacuuaaugcuuccguccuccgcgccgugcugccccgggacauggucuuuagaaccucuaccccucgcgugguucuguga

SEQ ID NO: 9285 - RNA, 1710 nt, Artificial Sequence
  derived and/or modified CDS sequence (opt5) from LASV(LM765-SLE-2012;Clade IV)__AIT17815__NP
augagcgccuccaaggagaucaaaucuuuccuguggacccagagccucagacgggaacuguccggcuacugcucuaacauuaagcugcaaguggucaaagacgcucaggcccugcuccacgggcuggauuuuagcgagguuuccaaugugcagcgccuuaugagaaaggaacggcgcgacgauaacgaccugaaaagacuccgggaucugaaucaggcggugaacaaucuggucgagcucaagucuacacaacaaaagagcauccugcgcgugggaacgcuuaccuccgacgaucugcucauucuggcugccgaccuugaaaaacuuaagagcaaaguuacaagaaccgagcggccccucucugccggcguguauauggggaaccuguccagccagcagcuggaucagcgcagagcucuccuggacaugaucggaaugucuggcuccaaucagggggcccgggcuggacgcgauggcgucgugagaguuugggacgugaagaacgccgagcuucugaauaaccaguucggcacaaugccuagccucacccuggcgugucuuacaaaacaggggcaagucgaucugaaugacgccgugcaggcucucaccgaccugggacugauuuacacggccaaguauccgaacaccucugaucucgaccggcugacacagucccaucccauccuuaauaugaucgauaccaagaaaagcucccugaacauuucuggcuacaauuuuagccucggggcugccgugaaggcgggagccugcaugcuggacggcgggaacaugcuugaaacaaucaaagucuccccucaaaccauggauggcauucucaagagcauccugaaaguuaagaaagcucugggaauguucauuucugacgcccccggcgagcgcaacccuuaugaaaauauccuguacaagauuugucucuccggggauggauggcccuauaucgcuagcagaacgucuaucacaggccgggccugggagaacaccgugguggaccuggagagcgaugggaagccucagaaagccggauccaauggcucuaacaagagccuucaguccgcuggguuuacagcgggacugaccuacagccagcucaugacccugaaagacgccaugcugcaacuugauccgaaugcuaagacauggauggacauugaaggcagacccgaggacccugucgaaaucgcccucuaccagcccucuuccggcugcuauauucacuucuuucgcgagccuacggaucugaaacaguucaagcaggacgccaaguacagccaugggaucgaugugaccgaccuguuugcugcccaacccggacucacaucugcgguuauugaugcucugccgcggaacauggugaucaccugucagggcuccgacgauaucagaaaacuuuucgaaagccaggggcgcaaggacauuaaacugaucgauauugcccucuccaagacagacucucggaaauaugagaaugccgucugggaucaguacaaggaccugugccacaugcauaccggaaucgugguugagaagaaaaagagaggcgggaaagaagagauuacgccucacugugcucugauggauugcaucauguuugacgccgcugugagcggcggacuuaacacauccguccuccgcgccgugcugccccgggacauggucuucagaaccucuaccccucgcgugguucuguga

SEQ ID NO: 9286 - RNA, 1710 nt, Artificial Sequence
  derived and/or modified CDS sequence (opt5) from LASV(LM774-SLE-2012;Clade IV)__AIT17821__NP
augagcgccuccaaggagaucaaaucuuuccuguggacccagagccucagacgggaacuguccggcuacugcucuaacauuaagcugcaaguggucaaagacgcucaggcccugcuccacgggcuggauuuuagcgagguuuccaaugugcagcgccuuaugagaaaggaacggcgcgacgauaacgaccugaaaagacuccgggaucugaaucaggcggugaacaaucuggucgagcucaagucuacacaacaaaagagcauccugcgcgugggaacgcuuaccuccgacgaucugcucauucuggcugccgaccuugaaaaacuuaagagcaaaguuaucagaacagagcggccccucucugccggcguguauauggggaaccuguccagccagcagcuggaucagcgcagagcucuccugucuaugauuggaauguccggcgggaaucagggagcccgggcuggccgcgacggcgucgugagaguuugggaugugaagaacgccgagcuucugaauaaccaguucgggaccaugccuagccucacacuggcgugucuuaccaaacagggacaagucgaccugaaugaugccgugcaggcucucacagaccugggccugaucuacaccgccaaguauccgaacacgucugaccucgaucggcugacccagucccaucccauccuuaauaugauugacacaaagaaaagcucccugaacaucucuggguacaauuuuagccucggagcugccgugaaggcgggcgccugcaugcuggaugggggaaacaugcuugaaaccauuaaagucuccccucaaacaguugacggcauccucaagagcauucugaaagugaagaaagcucugggcauguucaucucugauacccccggggagcgcaacccuuaugaaaauauucuguacaagaucugucucuccggagacggcuggcccuauaucgccagcagaacgucuauuacagggcgggcuugggagaacaccguggucgaucuggagagcgacggaaagccucagaaaacaggcuccaauaacucuaauaagagccuucaguccgccggguuuaccgccggacugaccuacagccagcucaugacacugaaagaugcuaugcugcaacuugacccgaacgcgaagacguggauggauaucgaaggcagacccgaggacccuguggaaguugcccucuaccagcccucuuccggcugcuauauucacuucuuucgcgagccuaccgaccugaaacaguucaagcaggaugcuaaguacagccaugggaucgacgugacagaucuguuugccgcccaacccggacucaccucugcugucauugacgcccugccgcggaauauggugaucacaugucagggcuccgaugacaucagaaaacuucuggaaagccaggggcgcaaggauauuaaacucaucgacauugcgcuguccaagaccgauucucggaaauaugagaacgcuguuugggaccaguacaaggaucugugccacaugcauacgggaguggucguggagaagaaaaagagaggcgggaaagaagagaucacaccucacugugcccuuauggacugcauuauguucgaugccgcugucagcggcggacucaauaccuccgugcugcgcgccguucugccccgggacaugguguuuagaaccucuacaccucgcgucgugcucuga

SEQ ID NO: 9287 - RNA, 1710 nt, Artificial Sequence; identical to SEQ ID NO: 9235
  derived and/or modified CDS sequence (opt5) from LASV(LM776-SLE-2012;Clade IV)__AIT17825__NP

SEQ ID NO: 9288 - RNA, 1710 nt, Artificial Sequence
  derived and/or modified CDS sequence (opt5) from LASV(Mad39;Clade IV)__ANH09723__NP
augagcgccuccaaggagaucaaaucuuuccuguggacccagagccucagacgggaacuguccggcuacugcucuaacauuaagcugcaaguggucaaagacgcucaggcccugcuccacgggcuggauuuuagcgagguuuccaaugugcagcgccuuaugagaaagcagcggcgcgacgauaacgaccugaaaagacuccgggaucugaaucaagcggugaacaaucuggucgaacucaagucuacacagcaaaagagcgugcugcgcguuggaacgcuuaccuccgacgaucugcucacacuggcugccgaccuugagaaacuuaagagcaaagugaccagaacagaacggccccucaccgccggcgucuauauggggaaccugucuucccagcagcuggaucagcgcagagcucuccugaauaugaucggaaugagcggcgggaaccagggagcccggacaggccgcgacggcgugguuagagugugggaugucaagaaugcugagcuucugaacaaucaguucgggaccaugccuucucucacgcuggccugucuuaccaaacaaggacagguggaccugaacgaugugguccaggcgcucacagaccugggccugauuuacaccgccaaguauccgaauacauccgaccucgaucggcugacccaaagccaucccauccuuaacaugauugacacgaauaagucuucccugaacaucagcggguacaacuuuucccucggagcugccguuaaagcuggcgccugcaugcuggaugggggaaauaugcuugagacaaucaaggugucuccucagaccauggacggcauucugaaaagcauccucaaggugaaaaagucccugggcauguucauuagcgauacacccggggaacgcaacccuuaugagaauauccuguacaaaauuugucucucuggagacggcuggcccuauaucgcguccagaaccagcauuaccgggcgggccugggaaaacacagucguggaucuggagucuggaggcaagccucagaaggcugggagcaauaacuccaauaaaucucuucagagcgccggauuugcugccggccugacguacucccaacucaugacccugaaggacgccaugcugcagcuugauccgaacgcuaaaacauggauggacaucgagggcagacccgaagauccuguugagaucgcgcucuaccagcccauuagcgggugcuauauccacuucuuucgcgaaccuaccgaccugaagcaguucaaacaagacgccaaguacucucauggaauugaugugacagaccuguuugcugcccagcccggccucaccuccgccgucaucgaggcucugccgcggaauauggugauuacgugucaggggagcgaugacaucagaaaacuuuucgaaucucagggacgcaaggauaucaagcugauugacaucgcccucuccaaaacagauagccggaaguaugagaacgcgguuugggaccaauacaaagaucugugccacaugcauaccggcguggucguggagaagaagaaaaagggcgggaaagaagagauuaccccucacugugcucugauggacugcaucauguuugaugccgccgucuccggaggccuuaauacacucgugcugagagcuguucugccccgcgacaugguguuccggaccucuacaccuaaggucgugcucuga

SEQ ID NO: 9289 - RNA, 1710 nt, Artificial Sequence
  derived and/or modified CDS sequence (opt5) from LASV(Mad41;Clade IV)__ANH09725__NP
augagcgccuccaaggagaucaaaucuuuccuguggacccagagccucagacgggaacuguccggcuacugcucuaacauuaagcugcaaguggucaaagacgcucaggcccugcuccacgggcuggauuuuagcgagguuuccaaugugcagcgccuuaugagaaagcagcggcgcgacgauaacgaccugaaaagacuccgggaucugaaucaagcggugaacaaucuggucgaacucaagucuacacagcaaaagagcgugcugcgcguuggaacgcuuaccuccgacgaucugcucauccuggcugccgaccuugagaaacuuaagagcaaagugacaagaaccgaacggccccucucugccggcgucuauauggggaaccuguccagccagcagcuggaucagcgcagagcucuccugaauaugauuggaaugucuggcgggaaccagggagcccgggcuggccgcgacggcgugguuagagugugggaugucaagaaugccgaccuucugaacaaucaguucgggacaaugccuucccucacccuggcgugucuuacaaaacaaggacagguggaucugaacgacgugguccaggcccucaccgaccugggccugaucuacacggcuaaguauccgaauaccagcgaucucgaccggcugacacaaucucaucccauucuuaacaugaucgauaccaauaaguccagccugaacaucuccggguacaacuuuucucucggagccgcuguuaaagccggcgcgugcaugcuggacgggggaaauaugcuugagacaauuaaggugagcccucagaccauggauggcauccugaaauccauucucaaggugaaaaagagccugggcauguucaucucugacacgcccggggagcgcaacccuuaugaaaauauucuguacaaaaucugucucuccggagauggcuggcccuauauugccagcagaacaucuaucaccgggcgggcuugggagaacacagucguggaccuggaaagcggaggcaagccucagaaggccggguccaauaacucuaauaaaagccuucaguccgcuggauuugccgccggccugaccuacagccaacucaugacccugaaggaugcuaugcugcagcuugacccgaacgcgaaaacauggauggauaucgagggcagacccgaggacccuguugaaauugcccucuaccagcccaucucugggugcuauauucacuucuuucgcgagccuacggaccugaagcaguucaaacaagaugcuaaguacucccauggaaucgacgugaccgaucuguuugccgcccagcccggccucacaagcgcugucauugaagcccugccgcggaauauggugaucaccugucaggggucugacgauaucagaaaacuucuggagucccagggacgcaaggacauuaagcucaucgauauugcgcugagcaaaacagacucccggaaguaugaaaacgcuguuugggaucaauacaaagaccugugccacaugcauaccggcguggucguggagaagaagaaaagagggggcaaggaggaaaucacgccucacugugcccuuauggauugcauuauguucgacgccgcugucucuggaggccucaauacacuggugcugcgcgccguucucccccgggauaugguguuuagaaccagcaccccuaaagucgugcuguga

SEQ ID NO: 9290 - RNA, 1710 nt, Artificial Sequence
  derived and/or modified CDS sequence (opt5) from LASV(Mad63;Clade IV)__ANH09729__NP
augagcgccuccaaggagaucaaaucuuuccuguggacccagagccucagacgggaacuguccggcuacugcucuaacauuaaacuucaaguggucaaggacgcucaggcccugcuccacgggcuggauuuuagcgagguuuccaaugugcagcgccuuaugagaaagcagcggcgcgacgauucugaccugaaaagacuccgggaucugaaccaagcggugaauaaccuggucgaacucaagagcacacagcagaaguccgugcugcgcguuggaacgcuuaccagcgacgaucugcucacacuggcugccgaccuugagaaacugaagucuaaagugaccagaacagaacggccccucuccgccggcgucuauauggggaaucugagcucucagcaacuggaucagcgcagagcucuccugaacaugaucggaauguccggcgggaaucagggagcccggaccggccgcgacggcgugguuagagugugggaugucaagaacgcugaccuucugaauaaccaguucgggacaaugccuagccucacccuggccugucuuacgaaacaaggacagguggaucugaaugacgugguccaggcgcucaccgaccugggccugauuuacacagccaaguauccgaacaccucugaucucgaccggcugacacaaucccaucccauccuuaauaugauugauaccaacaagagcucccugaauaucucuggguacaacuuuagccucggagcugccguuaaagcuggcgccugcaugcuggacgggggaaacaugcuugagacgaucaagguguccccucagacaauggauggcauucugaaaagcauccucaaggugaaaaagucucugggcauguucauuuccgacacccccggggagcgcaauccuuaugaaaacauccuguacaaaauuugucucagcggagauggcuggcccuauaucgcgucuagaacaagcauuaccgggcgggccugggagaauaccgucguggaccuggaauccggaggcaagccucagagagcugggucuaacaauagcaacaagucccuucagagcgccggauuugcugccggccugacauacucucaacucaugacgcugaaagaugccaugcugcagcuugacccgaaugcuaagaccuggauggauaucgagggccgccccgaggacccuguugaaaucgcgcucuaccagcccacauccgggugcuauauucacuucuuucgggagccuaccgaccugaaacaguucaagcaagaugccaaauacagccauggaaucgacgugacagaucuguuugcugcccagcccggccucaccucugccgucauugaagcucugccgagaaacauggugaucacgugucagggguccgacgauauucgcaaacuucuggagagccagggacggaaggacaucaagcucaucgauauugcccuguccaagacagacucuagaaaauaugaaaaugcgguuugggaucaauacaaggaccugugccacaugcauaccggcguggucguggagaaaaagaagaaagggggcaaggaggaaaucaccccucacugugcucuuauggauugcauuauguucgacgccgccgucagcggaggccucaacacacuggugcugcgcgcuguucucccccgggauaugguguuuagaaccuccacaccuaaagucgugcuguga

SEQ ID NO: 9291 - RNA, 1710 nt, Artificial Sequence
  derived and/or modified CDS sequence (opt5) from LASV(Mad69;Clade IV)__ANH09731__NP
augagcgccuccaaggagaucaaaucuuuccuguggacccagagccucagacgggaacuguccggcuacugcucuaacauuaagcugcaaguggucaaagacgcucaggcccugcuccacgggcuggauuuuagcgagguuuccaaugugcagcgccuuaugagaaagcagcggcgcgacgauaacgaccugaaaagacuccgggaucugaaucaagcggugaacaaucuggucgaacucaagucuacacagcaaaagagcgugcugcgcguuggaacgcuuaccuccgacgaucugcucacacuggcugccgaccuugagaaacuuaagagcaaagugaccagaacagaacggccccucucugccggcgucuauauggggaaccuguccagccagcagcuggaucagcgcagagcucuccugaauaugaucggaaugaccggcgggaaccagggagcccggacaggccgcgacggcgugguuagagugugggaugucaagaaugcugaccuucugaacaaucaguucgggaccaugccuucucucacgcuggccugucuuaccaaacaaggacagguggaucugaacgacgugguccaggcgcucacagaccugggccugauuuacaccgccaaguauccgaauacauccgaucucgaccggcugacccaaagccaucccauccuuaacaugauugauacgaauaagucuucccugaacaucagcggguacaacuuuucccucggagcugccguuaaagcuggcgccugcaugcuggacgggggaaauaugcuugagacaaucaaggugucuccucagaccauggauggcauucugaaaagcauccucaaggugaaaaagucccugggcauguucauuagcgacacacccggggagcgcaacccuuaugaaaauauccuguacaaaauuugucucucuggagauggcuggcccuauaucgcguccagaaccagcauuaccgggcgggccugggagaacacagucguggaccuggaaucuggaggcaagccucagagagcugggagcaauaacuccaauaagucucuucagagcgccggacuggcugccggccucacguacucccaacugaugacccugaaagaugccaugcuucagcucgacccgaacgcuaagacauggauggauaucgagggccgccccgaggacccuguugaaaucgcgcuguaccagcccaccagcgggugcuauauucacuuuuuccgggagccuacagaccugaaacaguuuaagcaagaugccaaauacucucauggaaucgacgugaccgaucucuucgcugcccagcccggccugacguccgccgucauugaagcccuuccgagaaauauggugaucacaugucaggggagcgacgauauucgcaagcugcucgagucucagggacggaaggacaucaaacugaucgauauugcucuguccaagaccgacagcagaaaauaugaaaacgcgguuugggaucaauacaaggaccuuugccacaugcauaccggcguggucguggagaaaaagaagaaagggggcaaggaggaaaucacaccucacugugcucucauggauugcauuauguuugacgccgccgucuccggaggccugaauacccuggugcuccgcgcuguucugccccgggauaugguguucagaacaucuacgccuaaagucgugcuuuga

SEQ ID NO: 9292 - RNA, 1710 nt, Artificial Sequence
  derived and/or modified CDS sequence (opt5) from LASV(Mad83;Clade IV)__ANH09733__NP
augagcgccuccaaggagaucaaaucuuuccuguggacccagagccucagacgggaacuguccggcuacugcucuaacauuaagcugcaaguggucaaagacgcucaggcccugcuccacgggcuggauuuuagcgagguuuccaaugugcagcgccuuaugagaaagcagcggcgcgacgauaacgaccugaaaagacuccgggaucugaaucaagcggugaacaaucuggucgaacucaagucuacacagcaaaagagcgugcugcgcguuggaacgcuuaccuccgacgaucugcucacacuggcugccgaccuugagaaacuuaagagcaaagugaccagaacagaacggccccucucugccggcgucuauauggggaaccuguccagccagcagcuggaucagcgcagagcucuccugaauaugaucggaaugucuggcgggaaccagggagcccggaccggccgcgacggcgugguuagagugugggaugucaagaaugcugaccuucugaacaaucaguucgggacaaugccuucccucacccuggccugucuuacgaaacaaggacagguggaucugaacgacgugguccaggcgcucaccgaccugggccugauuuacacagccaaguauccgaauaccagcgaucucgaccggcugacacaaucucaucccauccuuaacaugauugauaccaauaaguccagccugaacaucuccggguacaacuuuucucucggagcugccguuaaagcuggcgccugcaugcuggacgggggaaauaugcuugagacgaucaaggugagcccucagacaauggauggcauucugaaauccauccucaaggugaaaaagagccugggcauguucauuucugacacccccggggagcgcaacccuuaugaaaauauccuguacaaaauuugucucuccggagauggcuggcccuauaucgcgagcagaacaucuauuaccgggcgggccugggagaacaccgucguggaccuggaaagcggaggcaagccucagagagcuggguccaauaacucuaauaagagccuucaguccgccggauuugcugccggccugacauacagccaacucaugacgcugaaagaugccaugcugcagcuugacccgaacgcuaagaccuggauggauaucgagggccgccccgaggacccuguugaaaucgcguucuaccagcccauuucugggugcuauauccacuuuuuccgggagccuacagaccucaaacaguuuaagcaagaugccaaauacucccauggaauugacgugaccgaucuguucgcugcccagcccggccugacaagcgccgucaucgaagcucucccgagaaauauggugauuaccugucaggggucugacgauauccgcaagcugcuugagucccagggacggaaggacaucaaacugauugauaucgcccucagcaagacggacuccagaaaauaugaaaacgcgguuugggaucaauacaaggaccugugccacaugcauacaggcguggucguggagaaaaagaagaaagggggcaaggaggaaauuaccccucacugugcucugauggauugcaucauguuugacgccgccgucucuggaggccuuaauacccucgugcugcgcgcuguucugccccgggauaugguguucagaacaagcaccccuaaagucgugcucuga

SEQ ID NO: 9293 - RNA, 1710 nt, Artificial Sequence
  derived and/or modified CDS sequence (opt5) from LASV(NL;Clade IV)__AAO59513__NP
augagcgccuccaaggaggugaaaucuuuccuguggacccagagccucagacgggaacuguccggcuacugcucuaacaucaaacuucaagucguuaaggacgcucaggcccugcuccacgggcuggauuuuagcgagguguccaaugugcagcgccuuaugagaaaggaacggcgcgacgauucugaccugaaaagacuccgggaucugaaccaggcggucaauaaccugguggagcucaagagcacacaacagaaguccguucugcgcgugggaacgcuuaccagcgacgaucugcucguccuggcugccgaccuugaaaaacugagaucuaaggugacacggaccgagcgcccccucuccgccggcguuuauauggggaaucugagcucucagcagcuggaucaaagacgggcucuccuguccaugauuggaaugaacggcagcaaucagggggcccgcgcuggaagagacggcgugguccgggugugggaugugaaaaacgccgagcuucugaauaaccaguucggcacaaugccuucucucacccuggcgugucuuacaaagcaggggcaagucgaccugaaugaugccguucaggcucucaccgaccugggacugaucuacacggccaaauauccgaacaccuccgaccucgaucgccugacacagagccaucccauucuuaauaugaucgacaccaagaaguccucucugaacgugagcggcuacaauuuuucccucggggcugccgugaaagcgggagccugcaugcuggauggcgggaacaugcuugaaacaauuaaggucagcccucaaaccauggacggaauccugaaaucuauccucaaggugaaaaaggcucugggcauguucauuuccgauacgcccggcgagagaaacccuuaugaaaauauccuguacaaaauuugucucagcggggacggauggcccuauaucgccucucggacaagcauuaccggcagagcuugggagaacacaguuguggaucuggaguccgacgaaaagccucagaaggccgggucuaauaacagcaauaaaucccuucagagcgccggauuuaccgcuggccugaccuacucucagcucaugacacugaaggaugcgaugcugcaacuugacccgaacgccaaaacguggauggauaucgaggggcgccccgaagacccugucgagauugcucucuaccagcccuccagcggaugcuauauccacuucuuucgggaaccuaccgaccugaagcaguucaaacaggaugccaaguacucucauggcaucgacauuacagaucuguuugccgcucaacccggccucaccuccgccgugaucgacgcgcugccgagaaauaugguuauuacaugucaggggagcgaugacauccgcaaacuucuggagucccagggacggaaggauauuaagcucaucgacaucgcucugaacaaagccgauucuagaaaguaugagaaugccgugugggaccaguacaaagaucugugccacaugcauaccggcgucguggucgaaaagaagaaacgcgggggaaaggaggaaauuacgccucacugugcucuuauggacugcaucauguucgaugccgcugugagcggcgggcucaaaacacugguucugcgggccgugcuccccagagacauggucuuucgcaccuccaccccucgggugguucuguga

SEQ ID NO: 9294 - RNA, 1710 nt, Artificial Sequence
  derived and/or modified CDS sequence (opt5) from LASV(Z0947-SLE-2011;Clade IV)__AIT17841__NP
augagcgccuccaaggagaucaaaucuuuccuguggacccagagccucagacgggaacuguccggcuacugcucuaacauuaagcugcaaguggucaaagacgcucaggcccugcuccacgggcuggauuuuagcgagguuuccaaugugcagcgccuuaugagaaaggaacggcgcgacgauaacgaccugaaaagacuccgggaucugaaucaggcggugaacaaucuggucgagcucaagucuacacaacaaaagagcauccugcgcgugggaacgcuuaccuccgacgaucugcucauucuggcugccgaccuugaaaaacuuaagagcaaaguuacaagaaccgagcggccccucucugccggcguguauauggggaaccuguccagccagcagcuggaucagcgcagagcucuccugaauaugaucggaaugucuggcuccaaccagggggcccggacaggacgcgacggcgucgugagaguuugggaugugaagaaugcugagcuucugaacaaucaguucggcaccaugccuagccucacacuggccugucuuaccaaacaggggcaagucgaccugaacgaugcggugcaggcccucacggaccugggacugauuuacaccgcuaaguauccgaauacaucugaccucgaucggcugacccagucccaucccauccuuaacaugaucgacacaaagaaaagcucccugaauauuucuggcuacaacuuuagccucggggccgcugugaaggccggagcgugcaugcuggauggcgggaacaugcuugaaaccaucaaagucuccccucaaacgauggacggcauucucaagagcauccugaaaguuaagaaagcccugggaauguucauuucugaugcucccggcgagcgcaauccuuaugaaaacauccuguacaagauuugucucuccggggacggauggcccuauaucgccagcagaacaucuaucaccggccgggcuugggagaauacagugguggaucuggagagcgacgggaagccucagaaagccggauccaacggcucuaauaagagccuucaguccgccggguuuaccgcuggacugaccuacagccagcucaugacacugaaagaugcgaugcugcaacuugacccgaacgccaagacguggauggauauugaaggcagacccgaggacccugucgaaaucgcucucuaccagcccucuuccggcugcuauauucacuucuuucgcgagccuaccgaccugaaacaguucaagcaggaugccaaguacagccaugggaucgacgugacagaucuguuugccgcucaacccggacucaccucugccguuauugacgcgcugccgcggaauauggugaucacaugucagggcuccgaugacaucagaaaacuuuucgaaagccaggggcgcaaggauauuaaacugaucgacauugcucucuccaagaccgauucucggaaauaugagaacgccgucugggaccaguacaaggaucugugccacaugcauacgggaaucgugguugagaagaaaaagagaggcgggaaagaagagauuacaccucacugugcccugauggacugcaucauguuugaugcugccgugagcggcggacuuaauaccuccguccuccgcgcugugcugccccgggacauggucuucagaaccucuacaccucgcgugguucuguga

SEQ ID NO: 9295 - RNA, 1710 nt, Artificial Sequence
  derived and/or modified CDS sequence (opt5) from LASV(Z0948-SLE-2011;Clade IV)__AIT17845__NP
augagcgccuccaaggagaucaaaucuuuccuguggacccagagccucagacgggaacuguccggcuacugcucuaacauuaagcugcaaguggucaaagacgcucaggcccugcuccacgggcuggauuuuagcgagguuuccaaugugcagcgccuuaugagaaaggaacggcgcgacgauaacgaccugaaaagacuccgggaucugaaucaggcggugaacaaucuggucgagcucaagucuacacaacaaaagagcauccugcgcgugggaacgcuuaccuccgacgaucugcucauucuggcugccgaccuugaaaaacuuaagagcaaaguuacaagaaccgagcggccccucucugccggcguguauauggggaaccuguccagccagcagcuggaucagcgcagagcucuccugaauaugaucggaaugucuggcuccaaccagggggcccagacaggacgggacggcgucgugcgcguuugggaugugaagaaugcugagcuucugaacaaucaguucggcaccaugccuagccucacacuggccugucuuaccaaacaagggcaggucgaccugaacgaugcggugcaggcccucacggaccugggacugauuuacaccgcuaaguauccgaauacaucugaccucgauagacugacccaaucccaucccauccuuaacaugaucgacacaaagaaaagcucccugaauauuucuggcuacaacuuuagccucggggccgcugugaaggccggagcgugcaugcuggauggcgggaacaugcuugaaaccaucaaagucuccccucagacgauggacggcauucucaagagcauccugaaaguuaagaaagcccugggaauguucauuucugaugcucccggcgagcggaauccuuaugaaaacauccuguacaagauuugucucuccggggacggauggcccuauaucgccagccgcacaucuaucaccggcagagcuugggagaauacagugguggaucuggagagcgacgggaagccucagaaagccggauccaacggcucuaauaagagccuucaguccgccggguuuaccgcuggacugaccuacagccaacucaugacacugaaagaugcgaugcugcagcuugacccgaacgccaagacguggauggauauugaaggccggcccgaggacccugucgaaaucgcucucuaccagcccucuuccggcugcuauauucacuucuuuagagagccuaccgaccugaaacaguucaagcaagaugccaaguacagccaugggaucgacgugacagaucuguuugccgcucagcccggacucaccucugccguuauugacgcgcugccgcgcaauauggugaucacaugucagggcuccgaugacauccggaaacuuuucgaaagccaggggagaaaggauauuaaacugaucgacauugcucucuccaagaccgauucucgcaaauaugagaacgccgucugggaccaauacaaggaucugugccacaugcauacgggaaucgugguugagaagaaaaagcggggcgggaaagaagagauuacaccucacugugcccugauggacugcaucauguuugaugcugccgugagcggcggacuuaauaccuccguccucagagcugugcugccccgcgacauggucuuccggaccucuacaccuagagugguucuguga

SEQ ID NO: 9296 - RNA, 1710 nt, Artificial Sequence
  derived and/or modified CDS sequence (opt5) from LASV(Z148;Clade IV)__AAT49007__NP
augagcguguccaaggagaucaaaucuuuccuguggacccagagccucagacgggaacuguccggcuacugcucuaacauuaagcugcaagucguuaaagacgcccaggcucugcuccacgggcuggauuuuagcgagguguccaaugugcagcgccuuaugagaaagcagcggcgcgacgauaacgaccugaaaagacuccgggaucugaaucaagccgucaacaaucugguggaacucaagucuacacagcaaaagagcguucugcgcgugggaacgcuuaccuccgacgaucugcucauccuggcggcugaccuugagaaacuuaagagcaaagucacaagaaccgaacggccccucucugccggcauuuauauggggaaccuguccagccagcagcuggaucagcgcagagcccuccugaauaugaucggaaugucuggcgggaaccagggagcucagacaggccgggacggcgugguucgcauuugggaugugaagaaugccgagcuucugaacaaucaauucgggaccaugccuucccucacacuggcuugucuuaccaaacagggacaggucgaccugaacgauguggugcaagcccucacggaccugggccugaucuacaccgcgaaguauccgaauacaagcgaccucgauagacugacccagucucaucccauccuuaacaugauugacacaaagaaauccagccugaauaucuccggguacaacuuuucucucggagccgcugucaaggccggcgcuugcaugcuggaugggggaaacaugcuugagaccauuaaaguuagcccucagacgauggacggcauccugaaguccauucucaaagugaagaaagcccugggcauguucaucagcgauacacccggggaacggaauccuuaugagaacauucuguacaagaucugucucucuggagacggcuggcccuauaucgcgucccgcaccagcauuacagggagagccugggaaaauaccguggucgaucuggagucuggagagaagccucagaaaaucggcagcaacaauuccaacaagucucuucaaagcgcuggguuuaccgccggacugacauacucccagcucaugacgcugaaagacgcuaugcugcagcuugauccgaaugccaagaccuggauggacauugaaggccggcccgaggauccuguggaaaucgcccucuaccagcccagcucuggcugcuauauucacuucuuuagagagccuacagaccugaaacaauucaagcaggacgcuaaguacucccaugggaucgauguuaccgaccuguuugcggcccagcccggacucacaagcgcugugaucgaagcccugccgcgcaacauggucaugaccugucagggcucugaugacauucggaaacuucuggagucccaagggagaaaggauaucaaacucauugacaucgcccugagcaagacggauucccgcaaauaugagaaugcugugugggaccaguacaaggaucugugccacaugcauacaggaguuguggucgaaaagaaaaagaaaggcgggaaggaggaaauuaccccucacugugcccuuauggacugcaucauguucgaugcggcugccucuggcggacucaacacccuggugcugcgggccguccuccccagagacaugguguuucgcacaagcaccccuaaaguugugcuguga

SEQ ID NO: 9297 - RNA, 1710 nt, Artificial Sequence
  derived and/or modified CDS sequence (opt5) from LASV(Bamba-R114;Clade V)__AHC95554__NP
augagcgccuccaaggaggugagaucuuuccuguggacccagagccuccggcgcgaacuguccggcuacugcucuaacaucaaacuucaagucguuaaggacgcucaggcccugcuccacgggcuggauuuuagcgagguguccaaugugcagagacuuaugcggaaacagcgcagagacgauggagaccugaagcggcuccgcgaucugaaccaagcggucaauaaccugguggaacucaaaucuacacagcaaaagagcguucugagagugggcacgcuuaauuccgacgaucugcucacccuggcugccgaccuugagaagcugaaaagcaaggucacacggaccgaacgcccccucucuuccgggguguauaugggaaaccugagcucucagcagcuggaucagagacgggcccuccugaauaugauuggcaugacagggggaaaccagggcgcucaggccggccgcgacgggguugugagagucugggaugugaaaaaugcugagcuucugaacaaucaauucggaaccaugccuucccucacacuggccugucuuaccaagcagggccagguggaccugaacgaugucguucaagcgcucacggaccuggggcugaucuacaccgccaaauauccgaauacaagcgaccucgaucggcugacccagucucaucccauucuuaacaugaucgacacaaagaaguccagccugaauauuuccggauacaacuuuucucucggcgcugccgugaaagcuggggccugcaugcuggauggaggcaacaugcuugagaccaucaagaucagcccucaguccguggacggcauucugaaaagcauccucaaggucaaacgcucucuggggauguucguguccgauacgcccggagaaagaaauccuuaugagaacauucuguacaagaucugucucagcggcgacggguggcccuauauugcgucucggacaagcaucguuggcagagccugggaaaauaccguggucgaucuggaggcugacggaaaaccucagaagccgaacuccgggucuagcaauaagucccuucaaagcgccggauuucccgcuggccugacauacucucagcucaugacccugaaagaugccaugcugcagcuugacccuaacgccaagaccuggauggauauugagggccgccccgaagacccuguggagguugcucucuaccagcccuccagcgggugcuauauccacuucuuucgggaaccgacagaccugaaacaauucaagcaggaugcgaaauacucucauggaaucgacgugacggaucuguuugccgcucagccuggccucaccuccgccgucauugaggcccugcccagaaauauggugaucacaugucaggggagcgaagacauuaagaaacuucuggagucccaaggacgcaaggauaucaagcucauugacaucgcucugucuaaaaucgauagccggaaguucgagaacgccgucugggaccaguauaaagaucugugccacaugcauaccggcgugguuguggaaaagaagaaaagagggggcaaggaggaaauuacaccucacugugcgcuuauggacugcaucauguuugaugcugccgucuccggaggccucaaugccucugugcugcgcgcuguucugccccgggacaugguguucagaaccagcacgcccaaagucgugcucuga

SEQ ID NO: 9298 - RNA, 1710 nt, Artificial Sequence
  derived and/or modified CDS sequence (opt5) from LASV(Komina-R16;Clade V)__AHC95556__NP
augagcgccuccaaggaggugaaaucuuuccuguggacccagagccucagacgggaacuguccggcuacugcucuaacaucaaacuucaagucguuaaggacgcucaggcccugcuccacgggcuggauuuuagcgagguguccaaugugcagcgccuuaugagaaagcagcggcgcgacgauggagaccugaaaagacuccgggaucugaaccaagcggucaauaaccugguggaacucaagucuacacagcagaagaauguucugcgcgugggcacgcuuaacagcgacgaucugcucacccuggcugccgaccuugagaaacugaaguccaaagucacaagaaccgaacggccccucagcucugggguguauaugggaaaucuguccagccagcaacuggaucagcgcagagcccuccugaacaugauuggcaugacagggggaaaucagggcacccagacaggccgggacgggguugugcgcgucugggaugugaagaacgcugagcuucugaauaaccaauucggaaccaugccuucucucacgcuggccugucuuaccaaacagggccaggcugaccugaaugaugugguccaagcccucacagaccuggggcugaucuacaccgcgaaguauccgaacgccuccgaccucgauagacugacacagagccaucccauucuuaauaugaucgacaccaagaaaucuucccugaacauuagcggauacaacuuuucccucggcgcugccguuaaggcuggggccugcaugcuggauggaggcaauaugcuugagacgaucaaagugucuccucagagcauggacggcauccugaaguccauucucaaagugaagcgggcgcuggggauguucgucagcgauacacccggagaacgcaacccuuaugagaauauccuguacaaaauuugucucucuggcgacggguggcccuauaucgccuccagaaccagcauugugggacgggcuugggaaaacacaguuguggaucuggaggccgacggcaauccuaagaaacuuaacucuaaugggagcaacaagucccugcagucugcuggauuuccggccggccucaccuacagccaacugaugacccugaaggaugccaugcuucagcucgaccccaaugcuaaaacauggauggauaucgagggcagaccugaagaccccgucgagguggcgcuguaccagccuaacuccgggugcuauauucacuucuuucgcgaacccacggaccugaagcaguucaaacaagaugccaaguacagccauggaaucgacguuaccgaucucuuugcugcccagccgggccugacaucugccgugaucgaggcccuuccucggaauauggucauuaccugucagggguccgaagacaucagaaagcugcucgagagccagggacgcaaagauauuaagcugaucgacauugcucugucuaaaacagauucccggaaguucgagaacgcggugugggaccaacacaaagaucuuugccauaugcacaccggcgucgugguugaaaagaagaaaagagggggcaaggaggaaaucacgccccacugugcucucauggacugcaucauguuugaugccgccgugagcggaggccugaauacacugguccuccgcgcugugcugccucgggacaugguuuucagaaccuccacccccaaagugguccuuuga

SEQ ID NO: 9299 - RNA, 1710 nt, Artificial Sequence
  derived and/or modified CDS sequence (opt5) from LASV(Ouoma-R123;Clade V)__AHC95558__NP
augagcgccuccaaggaggugagaucuuuccuguggacccagagccuccggcgcgaacuguccggcuacugcucuaacaucaaacuucaagucguuaaggacgcucaggcccugcuccacgggcuggauuuuagcgagguguccaaugugcagagacuuaugcggaaacagcgcagagacgauucugaccugaagcggcuccgcgaucugaaccaagcggucaauaaccugguggaacucaaaagcacacagcagaaguccguucugagagugggaacgcuuagcucugacgaucugcucacccuggcugccgaccuugagaagcugaaauccaaggucauucggacagaacgcccccucagcucuggcguguauauggggaaucuguccagccagcaacuggaucagagacgggcccuccugaacaugaucggaaugaccggcgggaaucagggagcucaggccggccgcgacggcguugugagagucugggaugugcggaacgcugagcuucugaauaaccaauucgggacaaugccuucucucacccuggccugucuuacaaaacagggacagguggaccugaaugaugucguucaagcgcucaccgaccugggccugauuuacacggccaaguauccgaacaccuccgaccucgaucgccugacacagaaucaucccauccuuaacaugauugacaccaaaaagagcucccugaauaucucuggguacaacuuuagccucggagcugccgugaaggcuggcgccugcaugcuggaugggggaaacaugcuugagacaaucaaaguguccccucagagcauugacggcauccugaagucuauucucaaagucaagagaacccugggcauguucguguccgauacgcccggggaacggaauccuuaugagaacauccuguacaaaauuugucucagcggagacggcuggcccuauaucgcgucuagaacaagcauuguugggcgcgccugggaaaauaccguggucgaucuggagacagaccggaagucccagggaccuaacucuggcaauagcaacaaaucccuucaaagcgcuggguuuucugccggacugaccuacucccagcucaugacccugaaggaugcuaugcugcagcuugacccgaaugccaagacauggauggauaucgagggcagacccgaagacccuguggagguugcccucuaccagcccaucagcggcugcuauauucacuucuuucgcgaaccuacggaccugaaacaauucaagcaggaugcuaaauacucucaugggaucgacauuaccgaucuguuugcggcccagcccggacucacauccgcugugaucgaggcccugccgcggaacauggucauuaccugucagggcagcgaagacaucaagaaacuucuggagucccaagggagaaaggauaucaagcucauugacaucgcccugucuaaaauugauagccgcaaguucgagaaugcugugugggaccaguauaaagaucugugccacaugcauacaggagucgugguugaaaagaaaaagcggggcgggaaggaggaaaucaccccucacugugcccuuauggacugcauuauguuugaugcggcuguguccggcggacucaacgccucuguccugagagccgugcugccccgcgacaugguuuuccggacgagcacaccuaaagugguccucuga

SEQ ID NO: 9300 - RNA, 1710 nt, Artificial Sequence
  derived and/or modified CDS sequence (opt5) from LASV(Soromba-R;Clade V)__AHC95552__NP
augagcgccuccaaggaggugaaaucuuuccuguggacccagagccucagacgggaacuguccggcuacugcucuaacaucaaacuucaagucguuaaggacgcucaggcccugcuccacgggcuggauuuuagcgagguguccaaugugcagcgccuuaugagaaagcagcggcgcgacgauggagaccugaaaagacuccgggaucugaaccaagcggucaauaaccugguggaacucaagucuacccagcagaagaauguucugcgcgugggcacgcuuaacagcgacgaucugcucacccuggcugccgaccuugagaaacugaaguccaaagucacaagaaccgaacggccccucagcucugggguguauaugggaaaucuguccagccagcaacuggaucagcgcagagcccuccugaacaugauuggcaugacagggggaaaucagggcacccaggcuggccgggacgggguugugcgcgucugggaugugaagaacgccgagcuucugaauaaccaauucggaacaaugccuucucucacccuggcuugucuuacgaaacagggccaggccgaccugaaugaugugguccaagcgcucaccgaccuggggcugaucuacacagccaaguauccgaacgcuuccgaccucgauagacugacccagagccaucccauucuuaauaugaucgacacaaagaaaucuucccugaacauuagcggauacaacuuuucccucggcgccgcuguuaaggccggggcgugcaugcuggauggaggcaauaugcuugagaccaucaaagugucuccucagagcauggacggcauccugaaguccauucucaaagugaagcgggcccuggggauguucgucagcgauacgcccggagaacgcaacccuuaugagaauauccuguacaaaauuugucucucuggcgacggguggcccuauaucgcuuccagaacaagcauugugggacgggccugggaaaacaccguuguggaucuggaggcugacggcaauccuaagaaacuuaacucuaaugggagcaacaagucccugcagucugccggauuuccggccggccucacauacagccaacugaugacccugaaggaugcuaugcuucagcucgaccccaaugcgaaaaccuggauggauaucgagggcagaccugaagaccccgucgagguggcccuguaccagccuaacuccgggugcuauauucacuucuuucgcgaacccacagaccugaagcaguucaaacaagaugcuaaguacagccauggaaucgacguuacggaucucuuugccgcccagccgggccugaccucugcugugaucgaggcccuuccucggaauauggucauuacaugucagggguccgaagacaucagaaagcugcucgagagccagggacgcaaagauauuaagcugaucgacauugcgcugucuaaaaccgauucccggaaguucgagaacgcugugugggaccaauauaaagaucuuugccacaugcauacaggcgucgugguugaaaagaagaaaagagggggcaaggaggaaaucacgccccacugugcccucauggacugcaucauguuugaugccgcugugagcggaggccugaauacccugguccuccgcgccgugcugccucgggacaugguuuucagaacauccacaccccgcgugguccuuuga

SEQ ID NO: 9301 - RNA, 1710 nt, Artificial Sequence
  derived and/or modified CDS sequence (opt5) from LASV(Soromba-R30;Clade V)__AHC95560__NP
augagcgccuccaaggaggugaaaucuuuccuguggacccagagccucagacgggaacuguccggcuacugcucuaacaucaagcugcaagucguuaaagacgcucaggcccugcuccacgggcuggauuuuagcgagguguccaaugugcagcgccuuaugagaaagcagcggcgcgacgauggagaccugaaaagacuccgggaucugaaccaagcggucaauaaccugguggaacucaagucuacacagcagaagaauguucugcgcgugggcacgcuuaacagcgacgaucugcucacccuggcugccgaccuugagaaacugaaguccaaagucacaagaaccgaacggccccucagcucugggguguauaugggaaaucuguccagccagcaacuggaucagcgcagagcccuccugaacaugauuggcaugucugggggaaaucagggcacacagguuggccgggacggggugguccgcgugugggaugugaagaacgcugagcuucugaauaaccaauucggaaccaugccuucccucacacuggccugucuuaccaaacagggccaggcugaccugaaugaugucguucaagcccucacggaccuggggcugaucuacaccgcgaaguauccgaacgccagcgaccucgauagacugacacagucucaucccauucuuaauaugaucgacaccaagaaauccagccugaacauuuccggauacaacuuuucucucggcgcugccgugaaggcuggggccugcaugcuggauggaggcaauaugcuugagacaaucaaagugagcccucaguccauggacggcauccuuaagagcauucucaaagucaagcgggcgcuggggauguucgugucugauacccccggagaacgcaacccuuaugagaauauccuguacaaaauuugucucuccggcgacggguggcccuauaucgccagcagaacgucuauuguuggacgggcuugggaaaacacaguggucgaucuggaggccgacggcaauccuaagaaacuuaacagcaauggguccaacaagucucugcagagcgcuggauuuccggccggccucaccuacucccaacugaugacacugaaggaugccaugcuucagcucgaccccaaugcuaaaaccuggauggauaucgagggcagaccugaagaccccguggagguugcgcuguaccagccuaacagcgggugcuauauucacuucuuucgcgaacccaccgaccugaagcaguucaaacaagaugccaaguacucucauggaaucgacgugacagaucucuuugcugcccagccgggccugacguccgccgucaucgaggcccuuccucggaauauggugauuaccugucaggggagcgaagacaucagaaagcugcucgagucucagggacgcaaagauauuaagcugaucgacauugcucuguccaaaacagauagccggaaguucgagaacgcggucugggaccaacacaaagaucuuugccauaugcacaccggcgugguuguggaaaagaagaaaagagggggcaaggaggaaaucacaccccacugugcucucauggacugcaucauguuugaugccgccgucuccggaggccugaauacccuggugcuccgcgcuguucugccucgggacaugguguucagaacgucuacacccaaagucgugcuuuga

SEQ ID NO: 9302 - RNA, 1710 nt, Artificial Sequence; identical to SEQ ID NO: 9058
  derived and/or modified CDS sequence (opt5) from LASV(Alzey;Clade VI)__SCA79106__NP

SEQ ID NO: 9303 - RNA, 1710 nt, Artificial Sequence
  derived and/or modified CDS sequence (opt5) from LASV(NIGERIA IKEJI;Clade II)__AMZ00372__NP
augagcguguccaaggaggucaaaucuuuccuguggacccagagccucagacgggaacuguccggcuacugcucuaacaucaaacuucaaguugugaaggacgcccaggcucugcuccacgggcuggauuuuagcgagguguccaauguccagcgccuuaugagaaagcagaaacgggacgauaacgaccugaagcgccucagagaucugaaucaagccgugaacaaucugguugaacucaagucugugcagcagaaaagcauucugcgggucggaacacuuacguccgacgaucugcucacccuggcggcugaccuugagaagcugaaaagcaaggugauccgcacagaaagaccccucucuuccggcguuuauauggggaaccugagcucucagcaacuggagcagcggaaagcccuccugaccaugauuggaaugacaggcgggucccagagcgcccagccuggacgcgauggcguggucagagugugggacgugaaaaauucugaucuucugaacaaucaauucggcaccaugccgucccucacacuggcuugucuuaccaagcaggggcaggucgaccugaacgaugccguucucgcucugacggaccugggacucaucuacaccgccaaguaucccaauacaagcgaccuggaucggcuuucccaaucucauccuauucugaacaugguggacaccaagaaaagcucccucaauaucagcggcuacaacuuuucucugggggcggccgugaaggcuggagccugcaugcuugauggcgggaauaugcuggagacaaucaaagucacgccccagaccauggacggcauucucaaguccauccugaaagugaagcgcgcucugggaauguucguuagcgauacaccuggcgaaagaaaccccuaugagaacauucucuacaagaucugucugucuggggacggauggccuuauauugccagccggaccuccaucgugggccgcgcgugggaaaauacaauugucgaucuugagucugacagcaaaccgcagaaggugggggccaucggauccaacaaaagccugcagucugcuggcuuucccgccgggcucaccuacucccaacugaugacccugaaggauagcaugaugcagcuugacccuucugcuaaaacauggaucgauauugagggaagacccgaagacccuguugagaucgcccucuaccagcccauuuccggcugcuauauccacuucuuucgggaaccgacggaccugaagcaguucaagcaagaugccaaauacagccauggcauugacguggcugaucuguuuuccgcgcagccugggcucaccucugccgucaucgaggcucugcccagaaauauggugcuuacaugucagggaagcgacgauaucaagaaacugcucgacucccagggccgccgggauauuaagcugaucgacauuucucugaacaaagccgauagcagacgcuucgaaaaugccgucugggaccaaugcaaggaucuuugucacaugcauaccggggugguuguggagaagaaaaagcggggaggcaaagaggaaaucacaccucacugcgcucucauggacuguauuauguuugaugccgcggucuccgggggccugaacauccccacccugagagcugugcucccccgcgacaugguuuuccggacgagcucuccuaaggugguccuguga

SEQ ID NO: 9304 - RNA, 1710 nt, Artificial Sequence
  derived and/or modified CDS sequence (opt6) from LASV(Josiah;Clade IV)__NP_694869__NP
augagugcaucaaaagaaauaaaaucauuccuauggacacaaagccuaagaagggaacuaucaggcuauugcucaaacauaaaauuacaaguagucaaagacgcacaagcucucuuacacggucuagauuuuagugaaguaucaaacguucaaagauuaaugagaaaagagagacgagaugauaacgaccuaaaaagacuaagagaucuaaaucaagcaguaaacaaccuuguagaacuaaaaagcacacaacaaaaauccauccuacguguaggaacauuaacaagugaugacuuauuaauccuagcagcagaucuagaaaaacuuaaaagcaaagucauaagaacugaacgaccgcucagugcagguguauauaugggaaaucucucgucgcaacaauuagaucaaagaagagcacuacuuaauaugauaggaaugucaggaggaaaucaaggugcacgcgcaggaagagacggaguagugagaguaugggacguaaaaaacgcagaauuauuaaauaaccaauuuggaacaaugccauccuuaacuuuagccugucuaaccaaacaaggacaaguagaccuaaaugacgcaguacaagcacuaacugacuuaggacuuauauauacagccaaauauccaaauacaucagauuuagacagacucacacaaucacaccccauacuaaacaugauagacacaaaaaaaagcaguuuaaauauaucagguuacaauuuuucacuuggagcagcgguaaaagcaggcgccuguauguuagacggcgguaacauguuagaaacaauaaagguaagcccucaaacaauggauggaauacuaaaaaguauauuaaaaguaaaaaaagcacuaggaauguuuauaagugauaccccaggagaaagaaacccauacgaaaauauauuauacaaaauauguuuaaguggagauggauggccauauauagcauccagaaccagcauaacaggaagagcaugggaaaauaccguaguagaucuagaaucagauggaaaaccacaaaaagcagauucaaacaauaguaguaaaagccuccaaucagcagguuuuacagcaggacuaacauauagucaacuaaugacacuuaaagaugcaaugcuacaacuagauccaaaugcaaaaacauggauggauauagaaggacgaccagaagacccgguagaaauagcacuauaucaacccaguagcggaugcuacauucauuuuuuuagagaaccaacagaucuaaaacaauucaaacaagaugcaaaauauagucacggcauugacguaacagauuuauuugcaacacaaccaggauuaacaagugccgucauagaugcauuaccaagaaacaugguaauaacaugccaaggaagcgaugacauuagaaaacuacuagaaagucaaggaagaaaagacaucaaacugauagauaucgcguuaucaaaaacggacucacgaaaauaugaaaaugcaguuugggaccaauauaaagauuuaugccacaugcauacaggaguaguuguagaaaaaaaaaagagaggaggaaaagaagaaauaacaccacauugcgcauuaauggauugcauaauguuugaugccgcaguaagcggcggacuaaauacuucaguacuacgagcaguacuaccaagagauaugguauuucgaaccucuaccccaaggguaguauuauaa

SEQ ID NO: 9305 - RNA, 1710 nt, Artificial Sequence
  derived and/or modified CDS sequence (opt6) from LASV(LP;Clade I)__AAF86702__NP
augucaaauagcaaagaaaucaaaucauuucuuuggacacaaucauuaagaagagaauuaucaggauauugcucaaacauaaaacuacaaguuguaaaagacgcucaagcacuacuucacggacuagacuucucugaaguaucaaauguacaaagauuaaugcgaaaacaaaaacgagaugaugcagaccuaaaaagacuaagagaccuaaaucaagcaguaaauaauuuaguagaacuaaaaucaacccaacagaaaaaugucuuaagagugggaaccuuaagcucagaugauuuaauaacacuagcagcagaccuagaaaaacuuaaaucaaaagucauaagaacagaacggccacuguccucaggaguauauauggguaauuuaucaucacaacaacuugaucagaggagagcccuacuaucaaugauuggaaugaguggagguccacaaggaaacagaacaggcggugacggcguaguuagaguaugggauguuaaaaacgcagaauuauuaaauaaucaauucggcaccaugccaagucuaacucuagcaugccuuacaaaacaaggacaaguagacuuaaacgaugcaguacaagcucuaacugaccugggcuuaauauauacagcaaaauauccuaauucaagcgacuuagacauguuaacacaaagccacccuauacuaggaaugguagacaccaagaaaaguaguuuaaacauaaguggauacaauuuuucacuuggggcggcagugaaagcaggggcauguaugcuugacggaggcaacaugcuagaaacgauaaaaguaucaccacaaacuauggauggcauucuaaaaagcauacuaaaaguaaaaagaagucuaggaauguuuauaucagacacgccaggagaaagaaauccauacgaaaauauacuauauaaaauaugcuuaucaggagaagguuggccauauaucgcuucaagaacaucaauaacagguagagcaugggaaaacacucuaguagaucuugaaagugacaauaaaccaccaaaacuuaauucagcaggaagcaauaaaucacuacaagcagcuggcuuaaaugccggacuaacauauucacaauuaaugacauuaaaagauugcauguuacaacuagauccuaguucaaaaaccuggaucgacaucgaaggaagaccagaagacccagucgaaaucgcacuauuucaaccaucaaguggaugcuacauucacuucuuuagagaaccaacagauuuaaaacaauucaaacaagacgcuaaauacagucacggaauagauguaacagaccuuuucagcacacaacccggauuaacaagugcaguuauagaagcacuacccagaaacaugguauuaacaugucaagguucagaugauaucaagaaacuauuagagucacaaggaagaagagauaucaaauuaauagauauaaguuuaaguaaagcagacucuagaaaauucgaaaacgcaguaugggaucaauacaaagaccuaugccacaugcauacaggaguuguaguagagaaaaagaaaagaggaggaaaagaagaaauaacaccacauugugcucuacuagacugcauaauguucgacgcagcaacuacuggaucacuaaacaucacaacacuaagagcaguccuacccagagauaugguauucagaacaagcacaccuaaaguaguacuauaa

SEQ ID NO: 9306 - RNA, 1710 nt, Artificial Sequence
  derived and/or modified CDS sequence (opt6) from LASV(803213;Clade II)__AAF86704__NP
auguccgcaucaaaagaagucaaaaguuuccuauggacacaaagccucagaagagaacuaucaggauacugcucaaacauuaaacuacagguaguaaaagaugcucaagcccuucuacacggacuagauuucucagaaguaaauaacguacaaagacuaaugagaaaacaaaaacgagacgauggggauuuaaaaagauuaagagaucuaaaccaagccguaaacaaucuaguagaauuaaaaucaacacaacaaaaaucuauauuaagaguaggaacacuaacuucagaugaccuauuaacacucgcagcagaucucgaaaaacucaaaucaaaaguaauaagaacugaaaggccacuaucuuccggcguuuacaugggaaaucuaucaacucaacaauuagaacaaagacgagcauuacuaaauaugaucggaauggucggcggagcacaaggaacucaaccuggaagggacgguguuguccgaguaugggacguaaaaaacccagauuuacucaauaaccaauuuggaacaaugccaagccucacacuagcuugccuaacgaagcaaggucaaguggacuuaaaugaugcaguauuagcacuaacugacuuaggauuaauauacacugccaaauauccuaacucaucagacuuagacagauuaucacaaagccacccgauauuaaacaugguagauacaaaaaaaucaaguuuaaacauuagcggcuacaacuucucacuaggugccgccguaaaagcaggugcaugcaugcuugauggaggaaauaugcuagaaacaauaaaagucacaccccaaacaauggacggaauacuaaaaaguauauuaaaaguaaaaagaucgcuaggaauguucguaagcgauacaccuggagaaagaaauccauaugaaaauauuuuauauaaaauaugccucaguggagauggauggccauauauagcaucgagaacaucuauaguaggacgagcuugggaaaauacaacaguagaucuagaaucagacggaaaaccacaaaaaguaggaacagcaggcucaaauaagucccuacaaucagcaggauucccaacaggauuaacauauagccaacuaaugacccuaaaagauucaaugaugcaauuggauccaucugcaaaaacuuggauagacauagaaggaagaccagaagaucccguagaaauugcauuauaucaaccaaugucaggauguuauauacacuucuuuagagaaccaacugaccuaaaacaauuuaaacaagaugcuaaauacucacauggaauagacguugcagauuuauuuccagcacaacccggcuuaacaucugcaguaauagaggccuuaccacgaaauaugguauuaacaugucaaggaucggaugauauaaaaaaacuucuagacucucaaggaagaagagacauaaaacuaauagauauauccuuaaguaaagucgauagccgaaaauuugaaaaugcuguaugggaccaaugcaaagacuuaugucacaugcauacaggaguuguuguagaaaaaaaaaaaagagguggaaaagaagaaauaacaccacauugugcacuuauggauuguauaauguuugacgcugccguaagcggaggauuaaauauuccuguauuacgagcuguguuaccaagagacaugguuuucagaacaucaucaccaaaaguaguauuauaa

SEQ ID NO: 9307 - RNA, 1713 nt, Artificial Sequence
  derived and/or modified CDS sequence (opt6) from LASV(GA391;Clade III)__CAA36646__NP
augucagcauccaaagaaguaagaucauucuuauggacacaaucacuaagacgcgaacuaaguggauauugcaguaacauaaaacuacaaguuguaaaagaugcacaagcucuacuacacggccucgauuucucagaaguaucaaauguccaacguuuaaugagaaaacaaaaacgagaugacggagauuuaaaaagauuaagagaucuaaaccaagcaguuaauaaccuuguagaacucaaauccacacaacaaaaaucaguauuaagaguaggaacacuaucaucagaugacuuguuaauucuagcagcagaccuagaaaaacuaaaaucaaaaguaaccagaacagaaagaccacuaaguagcggaguauauaugggaaaccuaucaucucaacaacuagaucaaagacgagcauuacuaaacaugauugguaugacaggaguaagcggcggaggaaaaggugcuucagacggaauuguaagaguaugggacgucaaaaacgcagaauuauuaaauaaucaauuuggaacuaugcccucacuuacacuagcuuguuugacaaaacaaggacaaguagacuuaaaugaugcaguacaagcacuaacggaucuagguuuaauauauacagcgaaauauccaaacucuucagaccuagaccgauuaucucaaucacacccuauacuaaauaugauagauaccaagaaaagcucauuaaauaucagcggcuauaauuucucacuaggugcagcaguaaaagcaggggcuugcaugcuagauggaggcaauaugcucgaaacgauaaaaguaucaccacaaacaauggacggaauauuaaaaucuaucuuaaaaguaaagaaaucacuaggaauguucguaagcgauacaccuggagaaagaaauccauaugaaaacauucuauauaaaaucuguuuaucuggagacggauggcccuauauagcaucucgaacuucuauaguaggcagagccugggaaaauaccguuguagaucuagaacaagauaacaaaccacagaaaauaggaaacggaggaucaaauaaaucauuacaaucugcaggauuugccgcaggauuaacauauagucaacuaaugacauuaaaagauuucaaaugcuuuaacuuaauacccaacgcgaaaacauggauggacauagaaggaagaccagaagauccaguagaaauugcucuauaccaaccaucaucaggauguuauguacauuucuuuagagaaccgacagacuuaaaacaauuuaaacaagaugcaaaauauucacacggaaucgacguaaccgacuuauuugcagcacaaccuggacuaacuucagcaguaauagaagcccucccacgaaauaugguaauaacaugucaagguucagaagauauacgaaaauuauuagaaagccaaggaaggagagacaucaaacuaauagauauaacucuaaguaaagcagacucuagaaaauuugagaaugcaguaugggaucaauuuaaagaucuaugucacaugcacacaggcguaguuguugagaaaaagaaaagaggaggaaaagaagaaauaacuccacauugcgcgcuaauggacuguauaauguuugaugcagcaguaucaggaggacuagaugcaaaaguucucagaguaguauuaccacgagacaugguuuucagaaccaguacaccaaaaguaguauuauaa

SEQ ID NO: 9308 - RNA, 1710 nt, Artificial Sequence
  derived and/or modified CDS sequence (opt6) from LASV(AV;Clade V)__CCA30315__NP
augagcgcauccaaagaaguaaaaucuuucuuauggacacaaucacuaagacgcgaacuaagcggauauuguucaaauaucaaauuacaagucguaaaagacgcacaagcucuacuacacggacuagacuucucagaaguaucaaauguacaaagauuaaugagaaaacaacgaagagaugauucagacuuaaaacgauuacgcgacuuaaaccaagccguaaauaauuuaguagaauuaaagaguacucaacaaaaaucaguauuaagaguaggaacacugucaagcgaugaccuuuuaacacuagcugcagaccuugaaaaauuaaaaaguaaaguaacaagaacugaaaggccacuaucgaguggaguauauaugggaaauuuaucaucccaacaauuagaucaaagaagagcauuacugaaucuaauagguaugacaaacggaucacaaggaagccaagcaggaagagacggaguagugagaguaugggaugucaaaaaugcugaauuauuaaauaaccaauucggaacaaugccaucauuaacauuagcaugccuaacaaaacaaggucaagucgauuuaaacgauguaguacaagcacuaacagaccuuggauuaauauauaccgcaaaauacccaaauacaagcgacuuagaucgacucacucaaucacacccaauacuaaacaugauagauacaaaaaaauccagcuuaaacauaucaggauacaauuuuucguuaggcgcagcuguaaaagcaggggcauguaugcuagacggaggaaauaugcucgagacaauuaaaguaucaccacaaucuauggauggaauacuuaaaaguauacuaaaaguaaaaagggcauuaggaauguucguaagugauacaccaggagaaagaaauccauacgaaaauauauuauacaaaauaugucuaagcggugaugguuggccguauauagcuagcagaacaucuauagucggaagagcaugggaaaauacaguagucgauuuagaaacagauggaaaaccacaaaaaauaggcucuggaaacucaaacaaaucacuacaaucagccggcuuuucagcaggacuuacauacucccaauugaugacauuaaaagaugcaaugcuacaacuagacccaaaugcaaaaacauggauggauauagaaggucggcccgaagacccaguagaaguagcucuauaucaaccuauaaguggauguuacauacacuucuuucgagaaccaacugacuuaaaacaauucaaacaagacgcuaaguacagucauggaauugauauagcagaucucuucgcagcacaaccaggacuaacuucagcaguaauagaagcucuaccuagaaauaugguaauaacaugccaagguucagaagacauaaaaaaacuacuagaaucucaaggaagaaaagacauuaaacuaauugauauagcacuaaguaaaauagacucaagaaaauucgaaaaugcuguuugggaccaauauaaagaccuaugucacaugcauaccggagucguuguugaaaaaaaaaaaagaggaggaaaagaagaaauaacaccacauugugcucuaauggauugcauaauguuugaugcugcagucagcggaggauuaaacacacuuguccuaagagcaguauuaccacgugauaugguauuuagaacaucaaccccccgaguaguauuauaa

SEQ ID NO: 9309 - RNA, 1710 nt, Artificial Sequence
  derived and/or modified CDS sequence (opt6) from LASV(Togo/2016/7082;Clade VI)__AMR44578__NP
augucuaauucaaaagaaguaaaaucauuuuuauggacucaaagucuacgaagagaacuaagcggauacugcucaaauauaaaacuacaaguaguuaaagacgcucaagccuuauuacacggucucgauuucagugaaguaucaaauguacaaagauugaugagaaaacaaaaaagagacgacggagaucuaaaacggcuaagagaucuuaaucaagcuguaaacaauuugguagaacucaaaucaguacaacaaaaaucaauacuuagaguaggaacacuaacaucagacgaccuauuaacauuagcugccgaucuagaaaaacuaaaaagcaaaguaaccagaacagaacgaccacuaucgaguggaguauacaugggaaacuuaaguagccaacaacuagaucaaagaagagcacuacuaagcaugauuggaaugucaggaggaaaccaaaauagucaaccuaaaggggauggaguaguacgagucugggacguuaaaaacgccgaccucuuaaauaaccaauucggaacaaugccaagucuaacauuagcuuguuuaaccaaacaaggacaaguagaccuaaacgaugcaguacaagcccuaacagaccuaggacuaauauauacagcaaaauauccaaauagcucagauuuagacagauuaucacaaucacacccaaucuuaaacaugauugauacaaaaaaauccagccucaacauuucaggauacaauuucucacucggcgcagcaauuaaaaccggugcaugcaugcuugauggaggaaauaugcuugaaacaauaaaaguaacaccacagacaauggacggaauccuaaaaucaauacugaaagucaaaagaucacuuggcauguucaucagugauacacccggagaaagaaauccauaugaaaacauauuauacaaaauauguuuaaguggagauggauggccauauauagcuucacgaacugcaaucauagguagagccugggaaaauacaguaguagacuuagaaucagacagcaaaccccaaaaaauaggauccaacgguucaaauaaaucacuacaaucagcaggauucgcacccggcuuaacauauucacaacuaaugacucuaaaagacucaaugcuacaacuagauccaaacgccaaaacauggaucgacauugaaggacgacccgaagacccaguugaaguagcacuauuccaaccaauaaguggcugcuauauccacuuuuuuagagaacccacagaucuaaaacaauucaaacaagacgccaaauauucccacggcauagacguaacugacuuauucgcagcacaaccaggacuaacaucagcaguaaucgaagcccuuccaagaaauaugguacuaacaugccaaggcucagaugauauaaaaaaacuacucgacucacaaggccguagagauaucaaauuaauagacguaucacuaaacaaaauagacucaaggaaauuugaaaacgcaguaugggaucaauauaaagacuuaugccacaugcauacaggaguaguagucgaaaaaaaaaaaaaagguggaaaagaagaaauaaccccacacugugcuuuacuugauuguauaauguucgaugcugcaguaaguggaggacuaaacgcaaccguacucagagcaguacugccuagagauaugguauucagaacaucaaguccaaaaguaguacuuuaa

SEQ ID NO: 9310 - RNA, 1710 nt, Artificial Sequence
  derived and/or modified CDS sequence (opt6) from LASV(KAK-428;Clade n.d. (VII))__ANH09741__NP
augucaaauucaaaagaaguuaaaucauuuuuauggacacaaucuuuaaggagagaauuaagcggcuauuguacaaacauuaaauuacaaguaguaaaagaugcacaagcauuauuacauggauuagauuucucagaaguaucgaacguacaacgauuaaugaggaaacagaaaagggacgauaacgaccuaaaaagacuuagagaucuaaaccaagcuguaaacaacuuagucgaacuaaaaucaguacaacaaaaaucaguacuaaaaguaggaacauuaaauagugaugauuuacucacacuagcagcugaucuagaaaaauuaaaaucaaaaguagucagaacagaaagaccauuaaguucagguguauacauggguaaucuaagcagccaacaacuagaucaaagacgagcauuauuaaacaugauaggaauggcaggaggaagccaagguaaucaaccuagcagagacgguguuguuagagucugggacgucaaaaaugcagauuuacuaaauaaucaauuuggaacaaugccaucauuaacauuagcuugucuuaccaaacaaggacaaguagacuuaaaugacguaguuuuagcauuaacggaccuaggauuaauauacacagcaaaauauccaaauuccucagaccuagacagauuaagucaaaaucauccuguauuaaacaugauagacgucaauaaaucaucacuaaauauaucaggauacaauuucucucuaggagccgcaguaaaagccggagcaugcaugcuggacggaggaaauauguuagaaacaaucaaaaucucaccgcaaacaguagaugguauauuaaaaaguauauuaaaaguaaaaagagcccuaggaauguuuguaucagacacuccaggagaaagaaauccauaugaaaacaucuuauauaaaguauguuuaucgggaaauggauggccauacauagcaucaaggacaucaaucguagguagagcaugggaaaauaccguuguugaucuagaaucaaauaaaaaucaacccaaaguagguaacaacggauccaauaaaaugcuacaaucaucaggauuugcuacaggauuaacauauagucaacuaaugacauuaagagacagcaugcuacaauuagaucccacagcaaaaacuuggauugauauagaagguagaccagaagauccaguugaacuugcacucuuccaaccaucaagcggauguuauauacacuuuuucagagagccaacagaucuaaaacaauucaaacaagacgccaaauacagccauggaauagauguaaacgacuuauucagugcacaaccugguuuaacaucagccguauuagaagcauuaccaagaaacaugguacuaacaugucaaggaagcgaugacauaagaaaacuauuagacagucaagauagaaaagacauaaaacuaauagauaucucacuaagcaaagcagacgccagaaaauucgaaaaugauguaugggaccaauucaaagacuugugccauaugcauacaggaauaguaguagaaaagaaaaagaaaggaggaaaacaagaaaugacaccacacugugcucuacuugacuguauaauguucgaugcagcuguaagcggaggauuaaauguaccaacucuacgagccguacuaccgacugacaugguauuccgaacaauaacgacaaaaguaguauuauaa

SEQ ID NO: 9311 - RNA, 1710 nt, Artificial Sequence
  derived and/or modified CDS sequence (opt6) from LASV(Pinneo-NIG-1969;Clade I)__AIT17837__NP
auguccaacucaaaagaaauuaaaaguuuuuuauggacacaaucacuaaggagagaacuuucaggcuauugcagcaacauaaaacuucaaguaguaaaagacgcccaagcauuacuccacggacuagacuuuagugaaguaucaaauguacaacgauuaaugagaaaacaaaaacgagacgaugccgauuuaaaaagauuaagagaucuaaaucaggcaguaaauaaccucgucgaacuaaaaucaacacaacagaagaacguauuaagaguaggaacacuaucaagcgaugaucucauaacauuagcugcagaucuagaaaaacucaaaucaaaagucauaagaacagaaagaccacuauccaguggaguauauaugggaaacuuaagcucacaacaacuagaucaaagacgagcucuauuaucaaugaucggaaugucaggaggcccacaaggaaauagaacagggggagacggaguaguaaggguaugggacguaaaaaacgcugaacuacuaaauaaucaauucggcacaaugccaaguuuaacucuagcaugccuaacaaaacaagggcaaguagacuuaaacgacgcaguacaagcuuuaacagaucuagguuuaauauauacagcaaaauaucccaacucaagcgacuuagacauguuaacacaaagucacccaauacugggaaugguagacacaaaaaaaaguucacuaaacauaaguggauauaauuuuucauuaggagcagcaguaaaagcaggugcauguaugcuagauggaggaaacauguuagaaacuauaaaaguauccccacaaacaauggauggaauauuaaaaucuauccuaaaaguaaaaagaagucuaggaauguucauaucagacacaccaggcgaaagaaaucccuacgaaaauauacuauacaaaauaugccucucaggagaaggauggccauauauagcaaguagaacuucaauaacaggaagagcaugggaaaauacauuagucgauuuagaaagcgauaacaaaccaccaaaauuaaauucggcagggucuaauaaaagucuacaagcagcaggauugaaugcagguuuaacguauagucaauuaaugacauuaaaagacugcaugcuccaauuagauccaucaucaaaaacauggauagauauagaaggcagaccagaagacccaguagaaaucgcccuguuucaacccaguucuggaugcuauauacacuuuuucagagaaccaacagaccuaaaacaauucaaacaagacgccaaauauucacacggcauagauguaacagacuuauuuucuacacaaccaggccuaacuagcgcaguuauugaagcacucccaagaaacaugguucuaacaugccaagguagugaugacauuaaaaaacuuuuagaaucacaaggaagaagagacauaaaacuaauagauaucagcuuaucaaaagcagacucacgaaaauucgaaaacgcuguaugggaccaauauaaagacuuaugccauaugcacacaggaguaguaguagaaaaaaaaaaaagaggaggaaaagaagaaauaacaccccauugugcauuacuagacugcauaauguucgaugcagcaacaacaggaucacuaaacauuacaacacuacgagcaguacuaccaagagauaugguauuccgaacaucaacuccaaaaguaguacuauga

SEQ ID NO: 9312 - RNA, 1710 nt, Artificial Sequence
  derived and/or modified CDS sequence (opt6) from LASV(ISTH0009-NIG-2011;Clade II)__AIT17405__NP
augucaguaucgaaagaaguuaaaucauucuuauggacucaaucacucagaagagaacuaucagguuauuguucaaacaucaaauuacaaguagucaaagacgcacaagcacuguuacacgggcucgacuuuucagaaguaucaaacguacaaagacuaaugcgcaaacagaaaagagacgauucagauuuaaaaagauuaagagaccuaaaucaagcaguuaauaacuuggucgaacuuaaaagcacucaacaaaaaucaauacuucgaguaggcacauuaacaucagaugaccuuuuaacacuagcagcagaucuagaaaaauuaaaaucaaaaguaauuaggacagaaagaccacuaucuucuggaguauacaugggaaacuuaucaacccaacaauuagaacaaagacgagcauuauuaaacaugauaggaaugguagguggagcacaaggaacacaacccggaagagacgguguagucagaguaugggaugucaaaaaccccgaccuacugaacaaucaauuuggaacaaugccuaguuuaaccuuagcaugccuaacaaaacaaggacaaguagaucuuaacgacgcaguauuagcacuaacagauuuaggauuaauauauacagcuaaauauccaaauaguagcgaccuagaccgauuaagccaaagccacccaauauuaaacaugguagauauaaagaaaucaucacuaaacauuucuggauacaauuucucuuuaggagccgcaguaaaagcaggagcauguauguuagacggaggaaacauguuagaaacuauaaaaguaacaccacaaaccauggacggaauauuaaaaucuauauuaaaaguaaaacgcucacuaggaauguuuguaagcgauacaccaggagaaagaaauccauaugaaaacauucuauacaaaauaugucuaaguggugacggauggccuuacauagcaaguagaacaucaauaguuggacgagcaugggaaaauacaacaguagauuuagaaucagauggaaaaccacaaaaaguaggauccgccggcucaaauaaaucuuuacaaagcgcaggcuuuccuacaggccuaacguauucucaacuaaugacauuaaaagacucaaugaugcaacuagacccaagugcuaaaacauggaucgacauugaagguagaccagaagacccaguagaaauagcauuauaccaaccuaugucuggauguuauauccacuucuuuagagaaccaacagauuuaaaacaauuuaaacaagacgcaaaauacucacacggaauagauguagcagacuuauuuccagcucaaccaggauuaacaagcgccguuauugaagcacuaccaagaaacaugguauuaacuugccaagguagcgacgacauaaaaagacuucuagacucacaaggacguagagacauuaaacuaaucgauauagcauuaaguaaagcagacagucgaagauuugaaaaugcuguaugggaccaauguaaggaucuaugucauaugcauacgggaguuguaguagaaaagaagaaaaggggaggaaaagaagaaauaacaccacacugugcauuaauggauuguauaauguacgacgcagccguaucaggaggccuaaacauaccaguauuaagagcaguacugccgagggauaugguauuuagaacaagcucacccaaagucguauuauaa

SEQ ID NO: 9313 - RNA, 1710 nt, Artificial Sequence
  derived and/or modified CDS sequence (opt6) from LASV(ISTH0012-NIG-2011;Clade II)__AIT17409__NP
augucagccucaaaagaagugaaaucauucuuauggacccaaagcuuaagaagagaacuaaguggcuauuguucaaacauaaaacuacaaguuguaaaagaugcacaagcuuuacuacacggacuagauuucucagaaguuucaaauguacaaagacuaaugcgaaaacaaaaaagagaugauggagaccuaaaaagacuuagagauuuaaaucaagcaguaaauaacuuaguagaacuaaaaucaacacaacaaaaaucaauacuaagaguuggaacacuuacaagugaugacuuacuaacacuugcugccgaccuagaaaaauuaaaaaguaaaguaauacgaacagaacguccucuaucaagcggaguauauaugggaaauuuaagcacacaacaauuagaacaaagaagagcacuacuuaacaugaucggaaugguuggcggagcacaaggaacacaaccaggacgagacggaguagucagagucugggauguaaaaaauccagacuuauuaaauaaucaguucggaacaaugccuucacuaacauuagcaugccuaacuaaacaaggacaagucgauuuaaacgaugcaguauuagcacuaacugauuuagguuuaauauacacagcaaaauauccaaacucaucagacuuagaucgacucagccaaucacacccaauucuuaauauggucgauacaaaaaaaucaucacuaaacauaucagguuacaacuucucauuaggagccgcaguaaaagcaggagcaugcauguuagacggaggaaauauguuagaaacaauaaaaguaacaccacaaacaauggauggaauauuaaaaucaauacugaaaguaaaaaaaaguuuaggaauguucgucucagauacacccggugaaaggaauccauacgaaaauauccuauacaaaaucuguuuaucaggagauggauggccauauauagcaucaaggaccucaaucguaggaagagcaugggaaaacaccacagucgacuuagaaucagacggcaagccacaaaaagucggaacugcaggaaguaauaaaagccuacaaagugcagguuuuccaacaggcuugacuuauucacaauuaaugacauuaaaagauaguaugaugcaacuagaccccagugcuaaaacauggaucgauauagaaggucgaccggaagauccaguagaaauugcucuauaccagccaaugucaggauguuacauacacuucuucagagaaccaacagaucuaaaacaauuuaaacaggacgcaaaauauagccauggaauagacguuacagaucuauuuucagcacaaccaggauuaacaagcgcaguuauagaagcuuugccaagaaacaugguauuaacaugucaaggaagcgacgacauaaaaagauuauuagacagucaaggcagacgagauauaaaacucaucgauauagcacucaauaaggcggauucaagaagauucgaaaacgcgguaugggaucaaugcaaagaccucugucauaugcauaccggaguaguaguagaaaaaaaaaaacgcggaggcaaagaagaaauaacgccgcauugugcacuaauggacugcauuauguaugacgcagccguuaguggaggauuaaacauaccaguacuaagagcaguacuuccaagagauaugguauucagaacaaguuccccgaagguaguauuauaa

SEQ ID NO: 9314 - RNA, 1710 nt, Artificial Sequence
  derived and/or modified CDS sequence (opt6) from LASV(ISTH0047-NIG-2011;Clade II)__AIT17413__NP
augucagcaagcaaagaagucaaaucguucuuauggacacaaucacuacgcagagaauuaucaggauacuguaguagcauaaaauuacaaguuguaaaagaugcucaagcacuacuccauggacuagacuucagugaaguaaguaauguacaacgauuaaugaggaaacaaaaaagagacgacagcgacuuaaagagauuaagagauuuaaaccaagcagucaauaaccuaguagaauuaaaaucaacacaacagaaaucuauccuuagaguaggaacuuuaacaucagaugauuuauuaacauuagcggcagaccuagaaaaauuaaaaucaaaaguaauaagaaccgaaagacccuuaucuucaggcguauauaugggaaacuugaguacgcaacaacuagaacaaagaagagcauuacugaauaugauuggaaugguaggaggcgcacaaggaacucaaccuggcagagauggaguaguaagaguaugggaugucaaaaauccagacuuauuaaauaaccaauucggaacuaugcccucccucacacucgcaugcuuaacaaaacaaggacaaguagauuuaaacgaugcuguacuagcacucacagacuuaggccuaauauauacagcaaaauaucccaauagcucagaccuagacaggcuaagccaaucacaccccauauuaaacaugguagauacaaaaaaaaguucccuuaacauuagcggauacaacuucagccuaggagcagcaguaaaagcaggcgcauguauguuagauggaggaaauauguuagaaacaaucaaaguaacgccacaaacaauggaugggauacuaaaaagcauauuaaaaguaaaaagaagcuuagguauguucguaucagaugcaccaggagaaagaaauccauaugaaaauauauuauacaaaauauguuuaaguggcgauggauggccauauauagcauccagaaccucaaucgugggaagagcaugggaaaauacaacuguagaucuagaaucagauggaaaaccacaaaaaaugggaacugcaggaucaaauaaaucuuuacaaucagcaggauuuccaacaggucuaacguacucacaauuaaugacacuaaaagauucaaugaugcaacuagauccaucagcgaaaacauggauagauauagaaggucgaccagaagauccaguagaaauagcacuauaucaaccaaugucaggcuguuacauccacuuuuuccgagaaccaaccgaccuaaaacaauucaaacaagaugcaaaauacagucauggaauugacguagcagaccuuuuuccagcgcaaccaggccuaacaagcgcaguuauagaagcauuaccacgaaauaugguauuaacaugccaaggauccgaugauauaaaaaaauuauuagacucacaagguagaagagacauaaaacuaauugauauagcacuaucaaaagcagauaguagaagauucgaaaaugcaguaugggaucaaugcaaagaccugugccacaugcauacuggagucguaguagaaaaaaaaaaaagaggagggaaagaagaaauaacaccacacugugcacuuauggacugcauaauguaugacgcagcaguaagugguggauuaaauauaccaguacucagagccguacuaccaagagauaugguauuuagaacaaguucaccuaaagucguacuauaa

SEQ ID NO: 9315 - RNA, 1710 nt, Artificial Sequence
  derived and/or modified CDS sequence (opt6) from LASV(ISTH0230-NIG-2011;Clade II)__AIT17421__NP
augagugcaucaaaagaaguaaaaucauuccuauggacacaaaguuuaagaagagaacuauccggauacugcaguaacauuaaacuucaaguaguaaaagacgcacaagcccuauuacaugguuuagauuucagcgaaguaucaaauguucaaagacuaaugagaaaacaaaaaagagacgauucggauuuaaaaagacucagagaccuaaaucaagccguaaauaacuuaguagaauuaaaaaguacucaacaaaaaagcauccuacggguuggcacuuuaacaagugacgacuuacuaacccuagcagccgaucuagaaaaauuaaaaucaaaaguaauaagaaccgaaagaccauuaucaucaggcguauauaugggaaauuuaucuacacaacaauuagaacaaagaagagcauuacuaaacaugauaggaaugguaucaggggcgcaaggcacccaaccaggaagagacgguguaguaagaguaugggacguaaaaaaccccgaccuacuaaauaaccaauucgguaccaugccaucauuaacacuagcuugccuaacaaaacaaggacaaguagacuuaaacgaugcaguucuagccuuaacagaucuaggauuaauauacacagcuaaauauccaaauucaucagaccuagacagguuaagucaaucacacccuauauugaauaugguagauaucaagaaaucuagccuuaauauuagcgguuacaauuucucacuuggagcagcaguaaaagcaggagcaugcauguuagacggcgguaacauguuagaaacaauaaaagucacaccccaaacaauggauggaauacuaaaaucaauauugaaagugaagcgaucacuaggaauguuuguaucagauacaccaggagaaagaaacccauaugaaaauauucuauacaaaaucuguuuaaguggagauggauggccauacauagccagcagaacaucuauaguaggaagagcaugggaaaauacaacaguagacuuagaauccgacggaaaaccucaaaaaaugggcucagccggcucaaauaagucacuacaaucagcuggauucccaacgggacuaaccuauucacaacuaaugacauuaaaagacagcaugaugcaacuagauccaucagcaaaaacauggauugauauagaaggaagaccagaagacccaguagaaauagcacuuuaucaaccuaugucagguugcuacauacauuuuuucagagaaccaacagauuuaaaacaauuuaaacaagaugcaaaauauucacauggaauagacguagcagacuuauuuccugcacaacccggacuuacaucugccgucauagaagcacucccaagaaacaugguucuaacaugucaaggaagugaugacauaaaacgacuauuggauagucaaggaagacgugacauaaaauuaauagauauagcauuaucaaaagcagacucaagacgauucgaaaacgcaguuugggaccaaugcaaagacuuaugccacaugcauacaggaguagucgucgaaaaaaaaaaaagaggaggaaaagaagaaauaacaccacacugugcacuuauggauugcauuauguacgaugcugcaguaucagggggauuaaauauaccaguauuaagagcaguacuaccaagagacaugguuuuuagaaccucuucuccaaaaguaguucuauaa

SEQ ID NO: 9316 - RNA, 1710 nt, Artificial Sequence
  derived and/or modified CDS sequence (opt6) from LASV(ISTH0531-NIG-2011;Clade II)__AIT17425__NP
augucagcaaguaaagaaguuaaaucauucuuauggacacaaagucuacgacgagaacucucuggauacuguucauccauaaaacuacaaguaguaaaagaugcacaagcuuuauuacauggacuagacuuuucagaaguaaguaacguccaaagacuaaugcguaaacaaaaaagagaugauagugaccuaaaaagacuaagagacuuaaaucaagcaguaaauaaccuuguugaacuuaaaaguacccaacagaaaaguauauuacgaguuggaacauuaacaucagaugauuuauuaacauuagcagcagaucuagaaaaauuaaaaagcaaagucauacguacggaaagaccacuauccagcggagucuacaugggaaacuuaagcacgcaacaacuagaacaaagaagagcauuauuaaacaugauagguaugguaggaggagcacaaggaacucaaccuggaagagacggagucgugagaguaugggacguaaaaaacccagacuuauuaaauaaccaauucgguacuaugccaucacuuacacuagcaugcuuaacaaaacaaggacaagucgaccuuaacgacgcaguacuagcguuaacagaucuuggauuaauauacacagcaaaauacccaaacaguagcgacuuagacagacuaagucaaucacaucccauacucaacauggucgauaccaaaaaaucaucauuaaacauaaguggauacaacuucucucuaggagcugcaguaaaagcaggagcauguaugcuagacgggggaaauauguuagaaacuauaaaaguuacaccacaaacaauggacgguauacugaagucuauauuaaaaguaaaaaaaucauuaggaauguucgugucugauacacccggcgaaagaaauccauaugaaaauauauuauauaaaaucugucugucaggugacggauggccauauaucgcauccagaacaucaauagucggccgagcaugggaaaauacaauaguagaccuagaaucagacggaaaaccccaaaaaguagguacagcuggaagcaacaaaagccuacaaucagcgggauuuccgacaggauuaaccuauucacaauuaaugacauuaaaagauucaaugaugcaacuugauccaucagcaaaaacauggaucgauauagaaggaagacccgaagacccaguugaaaucgcacuauaucaaccaaugagcgguuguuacauacacuuuuuuagagaacccacagaccuaaaacaauuuaaacaagacgcuaaauauucacauggaauagauguagcagaucuuuucccagcacaacccggacucacuagugcaguaauugaagcauuacccaggaauaugguauuaacuugccaaggaagugaugacauaaaaagauuauuagauucccaagguaggagagacauaaaacuaauugauauagcacuaaguaaagcagacaguagaagauucgaaaaugcuguaugggaucaauguaaagacuuaugucacaugcauacaggugucguugucgaaaaaaaaaaaagaggagguaaagaggaaauuaccccgcauugugcauuaauggauugcauaauguaugacgccgcaguaucuggaggacucaacauaccaguauuaagagcaguauuaccaagagauaugguauucagaacaucaagcccaaaaguaguauuauaa

SEQ ID NO: 9317 - RNA, 1710 nt, Artificial Sequence
  derived and/or modified CDS sequence (opt6) from LASV(ISTH0595-NIG-2011;Clade II)__AIT17429__NP
augucagcuucaaaggagguaaaaaguuucuuauggacacaaucauuaagaagagaacuaucaggauauugcaguaacauuaaacuacaagucgucaaagaugcacaagcacuauuacacgggcuagacuucagcgaaguaucaaacguacaaagauuaaugagaaaacaaaaacgagacgacagcgacuuaaaaagauuaagagaucuaaaccaagcuguaaacaauuuagucgaauuaaaaaguacccaacaaaaaaguauacuucgaguuggaacauuaacaagugaugaucuucucacacuagccgcagacuuggaaaaacuaaaaaguaaaguuauacgaacggaaagaccccuaucaucaggaguauacaugggaaaucuaucagcacaacaacuagaacaaagaagagcacuacuuaauaugauaggcauggucggaggugcacaaggaacacaaccuggacgagacggaguagucagaguaugggauguaaaaaacccagacuuauuaaauaaccaauuugguaccaugcccaguuuaacauuagcaugccuaacaaaacaaggacaaguagaccuaaacgaugcuguauuagcacuaacagacuuaggucuaauauauacagcaaaauauccaaacucaucagacuuagacagauuaucacaaagucacccaauacucaacaugguagauacuaaaaaaucaucauuaaauaucuccggauacaacuucagucuaggagcagcaguaaaagcaggagcaugcauguuagacggaggaaauaugcuagaaacaauaaaaguaacaccacaaacaauggauggaauauuaaaaucuauauugaaaguaaaaagaagccuaggcauguucguaagugaugcaccaggagaacgaaacccauaugaaaacaucuuauacaaaauaugcuuaaguggugaugguuggccauacauagcaagccgaacaucaauaguaggaagggcgugggaaaauacaacaguagaucucgaaagcgauggcaaaccacaaaaaguaggaacagcaggaucaaauaaaagucuacaaucagcaggauuuccaacaggacuaacauauucacaacuaaugacauugaaagacucgaugaugcaauuagauccaagugcaaaaacauggauagauauagaaggucguccagaagacccaguagaaauagcucuauaucaaccuaugucagguugcuauauccauuuuuuuagagaacccacagaucuaaaacaauuuaaacaagacgcaaaauauagucauggcauagacguagcagaucuauuucccgcacaaccaggacuaacaucagcaguaauagaagcauuacccagaaauaugguacuaacaugucaagguagugaugacauaaaacgacuauuagauucacaaggaaggagagauauaaaauuaauagauauagcauuaucaaaagcagauaguagaagauuugaaaaugcuguaugggaucaaugcaaagacuuaugucacaugcauacagggguaguaguagaaaaaaaaaaacgagguggaaaagaagaaauaacaccacauugcgcucuaauggauuguauuauguaugacgcagcaguaagugguggacuaaacauacccguauuaagagcgguacuaccacgagacaugguauuucgaacaucaagcccaaaaguaguacuauaa

SEQ ID NO: 9318 - RNA, 1710 nt, Artificial Sequence
  derived and/or modified CDS sequence (opt6) from LASV(ISTH0964-NIG-2011;Clade II)__AIT17431__NP
augagcgcuaguaaagaaguaaaaucauuucuauggacacaaucuuuaagaagagaacuaaguggauauuguucaaacaucaaauuacaaguaguaaaagacgcacaagcacuuuuacacggacuagauuucucugaggucucaaauguacaacgcuugaugagaaaacaaaaaagagaugacagugaccuaaaacgacuaagagaucuaaaucaagcaguaaacaaccuagucgaauuaaaaaguacacaacaaaaaucuauacucagaguaggcacgcuuacaagugacgacuuacuaacacuagcggcugaucuugaaaaauuaaaaucaaaaguaauaagaacagaaagaccacucucaagcggaguauauaugggcaacuuaagcacccaacaauuagaacaaaggagagcauuacuaaauaugauagguaugguaggaggugcucaaggaacacaaccuggaagagacgguguaguacgaguaugggauguaaaaaacccagacuuacuaaauaaccaauucggaacaaugccaucauuaacacuagcaugccuuacaaaacaaggacaaguagauuuaaacgacgcaguacuagcauuaaccgaccuaggacuaauauacacugcuaaauaccccaauagcucagaccuugacagauuaucccaaucacacccaaucuuaaauaugguagauaccaaaaaaaguucccuuaacauauccggauucaauuucagcuuaggagcagcaguaaaagccggugccuguaugcuagacggaggaaauaugcuagaaacaauuaaaguaacuccacaaacaauggacgguauauuaaaaucaauacucaaaguaaaaaagucauuaggaauguucguaagcgauacaccaggcgaaagaaauccauaugaaaauauauuauacaaaauauguuuaucaggugacggauggccauacauagcaagccgaacaucaauaguaggacgugcaugggaaaacacaacuguagaccuagaaagcgauggaaaaccacaaaaaguaggaacggcaggaucaaacaaaucauuacaaagugcuggcuucccuacaggcuugacauacagccagcuaaugacauuaaaagauucaaugaugcaauuagauccaucagcaaaaacauggauagauauagaaggacgaccagaagacccaguagaaauugcauuauaucaacccaugucaggauguuacauucauuuuuucagagaaccaacagaucuaaaacaauuuaaacaagaugcaaaauauagccauggaauagacguggccgaucuauuuccagcucaaccaggauuaacaagcgcaguaauagaagcacuacccagaaacauggugcugacaugucaagguucagaugauauaaaacguuuauuagauagucaaggaagacgcgauauuaaacuaauagacauagcacucucaaaagcugacucaagacgcuuugaaaacgcugucugggaucaauguaaagacuuaugccacaugcauacuggaguaguaguagaaaaaaaaaagagaggaggaaaagaagaaauaacuccacacugcgcauuaauggacuguauaauguaugacgcagcaguuucaggcggccuaaacauaccaguacuuagagcaguauuaccaagagacaugguauuccguacagcaagcccaaaaguaguacucuaa

SEQ ID NO: 9319 - RNA, 1710 nt, Artificial Sequence
  derived and/or modified CDS sequence (opt6) from LASV(ISTH1038-NIG-2011;Clade II)__AIT17439__NP
augucagcaucaaaagaaguaaaauccuuuuuauggacacaaucauuaaggagagaauuaaguggauauuguaguagcauaaaauuacaagugguaaaagaugcacaagcacuacuacauggacuagauuucucugaaguaaguaauguucaaagacuaaugagaaaacagaaaagagaugauucagauuuaaaaagacuuagagauuuaaaucaagcaguaaacaacuuaguggaauuaaaaucaacacaacaaaaaucaauacuaagaguagguacacuaacaagugacgauuuacuaacuuuagcagcagaucuagaaaaacuaaaaucaaaaguaauaagaacagaaagaccacugucaucaggaguuuauaugggaaaccuuucaacacaacaauuagaacaaaggagagcauuacuaaacaugauaggaauggucggaggagcacaagguacucaaccaggaagagacggagucguaagaguaugggauguuaaaaacccagaccuccuaaacaaccaauuuggaacaaugccaagucuuacacuugcaugccuaacaaaacaaggucaaguagacuuaaacgaugcaguacuagcacucacagaucuaggcuuaauauauacagcuaaauauccaaauagcucagaccuagacagauuaagucaaucacauccaauacuaaacaugguagacacaaagaaaucaucauuaaacauuucaggcuucaauuuuaguuuaggagcagcuguaaaagcaggagcauguaugcuagacggaggaaauauguuagaaacaauaaaaguuacaccacaaaccauggauggcauuuuaaaaucaauauuaaaagucaaaagaaguuuaggaauguuuguaagugacacaccuggagaaagaaaucccuaugaaaauauauuauauaaaaucuguuuaucuggagauggcuggccauacauagcaaguagaacaaguaucguagguagagcaugggagaacacaacaguugauuuagaaucagauggaaaaccacagaaaaugggaacagcagguucaaauaaaucauuacaaucagcaggauuuccaacagggcuaacauacagucaauuaaugacuuuaaaagauucuaugaugcaacuagauccaagugcaaaaaccuggauagacauagaaggacgaccggaagacccuguagaaauagccuuauaccaacccguaaguggaugcuauauacauuucuuuagagaaccuacagaucuuaaacaauuuaaacaagacgccaaauacagccacggaauagacguugcagaccuauuuagcgcccaaccuggacuuacaucugcaguaauagaagcacuccccagaaacaugguauuaacaugucaaggaucagacgacauaaaacggcuacuagauagccaaggaagaagagacauuaaacuaauagacauagccuuaucaaaagccgacucaagaagauuugaaaacgcagucugggaccaauguaaagaucucugucauaugcacaccggagucguugucgaaaagaagaaacgagguggaaaagaagaaaucacaccucauugugcacuaauggauugcauuauguaugaugcagccguaucuggaggacuaaauauaccuguuuuccgagccguuuuaccaagagauaugguauuuagaaccucaucaccaaaaguaguuuuauaa

SEQ ID NO: 9320 - RNA, 1710 nt, Artificial Sequence
  derived and/or modified CDS sequence (opt6) from LASV(ISTH1048-NIG-2011;Clade II)__AIT17443__NP
augagcgcaaguaaggaaguaaaaagcuuucuauggacacaaaguuuaagaagagaauuaucaggauauuguaguagcauaaaacuucaagugguaaaagacgcacaagcacuacuacacggauuggacuuuagcgaaguaaguaauguccaaagacuaaugagaaaacaaaagagagaugauagcgauuuaaaaagauuacgagaucuaaaucaagcaguaaacaacuuaguagaacuaaaaucuacccaacaaaaaucuauuuuaagagucggaacauuaacuucagaugauuuauuaacacuagcagcagaccuggaaaaauuaaaaaguaaaguaauaagaacagaaagaccauuaagcuccggaguauauaugggaaaccuaaguacacaacaacuagaacagcgaagagcuuuauuaaacaugauaggaaugguuggaggggcucaaggcacacaaccagguagagacgguguaguaagaguaugggacguaaaaaauccugacuuacuuaauaaucaauuuggaacaaugccaucacuaaccuuagcaugccuaacaaaacaaggucaaguagaucuaaacgaugcaguucuagcacuaacagauuuaggauuaauauauacagcaaaauauccaaauucauccgaccuagacagacuuucccaaucucacccaaucuuaaacaugguagauacaaaaaaaucaucacuaaauauaucaggauauaauuuuucacuaggggcugcaguaaaagcaggugcauguauguuagacggaggaaauaugcuagaaacaauaaaaguaaccccacaaacaauggauggaauucuaaaaucaauacucaaaguaaaaagaaguuuagggauguuuguuuccgacgcaccaggagaacgaaacccuuaugaaaauauauuauacaaaaucuguuugucuggugacgguuggccauauauagccucacgaacaucaauaguaggacgagccugggaaaacaccacagucgauuuagaaucagacggaaaaccacaaaaaguugguacagcaggaaguaauaaaucauuacaaucagcuggauuuccaacaggauuaacauauagucaacuaaugaccuuaaaagacagcaugaugcaacuggauccaucugcuaaaacauggauagauauagaaggaagaccagaagacccaguagaaauagcacuauaucagccgaugucaggcuguuacauacauuuuuuccgagaaccaacggacuuaaaacaauucaaacaagaugccaaauacagccacggcauugauguagcagaucucuuuccagcacaacccggacuaacgucagcagugauagaagcacuaccuagaaacaugguacuuacaugccaagguucagaugacauaaaaaaacuguuagacucacaaggaagaagagauauaaaauuaauagauauagcacuaagcaaagccgacagcagaagauuugaaaacgcugugugggaucaauguaaagauuuaugccauaugcauaccggaguaguaguagaaaaaaaaaagagaggaggaaaagaagaaauaacuccgcauugugcacuaauggacugcauaauguaugaugcagcagucucaggagguuuaaacauaccugugcuaagagcuguauuaccacgcgauaugguauuccgaacuucaucacccaaaguuguauuauag

SEQ ID NO: 9321 - RNA, 1710 nt, Artificial Sequence
  derived and/or modified CDS sequence (opt6) from LASV(ISTH1058-NIG-2011;Clade II)__AIT17447__NP
augucagcaagcaaagaaguuaaaucauuucuauggacacaaucacuaagacgcgaacuaagcggauauuguucuaauauuaaauuacaaguaguaaaagacgcacaagcauuacuacauggauuggauuucucugaaguaucaaauguacaaagauuaaugcggaaacagaaaagagaugacagcgacuuaaaaagguuaagagaccuuaaucaagcaguaaauaaccuagucgaacuaaaaagcacacaacaaaaaucaauuuuacgaguaggaacguuaacaagcgacgaccuacucacuuuagcagcagaucuagaaaaacuaaaaucuaaaguaauaagaacagaacgaccacuaucuaguggugucuauaugggaaauuuaucaacacaacaacuagaacaaagaagagcucuacuaaacaugauaggaaugguuggcggagcacaaggaacacaacccggacgugauggaguaguaaggguaugggauguaaaaaacccagaucuauuaaauaaucaauucggaacaaugccuucauuaacauuagcuugccuuacaaaacaagggcaaguagauuuaaaugaugcaguauuagcacuuacagacuuaggucuaauauacacugcuaaauauccaaauucaucagaucuagaucgauuaucacaaucacauccaauuuuaaauauggucgauaccaaaaaaagcagcuuaaauauuaguggguauaauuucucccuaggagcagcaguuaaagcaggagcaugcauguuagauggaggaaauauguuagaaacuauaaaaguaacgccacagaccauggauggaauauuaaaauccauauuaaaaguaaaaaaaucacuuggaauguucguaagcgauaccccuggagaaagaaauccauaugaaaacauccuauacaaaauauguuuaucaggagauggguggccauacauagccagcagaacaucuauaguaggcagagcaugggaaaauaccaccguagauuuagaaagugauggcaaaccacaaaaaguaggaacaacagggagcaauaagagucuucaaucagcaggauuucccacuggccuaacauacagccaacuaaugacacuuaaagauucaaugaugcaacuagacccaucagcaaagacuuggaucgacauagaaggucgaccagaagacccuguagaaauugcauuauaccaaccaaugucaggaugcuacauucauuuuuuuagagaaccaacagaucuaaaacaauuuaaacaagacgcuaaauauagucauggaauagacguaacagaucuauuucccgcgcaaccaggauuaaccagugcagucauugaagcacuaccucguaauaugguauuaacaugucaaggaagcgaugacauuaaaagacuauuagacucucaaggcagaagagauauaaaauugauagauauagcacuaucaaaagccgacucacgaagauucgaaaacgcaguaugggaccaaugcaaagacuuaugccauaugcacacaggaguaguuguagaaaaaaaaaaacgaggaggaaaagaagaaauaaccccacauugugcauuaauggauugcauaauguacgacgcagcaguuucaggaggacuaaacauaccaguauuaagagccguacuaccaagagauaugguauucagaacaagcagcccaaaaguaguacuauaa

SEQ ID NO: 9322 - RNA, 1710 nt, Artificial Sequence
  derived and/or modified CDS sequence (opt6) from LASV(ISTH1064-NIG-2011;Clade II)__AIT17451__NP
augagcgcauccaaggaaguuaaaucauucuuauggacccaaucacuuagaagagaacuaucaggcuauuguaguaacauaaaacuucaaguuguaaaagacgcccaagcacuacuacauggcuuagauuucagugaagucagcaauguacagcgacuuaugcgaaaacaaaaacgagacgauucagauuuaaaaagauuaagggauuuaaaucaagcaguaaauaacuuaguagaauuaaaaagcacgcaacaaaaaucaauauuaaggguaggaacacuuacuucagaugaucuacuaacccuagcugcagaucuagaaaaauuaaaaagcaaaguaauaagaacugaacgaccacuauccucagguguauauauggguaacuuaucuacacaacaacuagaacaaagaagagcacuacuaaacaugauaggaaugguagguggugcacaaggaacacaaccaggcagggauggaguagugagaguuugggauguuaaaaauccagacuuauuaaauaaucaauuuggaacaaugcccucauuaacacuagcauguuuaacaaaacaaggucaaguugaucucaaugaugccguacuagcacuaacugacuuaggauuaauauacacagcuaaauucccaaauucaagugacuuagacagauuaucacaaucccacccaauauuaaauaugguagauacaaaaaaauccucauuaaacauaagcggcuauaacuucucacuaggugcugcaguaaaagccggagcauguaugcuagauggaggaaacaugcuagaaacuauuaaaguuacaccacaaaccauggacggaauacuuaaaucaauauuaaaaguaaaaaaaucauuaggaauguuuguaucagauacuccaggagaacgaaacccauaugaaaacauauuauacaaaauuugcuuaucaggagauggguggccauacaucgcauccagaacaucaauaguaggcagagcaugggaaaauacaacaguggauuuagaaagugacgguaaaccucaaaaaguuggcacaacaggaucaaauaaaucacuacaauccgcaggcuuuccaacaggauugacauacagccaauuaaugaccuuaaaagauucaaugaugcaacuagacccauccgcaaaaaccuggaucgauauugaaggccguccagaagacccaguagaaauagcauuauaucaaccaaugucaggauguuacauacacuucuuccgagaacccacagaucuaaaacaauuuaaacaagaugcaaaauacucucaugggauagacgucgcagaccuauuuccggcacaaccaggauuaacaucagcagucauagaagcauuaccaagaaacaugguacuaacaugucaagguucugacgacauuaaaagacuacuagauucacaaggaagaagagacauaaaauugauagauauagcacuaucaaaagcugauucuagaagauuugaaaaugcagucugggaucaaugcaaagacuuaugucauaugcauacugguguaguugucgaaaaaaaaaaaaggggaggaaaagaagaaauaacuccucauugugcacuuauggauuguauaauguaugacgcugcaguuagcggaggauuaaacaucccaguacuaagagcaguauuaccuagagauaugguuuuuagaacaucaucaccaaaaguaguacuuuaa

SEQ ID NO: 9323 - RNA, 1710 nt, Artificial Sequence
  derived and/or modified CDS sequence (opt6) from LASV(ISTH1069-NIG-2011;Clade II)__AIT17455__NP
augucagcaaguaaagaagucaaaucauuuuuauggacacaauccuuaagaagggaauuauccggcuauuguucgucaauaaaacuucaaguaguaaaagacgcccaagcacuacuacacggacuagauuuuagugaaguuagcaauguacagagacuaaugagaaaacagaaaagagacgauucagaucuaaaacgacuaagagaccuaaaucaagcuguuaacaaccucguagaacucaaaagcacacaacaaaaaucaguauugagaguaggaacccuaacaucagaugaucuauuaacacuagcugccgaccuugaaaaacuaaaaucaaaagugauaagaacagaaagaccacucagcagcggaguauauaugggaaacuuaaguacccaacaacuagaacaaagacgugcacuacuaagcaugaucggaauggugggaggagcacaaggaacacaaccagggagagauggcguaguaagaguaugggacgucaaaaauccagaucuacuaaauaaccaauuugggacaaugccaucauuaacacuagcuugcuuaacaaaacaaggacaaguagauuuaaaugacgcaguucuagcucuaacugacuuaggacuaauauauacugcuaaauauccaaauucaucagacuuagacagauuaucucaaucacacccuauuuuaaauaugguagauacaaagaaaaguucacuuaauaucaguggauauaauuucucauuaggagcagcgguaaaagcaggagcauguaugcuagauggaggcaauaugcuagaaacaauaaaaguuacaccacaaacaauggacggaauauuaaaaucaauucuaaaaguuaaaagaucccucggaauguuuguaagcgauaccccaggagaacgaaauccauaugaaaauauacuauauaaaauaugucucagcggcgacggauggcccuacauagcaaguagaacaagcauaguaggacgagccugggaaaauacaaccgucgaccuagaaagugacggaaaaccacaaaaaguaggaacugcaggaagcaauaaaucacuucaaucugcgggauucccaacaggacuaacauacucucaacuaaugacacuaaaagauaguaugaugcaauuagauccaucagccaaaacauggauugauauagaaggcagaccagaagauccaguugaaauagcauuauaucaaccuaugaguggauguuacauacacuucuuuagagaaccaacagaucucaaacaguuuaaacaagaugcaaaauauagucacgguaucgauguagcagacuuauuuccggcucaaccaggacuaaccagcgcaguaauagaagcacuaccaaggaacaugguauuaaccugucaaggaagugaugacauaaaacgauuauuagauucacaaggaaggagagacauaaaauuaauagacauagcacuuaguaaagcugauucaagaagauucgaaaaugcagucugggaucagugcaaagacuuaugccauaugcacacagguguaguaguagaaaagaagaaaagaggaggaaaagaagaaauaaccccacauugcgcacuaauggauuguauaauguaugacgcagcagucucaggagguuuaaacauuccuguacuacgagcuguauuaccaagagacaugguauucagaacgucaagucccaaaguaguauuguaa

SEQ ID NO: 9324 - RNA, 1710 nt, Artificial Sequence
  derived and/or modified CDS sequence (opt6) from LASV(ISTH1096-NIG-2012;Clade II)__AIT17459__NP
augucugcaucaaaagaaguaaaaucauuuuuauggacacaaucauuaagaagagaauuaaguggauacuguagcucaauaaaauuacaaguaguaaaagaugcacaagcccuauuacacggauuagauuucucagaaguauccaacguacaaagauuaaugagaaaacaaaaacgagaugacagcgaucuaaaaaggcuaagagauuuaaaucaagcaguaaacaaccuuguagaacuaaaaucaacacaacagaaaagcauauuaagaguaggcacucuuacaagugaugaucuauugacacuugccgcagaucucgaaaaacuaaaaucaaaaguaaucagaacagaaagaccucuaucaucaggaguauauaugggcaaucuuucaacacaacaauuagaacaaagacgagcccuacuaaauaugaucggcaugguagguggugcacaagguacccaaccaggaagagauggaguaguuagaguaugggacgucaaaaauccagaucuacucaauaaucaauucggaacaaugccuagucuuacauuagcaugccuuacaaaacaaggacaaguagaucuaaaugacgcuguacuagcauugaccgaucuuggauuaaucuauacagcaaaauacccaaauucaucagaccuagauagacuaucucaaagccauccaauucuaaacaugguagauacaaagaaaaguucacuaaacauaucaggauacaauuucagccucggagcagcaguaaaagcaggcgcauguauguuagacggcggcaacaugcuagaaaccauaaaaguaacaccccaaacaauggacgguaucuuaaaaucaauauuaaaaguaaaaagaaguuuaggcauguuuguaucagauacccccggagaaagaaauccauacgaaaauauauuauacaaaauaugcuuaucaggugacgguuggccauacauagcaucaagaaccucaauaguagguagagcaugggaaaauacuacaguagaccuagaaucagacggaaaaccacagaaaaugggaacagccggaagcaauaaaucauuacaaagugccggauuuccaacaggacuaacuuacucacaauuaaugacauuaaaagauucaaugaugcaauuagauccaucugcaaaaacauggauagauauagaaggacgcccagaagacccaguagaaauagcuuuauaccaaccuguaucaggauguuacauacacuucuucagagaacccacagaucuuaaacaauucaaacaagacgcaaaauauagccauggcaucgauguagcugaccuauuuccagcacaaccaggauuaaccucagcuguaauagaagcacuaccgagaaacaugguacuaaccugccaaggaucggacgacauaaaacgacuacuagauucucaaggccgaagagauauaaaauuaauagauauagcacuaagcaaagcagacaguaggagauucgaaaacgcaguaugggaccaaugcaaagacuuaugccauaugcauacaggaguaguaguagaaaagaagaaaagaggaggaaaagaagaaauaacaccacacugugcacuaauggauugcauaauguaugaugcagcgguauccggaggauuaaacauuccaguauuaagagccguacuaccucgugacauggucuucagaacaucaucaccaaaaguaguguuauaa

SEQ ID NO: 9325 - RNA, 1710 nt, Artificial Sequence
  derived and/or modified CDS sequence (opt6) from LASV(ISTH1107-NIG-2012;Clade II)__AIT17463__NP
augagugcaucaaaagaagugaaaaguuuccucuggacacaaucacuaagacgagaauuaucuggauauugcucauccauaaaacuacaaguaguaaaagaugcucaagcacuacuucacggauuagauuucagcgaagugaguaacguacaaagauuaaugagaaaacacaaaagagacgauagugaccuaaaaagacuaagagaucugaaucaagccguaaauaacuuaguugaacuaaaaucuacucaacaaaaaaguauauuaagaguaggaacauuaacaagcgaugacuuacuaacucuagcagcagaucuggagaaauuaaaaucuaaaguaaucagaacagaaagaccacuaucaagugguguauauaugggaaauuuaucaacccaacaauuagaacaaagaagagcacuacucaacaugauaggaaugguuggaggagcccaaucaacacaaccuggcagagauggaguaguaagagucugggauguaaaaaacccugaccucuuaaauaaucaauucgguacaaugccaucacuaacucuagcauguuuaacgaaacaaggccaaguagaccuuaaugaugcaguacuagcacuaacugaccuuggcuugauauauaccgcuaaauauccaaauucaucagacuuagauagauuaagccaaagucauccaauacuaacaaugguagacacaaaaaaaucgucauuaaacauaagcggguuuaauuucucauuaggggcagcaguaaaagcaggagccuguaugcuagacggagggaacauguuagaaacaauaaaaguaacaccacaaacaauggauggcauauuaaaauccauauuaaaaguaaaaaaaagcuuagguauguuugucucagauacaccuggcgaaagaaacccauacgaaaacauacuauacaaaauaugcuuaucaggagauggauggccauauauugccucaagaacaagcauaguaggaagagcaugggaaaauacaauaguagaccucgaaacugacggaaaaccacaaaaaguaggaacagcuggaagcagccgaucuuuacaaagugcaggauucccaacaggauuaacauauucacaacugaugacacucaaagauagcaugaugcaacucgauccaucagcaaaaacauggaucgauauagaaggaaggccagaagauccaguagaaauagcuuuauaucaaccuaugaguggcuguuacauacauuucuuuagagaaccaacugauuuaaagcaauuuaaacaagaugcaaaauauucucacgggauagauguagcugaccuguuuccagcacaaccaggacuuacaucagcaguaauagaagcacuacccagaaauaugguacuaacaugucaaggaucagaugacauaaaaaaacuccuugauucacaaggaaggagagacauaaaauuaauugauauagcacuaucaaaagcagacaguagaagauuugaaaacgcaguaugggaccaaugcaaggaccuaugucauaugcauacaggaguuguaguagaaaaaaaaaagagaggagguaaagaagaaauaacaccacacugugcacuaauggauuguauaauguaugaugcagcaguaagcgguggacuaaauauaccaguccuaagagcaguguuaccaagagauaugguauuucgaacaucaaguccaaaaguagucuuauag

SEQ ID NO: 9326 - RNA, 1710 nt, Artificial Sequence
  derived and/or modified CDS sequence (opt6) from LASV(ISTH1111-NIG-2011;Clade II)__AIT17467__NP
augagcgccagcaaagaagugaaaucauuccuauggacacaaagucuaagaagagaacuauccggguauugcucaucaauuaaacuacaaguaguaaaagaugcacaagcauuauuacacggauuagacuuuucagaagucaguaacguucaaagacuaaugagaaaacagaaaagagacgacagcgaccuaaaaagacuacgagaccuaaaucaagccguaaauaacuuaguagaacuaaaauccacacaacaaaaaucaauacuucgcgucggaacacuaacaagugaugacuuauuaacucuagcagcagaucuagaaaaauuaaaaagcaaaguaauaagaacagaaagaccacuauccaguggcguauacaugggaaaucuauccacacaacaacuagaacaaaggagagcauuauuaaacaugauagguaugguaggaggaacacaaggaacccaaccuggaagagauggaguaguuagaguaugggacgucaaaaauccagacuuauuaaauaaccaauuugguacaaugccaagucuaacacuagcaugccuaacaaaacaaggacaaguagaucuaaacgaugcaguucucgcacuaacagaccuaggauuaauauacacagcaaaauauccuaauagcucagacuuagaucgguuaagccaaucacauccaauauugaacaugguagauacaaagaaaucuucucucaauauaaguggauauaacuuuucucuuggagcagcagucaaagcaggagcguguauguuagauggaggaaauaugcuagaaaccauaaaaguaacaccccaaacaauggacggaauacuaaaaagcauauugaaaguuaagaaaucccucggaauguucguuagcgauacacccggugaaagaaacccauaugaaaacauauuauauaaaauaugucuaaguggagacggguggccauauauagcaucacgaacaucuauaguaggcagagccugggaaaacacaacaguagauuuagaaagcgauggaaaaccccaaaaaguuggaacugcaggaaguaauaaaagucuacaauccgcaggauuucccacaggucuaacauauagccaacuaaugacucuaaaagacaguaugaugcaauuagacccaucagcaaaaaccuggauagacauagaaggaagaccagaagacccaguagaaauagcacuauaucaaccaaugucaggauguuacauacacuucuuucgugaaccaacagacuuaaaacaauuuaaacaagacgcaaaauacagucauggaaucgacguagcggacuuauucccagcacaaccaggauuaacaagugcaguuauagaagcauuacccagaaacaugguauuaacaugucaaggaagcgaugauauuaaaagauuacuagauucacaagguagaagagacauaaaauuaauagauauaucacuaucaaaagcugacucuagacgauucgaaaaugcaguuugggaucaauguaaagauuugugccacaugcacacaggcguaguaguagagaaaaagaaaagaggagggaaagaagaaauuacaccacacugcgcauuaauggauugcauuauguacgaugcagcaguaucaggaggauuaaacauaccaguuuuaagggccguacuaccaagagacaugguauuuagaacaaguucaccuaaaguaguauuauaa

SEQ ID NO: 9327 - RNA, 1710 nt, Artificial Sequence
  derived and/or modified CDS sequence (opt6) from LASV(ISTH1121-NIG-2012;Clade II)__AIT17471__NP
auguccgcaaguaaagaaguaaaaaguuuccuauggacacaaucauuaaggcgagaacucaguggauauuguaguucuauaaaguuacaaguaguaaaagaugcucaagcacuucuacacggucuagauuuuucagaaguaagcaauguucaaagacuaaugcguaaacaaaaaagagacgacagugacuuaaaaagauuacgcgaucucaaccaagcaguaaauaaucuaguugaacuaaaaagcacucaacaaaaauccauauuaagaguuggaacauuaacaagcgacgaccuuuuaacauuagcugcagaccuugaaaaauuaaaaucaaaaguaauuagaaccgaaaggccauugaguagcggugucuauauggguaacuuaucaacacaacaacuagaacaaagaagagcacuuuuaaauaugauuggaaugguaggcggagcacaaggcacccaaccugguagagacggaguaguuagaguaugggaugucaaaaauccagaccuuuuaaacaaccaauucggaacaaugcccucacuaacucuugcaugccuaaccaaacaaggacaaguagaccuuaacgacgccguauuagcgcuaacugacuuaggacuaauauacacagcaaaauauccaaacucauccgauuuagacagauuaucacaaagucacccaauccuaaauauggucgauacaaaaaaaucaucacuuaauauaucaggauacaauuucucucuuggagcagcaguaaaagcaggcgcauguauguuagauggagguaauaugcuagaaacuauuaaaguaacaccacaaacaauggacggaauauuaaaaucaauauuaaaaguaaaacguucauuaggaauguuugucucagacacucccggagaaagaaauccauaugaaaauauacucuacaaaauaugucuaaguggagauggauggccauauauugcaucaagaacaucaauaguaggacgggcaugggaaaauacuacaguugauuuagaaagcgauggaaaaccacaaaaaauggggacaacaggaaguaauaaaucuuuacaaagcgccggauucccaacuggauuaacauauucacaguuaaugacuuuaaaagacucaaugaugcaacuagauccauccgcaaaaacauggauagauauagaaggaagaccagaagacccagucgaaauagcacuauaccaaccaaugucaggaugcuauauacacuucuuucgagaaccaacagauuuaaaacaauuuaaacaagaugcaaaauauagccaugguauugacguagcagauuuauuucccgcacaaccaggacuaacaagugcaguaauugaagcauuaccaaggaacaugguucuuacaugucaaggaucagaugauauuaaaaaacuauuagauucucaagguagaagagacauaaaacuuauagauaucgcacugagcaaagcagauagcagaaaauucgaaaacgucguaugggaucaauguaaagaucuuugccauaugcauacaggaguuguaguagaaaaaaaaaaacguggcgggaaagaagaaauaaccccacacugcgcacuaauggacuguauuauguaugacgcagcaguaucaggaggauuaaacauaccaguauuaagagcgguucuacccagagauaugguauuccgaaccagcaguccaaaaguuguauuauag

SEQ ID NO: 9328 - RNA, 1710 nt, Artificial Sequence
  derived and/or modified CDS sequence (opt6) from LASV(ISTH1129-NIG-2012;Clade II)__AIT17475__NP
augucagcaucaaaagaagugaaaucauucuuauggacacaaucacuucgaagagaacuaucaggauauugcucaucaauaaaacuacaaguaguaaaagacgcacaagcuuuauuacacggucuagacuucucagaaguuuccaauguccaaagauuaaugagaaaacagaaaagggacgauagcgaucuaaaaagauuacgagaccuaaaucaagccgucaauaauuuaguagaauuaaaaucaacucaacaaaaaucaguacugcgcguuggaacucuaacaucagaugaccuucuaacacuagcagccgaucucgaaaaacucaaaucaaaaguaauaagaacagaacgaccacuuucaucaggaguuuauauggguaauuuaagugcacagcaacucgaacaaagaagagcacucuuauccaugauaggaaugguaggcggagcccaaggaacacaaccaggaagagauggaguaguacguguuugggauguuaagaacccagacuuacuaaauaaucaauucggcacaaugccaucucuaacuuuagcaugccuaacaaaacaaggacaagucgaccuaaacgauaccguauuagcauuaacagacuuaggucuuauauauaccgcaaaauauccaaauucauccgaucuagauagacuuucccaaucccauccaauauuaaacauggucgacaccaaaaaaaguaguuuaaacauaucaggauacaauuucucacuaggagcagcagucaaagcaggggccuguaugcuugacggagguaacauguuagaaacuaucaaagucacaccacaaacaauggaugguauacuaaaaucaauccuuaaagucaaaagaucacucggaauguucgucagcgacacacccggagaaagaaaucccuacgaaaauauccuauacaaaauaugucucuccggugauggauggccuuauauagcaagcagaacaucaauaguaggaagagcaugggaaaauaccacaguagaucuagaaagcgauggaaaaccacaaaaagucggaaccgcaggaagcaauaaaaguuuacaaagcgcaggauuuccaaccggacuaacauauucacaauuaaugacacuaaaagauaguaugaugcaauuagauccaagugcaaaaacauggauagauauagaaggacgaccagaagacccagucgaaauugcauuauaccaaccaauaucgggauguuacauacacuucuuucgagaacccacugaucuaaaacaauuuaaacaagacgcaaaauacagccauggaauagacguaacagacuuauuuccugcacaaccaggccugaccagcgcaguaaucgaagccuuaccaagaaauaugguauuaaccugccaaggaucagaugauauuaaaagacuacuagacucccaaggaagaagagauauaaaaauuauagauauagcuuuaucgaaagcagacucuagacgcuucgaaaacgcuguaugggaccaaugcaaagacuuaugccacaugcauacaggcguuguaguagaaaaaaaaaaaagaggaggaaaggaagaaauuacaccacauugcgccuuaauggacuguauaauguaugacgcugcaguaagcgguggacuaaauauaccuguacuacgagcaguccuaccacgugauaugguauucagaacaaguaguccaaaaguaguccuguaa

SEQ ID NO: 9329 - RNA, 1710 nt, Artificial Sequence
  derived and/or modified CDS sequence (opt6) from LASV(ISTH1137-NIG-2011;Clade II)__AIT17479__NP
augagugcauccaaagaaguaaaaaguuuuuuauggacucaaucgcuacgaagagaacuaucaggauacugcucaaauauuaaauuacaagucgucaaagaugcacaagcacuauuacacggacuagauuuuucugaaguaucaaauguacaaagacucaugaggaaacaaaaaagagacgacucagaucuaaaaagauuaagagaccuuaaccaagccguaaauaacuuaguagaacuuaaaucuacucaacagaaaagcgucuuaagaguaggaacacuaacaagugacgacuuauuaacuuuagcagcugaccuagaaaaauuaaaaaguaaaguaauaagaacagaaagaccacuaucaaguggaguauauaugggaaauuugucaacucaacaauuagaacaaagaagagcucuuuugaacaugauaggaauggucggaggcgcucaaggaacacaaccaggacgugacggagucguacgagucugggauguaaaaaauccagaccuacuaaauaaucaauuuggaacaaugccuucacuuacacucgcaugccuaacaaaacaaggacaagucgaucugaacgaugcaguauuagcucuaacagaucuaggcuuaauauauacagcaaaauacccaaacucaucagauuuagaccgucuaagucaaucgcacccaauacuaaauaugguugauacaaaaaaaucaagccuaaauauauccggauauaacuucucucuaggagcagcaguaaaagcaggagcuugcauguuagauggaggaaauaugcuagaaacgauaaaaguaacuccacaaaccauggacggaauacuuaaaucaauauugaaaguaaagagaagucuaggcauguucguaagugauacaccaggagaaagaaacccauacgaaaauauuuuauacaaaauaugucuaaguggagauggauggccauauauagcaagcagaacaaguauaguaggacgagcaugggagaauacaacagucgaucuagaaucagacggaaaaccacaaaaaguuggaacagcagggucaaacaaaucacuacaauccgcaggauuuccaacuggauuaacauacagucaauuaaugacauuaaaagauagcaugaugcaguuagauccaagugcaaaaacauggauagacauagaaggaagaccagaagauccagucgaaauagcauuauaucaaccaaugagcggcuguuacauacacuucuucagagaaccaacagacuugaaacaguuuaaacaggacgcaaaauauagccaugguauagauguagcagaucuauuucccgcacaaccaggacuaacaagugcaguaauagaagcuuuaccacgaaauaugguacuuacaugucaagguucugaugacauaaaaaaauuacuagacucacaggguagaaaagacaucaaacuaauagacauagcuuuaagcaaaguagacucaagaagauuugaaaacgcaguaugggaccaaugcaaagaccuaugucacaugcacacagguguaguuguagaaaaaaaaaaaagaggaggaaaagaagaaauaacaccacacugcgcauuaauggauugcauaauguacgacgcugcaguaagugggggcuuaaacauaccaguauuaagagcaguauuaccuagagacaugguuuucagaacaagcucaccaaaaguaguacuauaa

SEQ ID NO: 9330 - RNA, 1710 nt, Artificial Sequence
  derived and/or modified CDS sequence (opt6) from LASV(ISTH2010-NIG-2012;Clade II)__AIT17483__NP
augucagcuaguaaagaaguaaagagcuucuuauggacucaaagucuucgacgagaacuaucagguuauugcagcaacauaaaacuucaaguaguaaaagacgcacaagcacuauuacacggauuagacuucucagaaguaucaaauguacaaagacuaaugagaaaacagaaaagagacgacagcgaucuaaaaagauuaagagauuuaaaucaagcuguuaauaauuuaguugaacuaaaaagcacacaacaaaaaucaauauuaagaguaggaacacuaacaucagaugacuuacuaacauuagcagccgacuuagaaaaacuaaaaucaaaaguaauaagaacagaaagaccucuaucaagcggcguuuacaugggaaacuuaucaacccaacaacuagaacaaagacgagcauuauuaaaccuaauaggaaugguagguggugcacaaggaacacaaccaggaagagacggcguaguuagaguaugggacgucaaaaacccagaucuacuuaacaaccaauucggaacaaugccauccuuaacucuagcaugcuuaacaaaacaaggacaaguagaccuaaacgaugcaguauuagcucuuacagacuuaggacuaauauacacugcuaaauauccaaauucaucagauuuggacagacuaucacaaucacauccaauacuaaacauggucgauacuaagaaaaguucacuaaauauuucuggauucaauuuuucauuaggagcagccguaaaagccggagcauguaugcuagaugguggaaauaugcuagaaacaauaaaaguaacaccacaaaccauggauggaauauuaaaauccauacuaaaaguaaagaaauccuuaggaauguuuguaucagacacuccaggagaaagaaaucccuacgaaaacauucuuuacaaaauaugucuuucaggagacggcuggcccuauauagcuucaagaacaucaauaguagguagagcuugggaaaacacaacuguagaccuugaaucugacgguaaaccacauaaaguagguacagcaggaucaaacaaaaguuuacaaagugcaggauuuccaacuggacucacauacagucaacuaaugacccuaaaagacucaaugaugcaauuagauccaucagcaaaaacauggauagauaucgaaggucgaccugaagacccaguagaaaucgcguuauaucaaccaaugaguggauguuacauacacuucuucagggaaccaacggauuuaaaacaauuuaaacaagacgcuaaauacagccacggaauugacguugcagaccuuuuuccagcacaaccaggccuaacaucagcaguuauagaagcacuaccaagaaauaugguauuaacuugucaaggaucggaugacaucaaaagacuacuagacucucaggguagaagggauauaaaauuaauagauauagcacuaucuaaagcagacucaagaagauuugaaaaugcuguuugggaccaaugcaaagaccuaugccauaugcauacaggagucguaguagagaaaaagaaaagaggaggaaaagaagaaauaacaccacauugugcauuaauggauuguaucauguaugaugccgcgguaagcggaggacuaaacauaccaguauuaagagcuguauuaccuagagauaugguauucagaacaucaucgccaaaaguaguacuauaa

SEQ ID NO: 9331 - RNA, 1710 nt, Artificial Sequence
  derived and/or modified CDS sequence (opt6) from LASV(ISTH2020-NIG-2012;Clade II)__AIT17491__NP
augucagcuaguaaagaaguuaaaucauuccuguggacacaaucauuacgcagagaacucucagguuacuguucaaauauaaaacuucaaguagugaaagacgcacaagcauuacuccauggauuagacuuuagugaaguaagcaacguacaacggcuaaugagaaaacaaaaaagagacgauggagaucuuaaacggcucagagaucugaaucaagcaguaaauaauuuaguagaacuaaaaagcacacaacaaaaaucaguccuuagaguagggacauuaacaagugaugacuuacuaacuuuagcagccgauuuagaaaaacuuaaaagcaaaguaauaagaacagaacguccauuaagcagcggaguauacaugggaaacuuaucaacacaacaacuagaacaaagacgugcauuacuaaguaugauaggaaugguuggcggagcaagaggaacacaaccaggaagagauggaguaguaagagugugggauguaaaaaacccagaucuauuaaacaaucaguuuggaaccaugccaucacuaacacucgcaugcuuaacuaaacaaggccaaguagaccuuaacgauguaguacuagcauuaacagauuuaggacuaauauacacagcaaaauaccccaauaguucagaucuugacagauuaagccaaucacauccaauauuaaauaugguagauacaaaaaaaucuucccuaaacauaagugguuauaacuucucuuuaggagccgcgguaaaagcaggugcauguauguuggauggagggaacauguuagaaacaauaaagguaacaccucaaacaauggacgguauauuaaaauccauucuaaaaguaaaaaaaagucuaggaauguuuguaucagauacaccuggagaacguaacccauaugaaaacauacuauacaaaauaugccuaaguggcgacggauggcccuauauagcaucaagaacaucaaucguaggccgugccugggagaacacaacugucgauuuagaaagcgaugguaaaccacaaaaaguaggagcugcagguucaaacaaaucauuacaaagugcaggauucccaacuggauuaacauauucacaacuuaugacuuuaaaagauucaaugaugcaacucgauccaucagcaaaaaccuggauagauaucgaaggcagaccagaggauccuguugaaauagcauuauaucaaccaaugucaggauguuacauacacuuuuucagagaaccaacagaucuaaaacaauucaaacaagaugcaaaauauagccauggaauagaugucacagaccuauuuagcgcucaaccaggacugacauccgcaguaauagaggcacucccacgaaacaugguacuaaccugucaagggagugaugacauaaagagacuacuagacagucaaggacguagggauauuaaacuaauugauauugcuuuaucaaaagcagauucaagaagauuugaaaaugcuguaugggaucaauguaaagaccuaugucauaugcauacaggaguaguaguagaaaaaaaaaaaagaggaggaaaagaagaaauaacaccacauugugccuuaauggauugcauaauguaugacgcagcaguaagcggcggacuuaauauaccaguauuaagagcaguauuaccaagagauaugguauuuagaacaaguucaccaaaaguaguauuauaa

SEQ ID NO: 9332 - RNA, 1710 nt, Artificial Sequence
  derived and/or modified CDS sequence (opt6) from LASV(ISTH2025-NIG-2012;Clade II)__AIT17495__NP
augagcgccagcaaagaaguaaaaucauuucuauggacacaaucauuaagaagagaauuaagcggauauuguucgaacauuaaacuacaaguuguaaaagaugcccaagcacuccuacacggcuuagauuucucugaaguaagcaauguccaaagauuaaugagaaaacaaaaaagagacgacucagacuuaaaaagacuacgagaucuaaaucaagcagucaauaacuuaguugaacuaaaaaguacucaacaaaaaucaauuuuaagaguaggcacguuaacuucugacgacuuacuaacuuuagccgcugaucuagaaaaacuaaaauccaaaguaauaagaacagaaagaccccuaucaucuggaguauauaugggaaauuuaaguacucaacaacucgaacaacgcagagcauuauuaaacaugauaggaaugguaggaggugcccaaucagcacaaccuggccgagacggcgucguaagaguaugggauguaaaaaacccagaccuauuaaacaaccaauucggaacaaugcccucgcucacauuagccuguuuaacaaaacaaggacaaguagauuuaaaugaugcaguacuagccuuaacugacuuaggauuaauauacaccgcaaaauacccuaauagcucagaccuagacagacuuagucaaucucacccaauauuaaacaugguagauaccaaaaaaucaagccuaaacauuucugguuuuaauuuuucacucggagcagcaguaaaagcaggagcaugcaugcucgacggagguaacauguuagaaacuaucaaagucacaccacaaaccauggacggaauauuaaaaaguauacuaaaaguuaaaagaucauuaggaauguucgucagcgaugcacccggagaacgaaaucccuaugaaaauauuuuauacaaaauaugucuaucaggagacggauggcccuauauagcaagcagaacaaguaucguagguagagcaugggaaaauacaacuguagaucuugaaagcgauggaaaaccacaaaaaguaggaacagcaggaaguaauaaaucacuccaaucagcaggauuuccuaccggacucacauauucacaacugaugacccugaaagacucaaugaugcaacuagauccuagugcaaagacauggauagauauagaaggaagaccagaagacccgguagagaucgcucucuaucaaccaaugucagguuguuacauucauuucuuuagagaaccaacagaucuuaaacaauucaaacaagaugcaaaauacagccauggaauagacguagcagaucuauuuccugcgcaaccuggguuaacuuccgcugucauagaagcacuaccaagaaauaugguauugacaugucaaggaucagaugacauaaaaaaacuauuagacucacaaggacgaagagauauaaaauuaauagacauagcacuaucaaaagcagacucuagacgauuugaaaacgcaguaugggaucaaugcaaagacuuaugucauaugcauacaggaguaguaguagaaaagaaaaaaagagguggaaaagaagaaauaacaccucacugcgcacuaauggacugcauaauguaugaugcagccgucaguggaggauuaaauauaccuguauugagagcaguauuacccagagauaugguauuccguacaucaagcccaaaaguaguacucuaa

SEQ ID NO: 9333 - RNA, 1710 nt, Artificial Sequence
  derived and/or modified CDS sequence (opt6) from LASV(ISTH2031-NIG-2012;Clade II)__AIT17499__NP
augagcgcaucaaaagaaguaaagagcuucuuauggacacaaucacuuagacgagaacuaaguggcuauugcaguucaauaaaacuacaaguugugaaagacgcacaagcauuacuacacggauuagacuucagcgaaguaucaaacguacaacgacuuaugagaaaacaaaagagagacgacucagacuuaaaaagauuaagagauuuaaaucaagccguaaacaaucuaguagaacuaaaaucaacucaacaaaagaguauuuuaagaguuggaacacuaacaucagaugauuuauuaacucucgcugcagaucuagaaaaauuaaaaaguaaaguaauaagaacagaaagaccacuaucaucaggaguauauauggggaaucuaucuacucaacaacuagaacaaagaagggcacuauuaaacauaauaggaaugguaggaggagcgcaaggaacacaaccugguagagauggaguaguacgaguaugggaugucaaaaauccugaccuuuuaaauaaccaauucggaacaaugccaucacuaaccuuagcaugccuaaccaaacaaggucaagucgauuuaaacgaugcaguacucgcauugacagaccucggacucauauauacagcaaaauauccaaauucaucagaccuugacagauuaucacaaucacacccaauauuaaauaugguagacacuaagaaaucaucacuaaacauaaguggauacaauuuuagccuaggugcagcaguaaaagcuggugccugcauguuagauggaggaaauauguuagaaacaauuaaaguaacaccacaaacaauggauggaauccuaaaaucuauauuaaaaguaaaaagaagucuuggaauguuugugagcgacacaccaggagaaagaaacccauaugaaaauauacuauauaaaauaugucuauccggagacggauggccauauaucgcuucucgaacaucaauaguagggagagcaugggaaaauacuacuguagaucuagaaagugauggaaaaccacaaaaaguaggagcagcaggaaguaauaaaucauuacaaucggcagguuuuccuacaggauuaacguauucucaauuaaugacacuaaaagauaguaugaugcaacuagauccaucugcaaaaacauggauagacauagaaggaagaccagaagauccuguagaaaucgcucuuuaccaaccaaugaguggaugcuacauacacuuuuucagagagccuacugaucuaaaacaauuuaaacaagacgcgaaauacagucauggaauugacguagcugaucucuuuccagcccaaccaggacuaacauccgcaguuauagaagcccugccacgcaacaugguucugacaugucaaggaucagaugacguaaaaagacuauuagauagccaaggcagaagagacauaaaacuaauagacauagcucuaucaaaagcagacagccguagauuugaaaaugccguaugggaucaaugcaaagaucuaugccauaugcacaccggaguaguaguagagaaaaagaaaagaggaggcaaagaagaaauaacaccacauugugcucuaauggacugcauaauguaugaugcugcaguaucuggcggccuuaauauaccaguccuaagggcaguacuaccacgagauaugguauucagaacaagcucaccaaaaguaguacuauaa

SEQ ID NO: 9334 - RNA, 1710 nt, Artificial Sequence
  derived and/or modified CDS sequence (opt6) from LASV(ISTH2037-NIG-2012;Clade II)__AIT17503__NP
augucaagcagcaaagaaguaaaaaguuucuuguggacucaaagucuaagaagagaauuauccggauauuguucaucaauaaaauugcaaguugugaaagacgcacaagcacuguuacacggacuagauuucuccgaaguuucaaauguacaaagauuaaugagaaaacaaaaaagagacgacucagaucucaaaagauuaagagaccucaaucaagcaguaaauaacuuaguggaacuaaaaucaacacaacaaaaaagcauauuaagaguagguacccuaacaucagaugaucuccuaacacuggcagcagaccuagaaaaauuaaaaagcaaaguaauccguaccgaaagaccauuaucauccggaguauacaugggcaaccuaagcgcucaacaacucgaacaaaggagagcacuacuaaauaugauagguaugguaggaggagcacaaggaacacagccaggacgagacgguguagucagaguaugggacgucaaaaauccagaccuauuaaacaaccaauuuggaacuaugccaucacuaacacuagccugucuuacaaaacaaggccaaguugaucuuaacgacgcaguauuagcacucacagauuuaggauuaaucuauacagcaaaauauccgaacucaucagaucuagauaggcuaucacaaucucauccaauauuaaauaugguagauacaaaaaaauccucauuaaauauaucaggauauaacuucucacuaggagccgcaguaaaagcaggagcauguauguuagauggcgguaacauguuagaaacaauaaaaguaacaccccaaaccauggacggaauacuuaaaagcaucuuaaaaguuaaaaaaagcuuaggaauguuuguaagcgauacaccaggugaaagaaauccuuaugaaaacauccuauacaaaauaugucuaucaggagacggauggccauauauugcaucaagaacaucaaucguaggucgagcaugggaaaacacaacgguagaucuagaaagugauggaaaaccacaaaaagugggcacagcagguucaaauaaaucauuacaaucugcaggcuuuccaacaggauuaacuuauucacaauuaaugacacuaaaagacagcaugaugcaauuagauccaucagcuaaaacuuggauagauauagaaggaagacccgaagauccaguugaaauagcacuauaccaaccaaugucaggauguuauauucacuuuuucagagaaccaacugaucuaaaacaauucaaacaggaugcaaaauacagccauggaauagacguagcagaucuauuuccagcucaaccaggacuaacaucagcagucauagaagcauuaccaagaaacaugguacuaacuugccaaggaucagaugacauuaaaagacuacuugacucucaaggucgacgagauauaaaacuaauagacauugcacuaucaaaagcagauaguagaagauuugaaaacgcaguaugggaccaaugcaaagacuuaugccauaugcauacaggugucguaguagaaaaaaaaaaaagaggaggaaaagaagaaaucacgccacacugugcauuaauggacuguauuauguacgacgcagccguaaguggaggccuuaacauaccaguacuaagagcaguacucccaagagauaugguauuuagaacaucaucaccaaaaguuguauuauag

SEQ ID NO: 9335 - RNA, 1710 nt, Artificial Sequence
  derived and/or modified CDS sequence (opt6) from LASV(ISTH2042-NIG-2012;Clade II)__AIT17507__NP
augagcgccucaaaggaaguaaaaagcuuccuauggacacaaucucucagaagagaacuaucaggauauuguucaaacaucaaauuacaaguaguaaaagacgcacaagcacuacuucacggacuagauuucucugaaguuaguaauguucaaagauuaaugagaaaacaaaaaagagacgauucagauuuaaaacgauuacgagacuuaaaucaagcagucaauaacuuaguagaacuaaaaagcacacagcaaaaaagcauacuaagaguaggcacauuaacaagugacgauuuauuaacacucgcagcagacuuagaaaaacuaaaaucuaaaguaauaagaacagaaagaccucuuuccucaggaguauauaugggaaaccuaucuacacaacaauuagaacaaagaagagcucuacuaaauuuaaucggaauggucggaggagcccaaggaacucaaccaggaagagacgggguaguaagaguaugggacguaaaaaaccccgacuuacuaaauaaccaguuugggacuaugccaagucuaacuuuagcauguuuaacaaaacaaggacaaguugaccuaaacgacgcaguccuagcacuaacagaucuaggauuaauauauaccgcaaaauacccaaacuccucagacuuagaccgacucucacaaucacacccaauauuaaacaugguagacacaaaaaaaucaucuuuaaauauaucaggauucaauuucucuuuaggagcagcaguaaaagcaggugcauguaugcuagacggaggaaauaugcuagaaacaauaaaaguaaccccacaaacaauagacggaauauuaaaaucaauacuaaaaguuaaaaaaagucuaggaauguucguaucagauacacccggcgaacgaaauccuuaugaaaauauacuuuauaaaaucugccuaucuggagauggauggcccuacaucgcuucaagaacuucaauaguaggaagagcaugggaaaauacaacaguugaucuagaaucagacggaaaaccccacaaagucggaacugcaggaagcaauaaaucacuacaaagugcaggauuuccaacgggauuaacuuauucacaacuaaugacauuaaaagauagcaugaugcaacuagauccauccgcaaaaacauggauugauauagaaggacgaccagaagauccaguagaaauagcacuauaccaaccaaugucagguuguuacauacacuuuuuccgagaacccacugauuuaaaacaauuuaaacaagaugccaaauauucacauggaauagacguugcagauuuauuccccgcccaacccggccuuacaagugcaguaauugaagcauuaccaagaaacaugguacucacaugucaaggaucagacgacauuaaaagacuauuagacucacaaggaagaagagacauaaaauuaauagacauagcuuuaucaaaaguagacucuagaagauuugaaaacgcaguaugggaucaauguaaagaccucugccauaugcacacaggcguaguaguagaaaaaaaaaagagaggggguaaagaagaaauuacaccgcauugugcccuaauggacuguauuauguaugacgcagcaguuagcggaggauuaaauauaccaguacuaagggcaguuuuaccaagagauauggucuuuagaacaagcucacccaaaguugucuuauaa

SEQ ID NO: 9336 - RNA, 1710 nt, Artificial Sequence
  derived and/or modified CDS sequence (opt6) from LASV(ISTH2046-NIG-2012;Clade II)__AIT17511__NP
augagugcuucaaaagaaguaaaaucauuuuuauggacccaaucauuaagaagagaacuaucgggauauugcucaaacauaaaacuacaaguaguaaaagaugcacaagcacuauuacacggacuagacuuuucagaaguaaguaauguccaaagauuaaugcgaaaacaaaaacgagaugauggcgaccuuaaacgauuaagagaccucaaucaagcaguaaacaaccuaguagaacucaaaucaacacaacaaaaaucaauauuacguguuggaacacuuacaucagaugaccuacuuacauuagcugcagacuuagaaaaacucaaaagcaaaguaaucagaacagaaagaccauuaaguucaggugucuacauggguaacuuaucaacacaacaacucgaacaaaggagagcacuuuuaaauaugauuggcaugguaggaggagcccaaggcacacaaccaggaagagauggagucguccgaguaugggauguuaaaaauccagauuuacuaaauaaccaauuuggaacaaugcccagcuuaacacuugcaugcuuaacaaaacaaggccaaguagacuuaaacgacgcaguacuagcguuaaccgaccuaggauuaauuuauacagcaaaauauccaaauaguucagaccuagaccgucuaucacaaagccaucccauauuaaauaugguugacacaaagaaauccucauuaaacauaucaggauacaauuuuucacuaggugcugcaguuaaagcuggagcauguauguuagauggugguaauauguuagaaacuauaaaaguaacaccacaaacgauagacggaaucuuaaaaaguauauuaaaaguuaagaaaucacuuggaauguucguaucagauaccccaggagaaagaaauccauacgaaaacauacuauacaaaauaugcuuaaguggcgauggcuggccauauauagccucccgaaccucaauaguagggagagcaugggaaaauacaacaguagauuuagaaucugacggaaaaccacaaaaagucggaacagcaggaagcaauaaaucacuacaauccgcaggcuucccaacaggauuaacauacucacaauuaaugacauuaaaagacaguaugaugcaauuagacccaucagcaaaaacauggauagauauagaaggaaggccagaagauccaguugaaauagcguuauaucaaccuaugagcggaugcuauauacauuucuuucgagaaccaacagaucuaaaacaauuuaaacaagaugcaaaauauucacauggaauagacguaacagaucuauuuagcgcacaaccaggcuuaacaucagcaguaauagaagcacuaccaagaaacaugguuuugacaugccaaggauccgacgauauaaaacgucuuuuagauucacaaggaagaagagacauaaaauuaauugauauagcacuuucuaaagcggacucacgaagauuugaaaacgcaguaugggaccaaugcaaagauuuaugucacaugcauacaggaguuguagucgagaaaaagaaaagaggcgguaaagaagaaauaaccccacauugugcauuaauggacugcauaauguacgacgccgcaguuagcggaggauuaaauauaccugucuuacgagcaguacuaccaagagauaugguauuuagaacaucuaguccaaaaguaguacuauaa

SEQ ID NO: 9337 - RNA, 1710 nt, Artificial Sequence
  derived and/or modified CDS sequence (opt6) from LASV(ISTH2050-NIG-2012;Clade II)__AIT17515__NP
augucagcaucaaaagaaguaaaaucauuucuauggacacaaucacuaagaagagaacuuucaggauauugcuccucaauuaaauuacaaguaguuaaagacgcucaagcacuauuacacggauuagauuucucagaaguauccaauguacaaagauugaugagaaaacagaaaagagaugauagugauuuaaaaagauuacgagauuuaaaccaagcaguaaauaaucuuguugaauuaaaaucaacacaacaaaaaucaauacuacgcguagguacucuuacuucagacgaucuauuaacauuagcagcagacuuagaaaaauuaaaaucaaaagucauuagaacugaaagaccucuaucaucaggaguauacaugggaaaucuaaguacacaacaacuagaacaaagacgagcuuuauuaaauaugauaggaauggugggaggagcacaaggaacacaaccaggaagagacggaguaguaagaguaugggauguaaagaauccugaccuacuaaauaaucaauucgguacaaugccaucacuaacauuagcaugcuuaacaaaacaaggacaagucgaucuuaaugacgcaguacuugcauuaacagaccuaggacuaauauauacagcaaaauauccaaauucaucugacuuagauagauugucacaaagccaccccauauuaaacaugguagauacaaagaaaucuagucuaaauauaaguggauacaacuuuucucuaggagccgccguaaaagccggagcauguaugcuagauggaggaaauaugcuagaaacaauaaaaguaacuccacaaacaauggacggaauauuaaaaagcauauuaaaagugaaaagaaguuuaggaauguucguuagugauacaccuggcgaacgaaauccauaugagaacauacuauacaaaauaugucucucaggagauggauggccauauaucgcaaguagaacuagcaucguaggcagggcaugggaaaauacaacaguagaucuagaauccgauggaaaaccacaaaaaguaggagcugcagguaguagcaaaucacugcaaucagcaggauuuccaacaggguuaaccuauucgcaacuaaugacguuaaaagacucaaugaugcaauuagauccaagcgcaaaaacauggauagacauagaaggacgaccagaagacccaguagaaauagcucuauaucaaccuguaucuggcuguuauauacacuucuuccgagaacccacugaucugaaacaauucaaacaagacgcaaaauauucacauggaauagacguagcggacuuauuuccagcucaaccggggcuuacaagugcaguaauagaagcauuaccaagaaauaugguacuaacaugccaaggaucagacgacauuaaacgacuauuagacucucaagguagaagagacauaaaauuaauagacauagcgcuaucaaaagcagacucaagaagauuugaaaacgccgucugggaucaaugcaaagaucuaugucauaugcauacaggaguaguaguagagaaaaagaaaagaggaggaaaagaagaaauuacaccucauugugcuuuaauggacugcauuauguacgaugcagcaguaaguggcggauuaaacauuccagucuuaagagcuguuuuaccacgagauaugguuuuccgaacaaguagcccaaaagucguauuauga

SEQ ID NO: 9338 - RNA, 1710 nt, Artificial Sequence
  derived and/or modified CDS sequence (opt6) from LASV(ISTH2057-NIG-2012;Clade II)__AIT17519__NP
augagugcaagcaaagaagugaaaucauuucuauggacacaaucacuacgaagagaacuaucuggauauugcucaaacauaaaacuacaaguaguaaaagacgcacaggcauuacuacacggucuagacuuuucugaaguuucuaacguacaaagauuaaugagaaaacaaaaaagagaugauagugaucuaaaaagauuaagagaccuaaaucaagcaguaaauaacuuaguagaacucaaaucaacacaacagaaaucaauauuaagaguagguacacucacaagugaugacuuacuaacauuagcugcagaucuagaaaaacuaaaaucaaaagugaucaggaccgaacgaccuuuaaguucaggaguauacaugggcaauuuaagugcacaacaauuagaacaacgucgagcacuucuaaacaugauugguaugguaggaggugcacagggaacucaaccuggaagagauggaguaguucguguaugggauguaaaaaauccugaucuacuaaacaaucaguucggaacaaugccaucauuaacccuagcaugcuuaacaaaacaagggcaaguagauuuaaaugaugcaguacuggcauuaacagaucuuggcuuaauuuauaccgcaaaauauccaaauucaagugaccuagacagauuaucacaaucucaccccauauuaaauaugguagacacaaaaaaaaguaguuuaaauauaucaggauucaauuuuucauuaggugcagcaguaaaagcaggugcauguaugcuagauggaggaaauauguuagaaacaauaaaaguaacaccacaaaccauggacgguauucuaaaaucaauacuaaaaguaaaaagaagccuuggaauguuuguaucagauacaccaggugaaagaaauccauaugaaaacauccuauacaaaauaugccuaucaggcgauggauggccauauauagcaucacgaacaaguauaguaggaagagcuugggaaaauacgaccguagauuuagaaucagacggaaaaccccaaaaagucggaacagcaggaucaaauaaaagccuacaaagugcaggauuuccaaccggacuaacauauagccagcuaaugacauuaaaagacucuaugaugcaacuggauccaucagcaaaaacauggauagauaucgagggaagaccggaagauccuguagaaauagcacuuuaucaaccaaugucagguuguuauauacauuuuuucagagaaccaacagauuuaaaacaauucaaacaagacgcaaaauauagucauggaauagauguugccgacuuauuuccagcacaaccaggauuaacaucagcagugauagaggcuuuaccgagaaacauggucuuaacaugucaaggaagugaugauauaaaaagacuacuagauucucaagguagaagagacauaaaauuaauagauauagcauuaucaaaagcagacucacgaagauucgaaaaugccgucugggaucaaugcaaagaucugugccacaugcauaccgguguuguaguagagaaaaaaaaacgcggaggaaaagaagaaauaacaccccacugugcacuaauggauugcauaauguaugacgcggcaguuucugguggauuaaauauacccguucuaagagcagugcuaccucgagacaugguauuccgaacuucuagcccaaaagugguauuauga

SEQ ID NO: 9339 - RNA, 1710 nt, Artificial Sequence
  derived and/or modified CDS sequence (opt6) from LASV(ISTH2064-NIG-2012;Clade II)__AIT17525__NP
augucagcaaguaaagaaguaaaaaguuucuuauggacacaaucacuaagaagagaauuaucuggauauugcucaucaaucaaacuucaaguaguaaaagaugcacaggcuuuacuacauggacuagauuucucagaaguuucaaacgugcaaagacuuaugagaaaacaaagaagagaugacucagaucuaaaaagacuaagagaccuaaaccaagcugucaacaaucucguagaauuaaaaucaacacaacaaaaaucaauucuaagagucggcacucuaacaucugacgauuuauuaacucuagcagccgauuuagaaaaauuaaaauccaaagucauaagaacagaacgaccacuaucaagcgguguauauauggguaaccuaucaacccaacaacuagaacaaagacgagcauuauuaaacaugauaggaaugguaggaggagcacaagggacacaaccaggaagagacggaguaguaagaguaugggauguuaaaaauccagauuuacuaaauaaccaauuuggaaccaugccaagucuaacauuagcauguuuaacaaaacaaggucaaguagacuugaacgaugcaguauuagcauuaacagacuugggccuaauauacaccgcaaaauauccaaacagcagugacuuagaccgacuaucacaaagucacccaauacuaaacaugguagauacaaagaaaaguaguuuaaacauaagcgguuacaauuuuucauuaggagccgcaguaaaagcuggagcuugcauguuagauggcggaaauaugcuggaaacaauaaaaguaaccccacaaacaguagacggaauauuaaaaaguauacuaaaaguaaaacgaucauuaggaauguucguaagugauacacccggagaaagaaauccauaugaaaauauacuauacaaaaucugcuuaucaggcgacgguuggccauauauagcaucacgcacaucaauaguaggcagagcaugggaaaacacaacagucgaucuagagucagauggaaaaccucaaaaagucggcacugccggaucaaauaaaagucuacaaucagcaggauuuccaacagguuuaacauacucucaacuaaugacauuaaaagauaguaugaugcaauuagauccaucagcaaaaacauggauagacauagaaggaagaccagaagauccaguagaaauagcgcuuuaucaacccauguccggauguuacauccacuuuuucagagaaccuaccgacuuaaaacaauucaaacaagaugcaaaauauagccacggaauagaugucgcagaucuauucccaacucaaccaggauuaacaagcgcaguaaucgaagcgcuaccaagaaauaugguauuaacaugucaaggaagcgaugacauaaaaagacuauuagacucacaaggaaggcgagacauaaaauuaauagauauagcacuaucaaaagcagauucaagaaaauuugaaaacgccguaugggaccaauguaaagaccuaugccauaugcauacaggaguuguaguagaaaagaagaaacgaggaggcaaagaggaaauaacaccacacugugcucuaauggauugcauaauguaugaugcagcaguaucaggaggacuaaacauaccaguauuaagagcaguucuaccucgcgauaugguauuucgaacaucaucaccaaaaguaguauuauaa

SEQ ID NO: 9340 - RNA, 1710 nt, Artificial Sequence
  derived and/or modified CDS sequence (opt6) from LASV(ISTH2065-NIG-2012;Clade II)__AIT17529__NP
augucagcuagcaaagaaguuaaaucauucuuauggacacaaagccuacgaagggaacuaaguggauauugcagcaauauaaaacuucaaguuguaaaagaugcucaagcauuauuacacggauuagacuucuccgaaguaaacaacguacagagacuuaugagaaaacagaaacgagacgauucagacuuaaaaagacuacgcgaccuaaaccaagcuguaaauaauuuaguagaacuaaaaagcacacaacaaaaauccauauuaagaguaggaacacuuacaagcgaugauuuauuaacauuagcagcugaccuagaaaaauuaaaaucaaaaguaauaagaacagaaagaccacuaucaucaggcguauauaugggaaaccuuucaacacaacaacuagaacaaagaagagcauuauuaaacaugauuggcauggcagggggcacacaaggaacacaaccaggcagggacggagucguaagaguaugggacguaaaaaacccagauuuauuaaauaaucaauucggaacaaugccaucucuaacguuagcaugccucacaaaacaaggacaaguagaucuaaacgaugcuguacuagcuuuaacagaccuuggauuaauauauacugcaaaauauccaaauucuucagauuuagaccgacuaucacaaucacacccaauacuaaauaugguagauacuaaaaaaucaagcuuaaacauuaguggauacaauuuuucacuaggagcagcaguaaaggcaggcgcauguauguuagauggagggaauauguuagaaacaauaaaaguaacaccacaaacaauggacgguauauuaaaaaguauauuaaaaguuaaacguucacuaggaauguuuguaucagauacuccaggagaaagaaauccauaugaaaauauacuauacaaaauauguuuaucaggagauggcuggccauacauagcaaguagaacaaguauaguaggcagagcaugggaaaauacaacuguagacuuagaaucugauggaaaaccacaaaaaguaggaacugcaggaucgaauaaaagucuacaauccgccggauuuccgacaggucuaacauauagccaauuaaugacuuuaaaagacagcaugaugcaacuagauccauccgccaaaacauggauagauaucgaagguaggccagaagaccccguagaaauagcucuauaccaacccaugucaggaugcuacauccacuuuuuccgagaaccaacugaucuuaaacaauuuaaacaagacgccaaauauagucaugguauagauguugcagaucuauucccagcgcaaccagguuuaacaagugcaguaaucgaagcacuuccacgcaacaugguacuaacaugccaaggaucagaugauauaaaaaaacuacuugauucccagggucgucgagauauaaaauuaauagauauaucuuuauccaaaauagauucaagaaaauucgaaaaugcaguuugggaucaauguaaagaccucugccacaugcauaccggaguaguaguagaaaagaaaaaaagaggcggaaaagaagaaauaacaccccacugugcacuaauggacugcauaauguucgacgcugcaguaagcgguggucuaaacauaccaguauuacgugcaguccuuccaagagacauggucuucagaacaagcaguccaaaaguuguauuauaa

SEQ ID NO: 9341 - RNA, 1710 nt, Artificial Sequence
  derived and/or modified CDS sequence (opt6) from LASV(ISTH2094-NIG-2012;Clade II)__AIT17539__NP
augucagcuaguaaagagguaaaauccuuccuauggacacaaucucucagaagagaacuaucugguuacugcucaaacauaaaacuccaaguaguaaaagacgcacaagcccucuuacauggacuagacuucuccgaagucucaaauguacaaagauuaaugagaaaacaaaaaagagaugacggagaucuaaaaagacuaagagauuuaaaucaagcuguaaauaaccucgucgaacuaaaaucaacacaacaaaaaucaguuuuaagaguaggaacacuaacaagugaugaucuucuaauauuagcagcagaccuagaaaaauuaaaaucuaaaguaauaaggacagaaagaccauuaucaagcggaguauacaugggaaauuuaucaacccaacaauuagaacaaagaaaggcacuccuaucaaugauaggaaugguaggaggagcacaaggaacacaaccaggaagagacggaguaguccgaguaugggacguaaaaaaccccgauuuacuaaauaaucaauucggaacaaugccuucuuugacacuagcaugucuuacuaaacaaggacaagucgauuuaaaugaugcaguacuagcacuaacagacuuaggauuaauauauaccgcaaaauauccaaauucaucagaccuugauagacuuagucaaucacauccaauccuaaacaugguugacacaaaaaaauccagucuaaauauaagcggauacaacuucucucuaggagccgcagucaaagcaggugcaugcauguuagacggagggaauauguuagaaacaauaaaaguaacaccucaaacaauggacggaauacuaaaaaguauacuaaaaguuaaaagaucgcuaggaauguucguaucagacacaccaggcgaaagaaauccauaugaaaauauauuauacaaaauuugucuuagcggagacggauggccauacauagcaucaagaacaaguauaguaggaagagcaugggaaaauaccacagucgaccuagagucagauggcaaaccacaaaaaguaggaucugcuggaucaaacaaaucuuuacaaucugcaggcuucccuaccggauuaacauauagccaacuuaugacacuaaaagacucaaugaugcaacuagacccgucagcaaaaaccuggauagacauagaaggcagaccagaagacccugucgaaauagcacuauaccaaccaaugucaggauguuauauacauuuuuuuagagaaccaaccgauuuaaaacaauuuaaacaagacgcaaaauacagucauggaauagacgucacagaccuauucucagcucaaccaggacuaacaucagcaguaauagaagcauuacccagaaacaugguauuaacaugccaaggaagugacgacauuaaaaaacuacuagauagucaaggaagacgagacauaaaacuuauagacauaucauuaggaaaagcagauucaagaagauuugaaaacgcugugugggaccaaugcaaagaccuaugccacaugcacaccggaguaguuguagaaaaaaagaaaagaggcgggaaagaagaaauaacuccacacugcgcucucauggacuguauaauguucgacgcagcgguaucaggaggauuaaacauaccaauucuacgagcaguucugccaagagacaugguauucagaaccucaucaccaaaaguuguauuauaa

SEQ ID NO: 9342 - RNA, 1710 nt, Artificial Sequence
  derived and/or modified CDS sequence (opt6) from LASV(ISTH2129-NIG-2012;Clade II)__AIT17545__NP
augucagcaucaaaagaaguuaaaucauuccuauggacacaaucuuuacgccgagaacuuaguggauauuguucaaacauaaaacuacaaguaguaaaagaugcacaagcucuacuacauggccuagauuuuucagaaguaaguaauguacaaagauuaaugcgaaaacaaaaaagagacgacagcgauuuaaaacgauuaagagaucugaaccaagcaguaaauaauuuaguagaauuaaaaucaacccaacaaaaaucuguauuaagaguaggaacuuugacaucagaugaccuauuaacacuagcagcagauuuagaaaaacuaaaaucaaaaguaauacgaacagaaagaccacuaucaucaggaguuuauauggguaaucuaaguacacaacaauuagaacaaagaagagcacuauuaaacaugauaggaaugguaggaggagcucaaggaacccaaccaggaagagauggaguuguaaggguaugggauguaaaaaacccugaccuauuaaacaaccaauucggaacaaugccaucucuaacauuagcuugccugacaaaacaaggacaaguugaucuaaacgaugcuguauuagcucuaaccgaccuuggauuaauuuauacagcaaaauacccaaacucaagugaucucgacagauuaagccaaagucacccuauucuaaauaugguagauacuaaaaagucaagcuuaaacaucucagguuacaacuucucacuaggagcugcaguaaaagcaggagcauguaugcuagacggaggaaauaugcuugaaaccauaaaaguaacaccacaaacuauggacggaauacugaaaucaauacuuaaaguaaaaaaaucauugggaauguucguuucagauacaccaggugaaagaaauccauaugaaaauauauuauacaaaauaugucucuccggagauggauggccuuauauagcaucacgaacaucaauaguaggcagagcaugggaaaauacaacaguagacuuagaaucugauggaaaaccgcaaaaaguuggaauagcagguucaaacaaaagcuuacaaagcgcaggauucccaacaggauuaacauacucucaacuaaugacuuuaaaagacagcaugaugcaacuagacccaucugcaaaaacauggauagauauagaaggaagaccagaagacccuguagaaauagcacuauaucaaccaaugaguggcugcuacauacauuuuuuccgagaaccaacagaucuaaaacaauuuaaacaagacgcaaaauacagccacggcaucgacguugcagaccuuuuuucagcacaaccaggacuaacaagugcgguaaucgaagcauuaccucgaaacaugguauuaacaugucaaggaagcgacgauauuaaaagauuauuagacucccaagggagaagagacauaaaauuaauugauauugcacuaaguaaagcugacagcagaaaauucgaaaaugcaguaugggaccaaugcaaagacuuaugucacaugcacacaggaguaguaguagaaaaaaaaaaaagaggaggaaaagaagaaauaacaccacauugugcccuaauggacuguauaauguaugacgccgcuguaaguggaggauuagauauaccaguucuaagagcaguccuaccucgagacaugguauucagaacaagcucaccaaagguaguacuauaa

SEQ ID NO: 9343 - RNA, 1710 nt, Artificial Sequence
  derived and/or modified CDS sequence (opt6) from LASV(ISTH2217-NIG-2012;Clade II)__AIT17549__NP
augucagcaagcaaagaaguaaaaagcuuccuauggacucaaagccuccgaagggaacuaagugguuauuguucaaauauaaaauuacaaguaguaaaggaugcacaagcauuauuacauggacucgacuuuucagaaguaagcaacguacaaagauuaaugaggaaacaaaaaagagaugauucagaucuaaaaagacuaagagaucuaaaccaagcaguaaauaauuuaguugaacuaaaaaguacacaacaaaaaaguauacuacgaguuggcacgcuaacuagugaugauuuacuaacauuagcagcggaccuugaaaaauugaaaucuaaaguaauaagaacagagaggccauuaucaagcggaguauacauggguaaucucagcacgcaacaauuagaacaaagacgugcacuuuuaaacaugaucggaaugguaggaggagcacaaggaacacaaccuggaagggacgguguaguaagagucugggacguaaaaaacccugacuuacuaaacaaucaauuugguaccaugccaucacuaacacuggcaugucuaacaaaacaaggacaaguagauuuaaaugaugucguacuagcacuaacagaccuaggacuuauauauaccgcaaaauauccaaauucaucagauuuagacagacuaagccaaagucacccaauauugaacaugguagauaccaaaaaaucaagcuuaaauauaaguggauauaauuuuagccuaggagcagcaguaaaagccggggcaugcauguuggacggagguaauaugcuggaaaccauaaaaguaacaccucagacaauggaugggauauuaaaaucaauauuaaaaguuaaaaaaaguuuaggaauguucguaagugauacaccaggggaaagaaacccauaugaaaacaucuuauacaagauuugucuaaguggagauggauggccauauauagcaucaagaacaucuauaguaggaagagcaugggaaaauacaacaguugacuuagaaagcgacggaaaaccacaaaaaguaggaacaguuggcagcaauaaaagcuuacaaucagcugguuucccaacaggguugacauacucacaacuaaugacauuaaaagacaguaugaugcaacuagauccaucagcuaaaacuuggauagauauagaaggcaggccugaagaucccguagaaauagcauuauaccaaccaaugucuggcugcuacauacacuucuucagggaaccgaccgaucuuaaacaauuuaaacaagaugcaaaauacucucacggaauugauguggcagaucuauuuccagcccaaccuggauuaacaucagcuguaaucgaagcauuacccagaaauaugguauuaacaugucaaggaucagaugauauaaaaaaguuauuagacagucaaggaagaagagacauuaaacuuauagauauagcacuauccaaagccgauagccgaaaauuugaaaacgcgguuugggaccaauguaaagaccuaugccauaugcauacagguguaguagucgaaaaaaaaaaaagaggaggcaaagaagaaauaacaccgcauugcgcacuaauggauugcauaauguaugacgcagccguaaguggaggauuaaauauaccaguucuaagagcaguauuaccaagagacaugguauucagaacaucuucuccaaaaguaguacuuuaa

SEQ ID NO: 9344 - RNA, 1710 nt, Artificial Sequence
  derived and/or modified CDS sequence (opt6) from LASV(ISTH2271-NIG-2012;Clade II)__AIT17553__NP
augucagcaucaaaagaaguaaaaucauuuuuauggacacaaagucuaagaagagaacuaagcggauauugcucaucuauuaaauuacaaguagucaaagacgcacaagcucuauuacacggucucgauuucagcgaaguaucaaacguacaaagacucaugagaaaacaaaaaagagaugauucagacuuaaaaagacuaagagaucucaaucaagcaguaaacaacuuaguagaauuaaaaagcacacaacaaaaaucaauauuaagaguagggacacuaacuagugaugacuuauuaacauuagcugcagaucuugaaaaacuuaaaucaaaaguaauuaggaccgaacgaccucuaucaagcggaguauacaugggaaaucuaaguacacaacaguuagaacaaagaagagcacuauuaaauaugauaggaaugguaggaggagcacaaggaacacaaccaggcagagacggagucguaagaguaugggacguuaaaaacccagacuuauuaaacaaucaauuuggaacgaugccaagcuuaacacuugccuguuuaacaaaacaaggacaaguagacuuaaacgacgcuguucuagcauuaacagaccuaggauugauauauaccgcaaaauacccaaacuccucagaccuagacagacuaucacaaagccauccuauucuaaauaugguagacacaaaaaaaucaucauuaaauauaucgggauacaauuuuucauuaggagcagcgguuaaggcuggagcauguaugcuagauggaggaaacaugcuagaaacaaucaaaguuacaccacaaacaauggacggaauacuaaaaucaauauuaaaaguaaaaagaucauuagguauguuuguaucagauacaccaggagaaaggaaucccuaugaaaacauacuauacaaaauauguuuaaguggagauggauggccauacauagccucccgaacaucaauaguaggacgagccugggaaaauacaacagucgaucuugaaucagacggaaaaccacaaaaaaugggaaccgcagguucaaauaaaagcuuacagagcgccggauucccuacaggauuaacauauucccaacuaaugacccuaaaagauagcaugaugcaacuagauccaagugcaaaaacauggauagauauagaaggaagaccugaagauccaguagaaaucgcccuauaccaaccuaugagcggauguuacauccauuucuucagggaaccaacagaccuaaaacaauuuaaacaagacgcaaaauauucacauggaaucgacguagcagaccuauuuccagcacaaccaggacucacaucagcaguuauagaagcauuaccaagaaacaugguuuuaacaugucaaggcucagaugacauaaaaaaauuauuagacagucaaggaagaagggacauaaaauuaauugauauugcauuaucaaaagcugauagcagaagauucgaaaaugcaguuugggaccaauguaaagaccuaugccauaugcauaccggagucguaguagaaaaaaaaaaaagaggaggaaaagaagaaauaacaccccauugugcauuaauggauuguauaauguaugacgcagcaguuagcgggggccuaaacauaccaguacuaagagccguacuuccuagagauaugguauuuagaacauccucaccaaaaguggucuuauaa

SEQ ID NO: 9345 - RNA, 1710 nt, Artificial Sequence
  derived and/or modified CDS sequence (opt6) from LASV(ISTH2312-NIG-2012;Clade II)__AIT17561__NP
augucagcaaguaaagaagucaaaucauuucuauggacacagucacuaagaagagaacuaaguggcuacugcucaaacauaaaacuccaaguaguaaaagacgcacaagcacuauuacauggacucgauuuuagugaagucucaaauguacaaagacucaugagaaaacaaaaaagagaugauagugaucuuaaacgacuaagagaucuaaaucaagcuguaaauaaccuaguagaauuaaaaagcacucaacaaaaaucuauacuaagaguaggaacauuaacaucagaugaccuacuuacucuagcagcugauuuagaaaaauuaaaaucuaaaguaauaagaacagaaagaccauugucaucaggaguauacauggguaacuuaucaacacagcaacuagaacaaagaagagcauuacuaaauaugauaggcaugguaggcggagcacaaggcacacaacccggaagagauggaguaguaagaguaugggaugucaaaaaccccgaucuacucaauaaccaauuuggaacuaugccaucacuaacacuagcaugccugacgaaacaaggacaaguagacuuaaacgaugcaguacuagcacucacggaccuaggauuaauauauacugcaaaauauccaaacucaagugauuuagacaggcuaucucaaucacacccgauacuaaauaugguugauacuaaaaaauccagccuaaacaucucaggauacaacuucucacuaggagcagcaguaaaagcaggagcauguaugcuagauggugguaacauguuagaaacaauaaaaguaacaccacagacaauagacggaauucuaaaaucaauauuaaaaguaaaaaaaaguuuaggaauguuuguaagugacacaccaggcgaaagaaauccauacgaaaauauauuauauaaaauaugucuaucaggagacggauggccguauauagcaaguagaacaucaauaguugguagagcaugggaaaauacaacaguagaucucgaauccgauggaaaaccacaaaaaguaggcacuguaggaagcaauaaaucgcuacaaucagcagguuuuccaacaggcuuaacauauucacaauuaaugacacuaaaagauaguaugaugcaacuagaccccucagcaaaaacauggauagauauugaaggacgaccagaggacccggucgaaauagccuuauaucaacccaugucaggcuguuacauucacuuuuucagagaaccuacagauuuaaaacaauuuaaacaagacgcuaaauauagccacggaauagauguugcagacuuauuuccagcacaaccugguuuaacaucagcaguaauagaagcacuaccgagaaauaugguacuaacaugucaaggcucagaugacauaaaacgacuauuagacucucaaggcagaagagacauaaaauuaauagacauagcccuaucaaaagcugauagccgaagauuugaaaacgcaguaugggaccaaugcaaagaccuaugucauaugcacacaggaguaguaguugaaaaaaaaagaagaggaggaaaagaagaaauaaccccacacugugcauuaauggacugcauaauguaugaugcagcaguaagugguggauuaaacauaccaguguuaagagcuguacucccaagagacaugguuuuuagaacaucaucaccaaaaguaguauuauaa

SEQ ID NO: 9346 - RNA, 1710 nt, Artificial Sequence
  derived and/or modified CDS sequence (opt6) from LASV(ISTH2316-NIG-2012;Clade II)__AIT17565__NP
augucagcgucaaaagaaauuaaaucauucuuauggacccagucauuaagaagagaauuaagcggauacugcucuucaauuaaauuacaagucgugaaagaugcacaagcacuauuacacggcuuagauuuuucugaaguaagcaauguacaaagguuaaugagaaaacaaaaaagagaugauucagaccuaaaaagguuaagagaucuaaaucaagcaguaaauaauuuaguagaacuaaaaagcacccaacaaaaaucuauacuacgaguaggaacacuaacuagcgaugauuuacuaacacuagcagccgauuuagaaaaauuaaaaaguaaaguaauuagaacagaaagaccauuaucgagcggaguauauaugggaaacuuaucaacacaacaacuagaacaaagaagagcacuacuaaacaugauagguaugguaggcggagcccaaggaacacaaccaggaagagacggagucguacgaguaugggauguuaaaaacccagaucuacuaaauaaccaauucggaacaaugcccucacucacauuagcaugucuaacaaaacaaggacaaguagaccuaaacgacgccguucuagcacuaacagacuuaggacucauuuauacagcaaaauaucccaauagcagcgacuuagaccgacuaucucaaucacacccuauacuuaacaugguagauaccaaaaaaucuucuuuaaacaucagcggauacaauuuuucauuaggagcagccgucaaagccggagcauguauguuagacggaggaaauaugcuagaaacaauaaaaguaacgccacaaacaauggacgguauacuaaaaucaauuuuaaaaguaaaaagaucauuagguauguucguaucagaugcaccaggagagagaaauccauaugaaaauauauuauacaaaauauguuuaaguggagauggauggccauauauugcaucuagaacuucuauagugggucgagccugggagaacacaacaguagaucuugaaagugacggcaaaccacaaaaagucggaaccgcagguucaaacaaaucuuuacaaagcgcaggauucccaacaggauuaacauauagucaauuaaugacacugaaagauaguaugaugcaacucgacccuucagcaaaaacauggauugauauagaaggaagaccagaagacccagucgaaauagcauuauaccaaccaaugaguggcugcuauauacauuuuuuccgagaacccacagacuuaaaacaauuuaaacaagacgcaaaauauucacauggcauagacguagccgaccuauucccggcacaaccuggucuaacauccgcuguuauagaagcucuaccaagaaacaugguauuaacaugccaaggauccgaugacauuaaaagauuauuagauucucaaggcagacgagauauaaaauuaauugauauagcccuaucuaaagcagauucuagaaaauucgaaaaugcuguaugggaccaaugcaaggacuuaugccauaugcacacuggaguaguaguagaaaaaaaaaaaagaggaggaaaagaagaaaucacaccacacugugcauuaauggauugcauaauguaugaugcagccguuaguggaggacuaaacauccccguauuaagagcaguacuaccaagagauauggucuucagaacaaguucaccaaaaguagucuuguaa

SEQ ID NO: 9347 - RNA, 1710 nt, Artificial Sequence
  derived and/or modified CDS sequence (opt6) from LASV(ISTH2334-NIG-2012;Clade II)__AIT17569__NP
augucugcgagcaaagaagugaaaaguuuccuauggacacaaucauuacguagagaacuaucaggauacuguucaaacauaaaauuacaaguagucaaagaugcacaagcauuacuacauggacuagauuuuagcgaaguaucaaaugugcaacgucuaaugagaaaacaaaaaagagacgauucagauuuaaaaagacuacgagacuuaaaucaagcagucaacaacuuaguagaauuaaaaucaacacaacaaaaaagcauacuaaggguaggaacauuaacaucagaugacuuacucacauuagcagcagaccuugaaaaauuaaaaagcaaaguuaucagaaccgaaagaccauuaucuucaggaguauacaugggaaaccucucuacacaacaacuagagcaacgaagagcauuauuaaacaugauaggaaugguaggaggagcacaaggaacacaaccaggcagagauggcguaguaagaguaugggacguaaaaaacccagauuuauuaaauaaccaauuugguaccaugccaaguuuaacacuagcauguuuaacaaaacaaggucaaguagaccuaaacgacgcaguacucgcauuaacagaucugggacuaauauacacagcaaaauuuccaaauaguagugaccuagauagacuaagucagucacauccaauacuaaauaugguugacacaaaaaaaaguucacuaaauauuuccggauauaauuuuucacuaggcgcugcaguaaaagcaggugccuguauguuagacggaggaaauauguuggagacaauaaaaguaacaccacaaaccauggacggaauauuaaagagcauauuaaaaguaaaaaaaucauuaggaauguuuguaucagauacuccaggagaacgaaauccauacgaaaacauacucuauaaaauaugcuuaucaggagacggauggccauauauugccucaagaaccucaauaguuggaagagcaugggaaaacacaacaguagaucuagaaucagacggaaaaccacaaaaagucggaacaaccgguaguaauaaaagccuccaaagcgcaggauuuccaacuggcuuaaccuacucacaauuaaugacuuuaaaagacucaaugaugcaacucgacccaucugcaaaaacauggaucgacaucgagggaagaccagaagauccuguagaaauugcacuauaccaaccaaugaguggauguuacauacacuucuucagagaacccacagaccuaaaacaguucaaacaagacgcaaaauacucccauggaauagauguagcagaucuuuuuccagcgcaaccaggccuaacaucagccguaauagaagcacuaccacgcaacaugguucuaacaugccaaggauccgaugauaucaaacgacuacuagacagccaggguagaagagacauaaaauuaauagauauagcuuuaucuaaagcagauagccgaagauucgaaaaugcaguaugggaccaaugcaaagacuuaugucauaugcauacagggguaguaguagaaaaaaaaaaaagaggaggaaaagaagaaauuacaccacacugugcacuaauggacugcauaauguaugaugcugcaguaagcggaggauuaaaucuaccaguacuaagagcaguacuuccaagagauaugguauuuagaacaucaucaccaaaaguaguauuauaa

SEQ ID NO: 9348 - RNA, 1710 nt, Artificial Sequence
  derived and/or modified CDS sequence (opt6) from LASV(ISTH2358-NIG-2012;Clade II)__AIT17573__NP
augagcgcgaguaaagaaguaaaaucauuuuuauggacgcaaucauugcguagagaacucaguggcuauugcucaaacauaaaauuacaagucguaaaagaugcccaagcuuuacugcaugguuuagauuucucagaaguuucaaauguacaacgcuuaaugaggaaacaaaaaagagaugauagugaucuaaaaagacuuagagaucuaaaucaggcaguaaauaaucucguugaauuaaaaaguacacaacaaaaauccauacuaagaguaggaacacuaacaucagaugacuuacuuacccucgcugcagaucuugaaaaauuaaaaucaaaaguaauucgaacugaaagaccacuaucaaguggaguauauaugggaaaucuaucaacacaacaauuagagcaaagaagagcauuacugaauaugauagguauggucgguggcgcacaaggaacccaaccaggaagagacggaguaguaagaguaugggacgucaaaaauccagaucuauuaaacaaucaauuuggaacuaugccaucauuaacacuagcuugccuaacaaaacaaggacaaguagacuugaaugaugcaguacuagccuuaacagauuuaggucucauauacacagcaaaauaucccaacucaagugauuuagacagacuaucacaaucucacccaauauuaaauaugguugacacuaaaaaaucaucccuaaacauaucaggauauaauuuuucauuaggagcagcgguaaaagccggagcauguaugcuagacgguggaaacauguuagaaacaauaaaagucacuccacaaacaauggauggaauuuuaaaaucaauuuuaaaaguaaaaaaaagcuuaggaauguuuguaucagauacaccaggagaaagaaauccauaugaaaauauauuauacaaaauaugucuuagcggcgauggcuggcccuacauagcuucaagaacaucaauuguaggcagagccugggaaaauacaacaguagacuuagaaucagauggaaaaccacaaaaaguaggcacagcagguucaaacaaaucauuacaauccgcaggauuuccaacaggauuaacauacucccagcuaaugacauuaaaagauucuaugaugcaacucgaucccucagccaaaaccuggaucgacauagaaggaagaccagaagauccaguagaaauagcuuuauaucaaccgaugucuggauguuauauacauuuuuucagagaaccaacagaccuaaaacaauucaaacaagacgcaaaauauucucacggaauugacauagcagaccucuuuccagcccaaccaggauuaacaucggcggugauagaggcacuaccaaggaacaugguucuaacaugccaaggaagcgacgauaucaaaagauuguuagauagccaaggaagaagagauauaaaacuaaucgauauagcauuaucaaaagcagauucaagaagauucgaaaacgcuguaugggaccaaugcaaagaccuaugccacaugcacacuggaguaguagucgaaaaaaaaaaaagagguggcaaggaagaaaucacaccccacugugcuuuaauggacugcauaauguacgaugcagccguaucaggcggacucaauauaccaguuuuaagagcaguguuaccaagagauaugguauucagaacaaguucaccaaaaguaguucuauga

SEQ ID NO: 9349 - RNA, 1710 nt, Artificial Sequence
  derived and/or modified CDS sequence (opt6) from LASV(ISTH2376-NIG-2012;Clade II)__AIT17577__NP
augagcgcaucaaaagaaguaaaaucauuucuauggacacaaagccuaagaagagaauugaguggauauugcagcaguauaaaauuacaaguaguaaaagaugcacaggcacuauuacacgguuuagauuucagugaaguaucaaacguacaaagauuaaugaggaaacagaaaagagaugauagcgaccugaaaaggcugagagaccuaaaucaagcaguaaauaaucuaguagaauuaaaaaguacccaacagaaaaguauauuacgaguuggaacucuaaccagugaugaccuacuaaccuuagcagcagaucuugaaaaacuuaaaaguaaaguuauaagaacugaaagaccacuaucaagcggaguuuacaugggaaaucuaaguacccaacaauuagaacaaagacgagcgcuacuaaacaugaucgguauggugggaggagcccaaggaacacaaccaggaagagaugguguuguaagaguaugggacguuaaaaacccugaucuauuaaauaaucaauucggaacuaugccaaguuuaacauuggcaugcuuaacaaaacaaggacaaguagaccuaaaugaugcaguauuagcgcucacagacuuaggauuaauauauacggcuaaauauccaaacucaucagacuuagacagacuaucgcaaagucacccaauacugaacauggucgauaccaagaaaagcuccuuaaauauaagcggauacaacuucucacuuggagcagcaguaaaagcgggagcauguauguuagauggagguaauaugcuagaaacaauaaaaguaacgccacaaacaauggaugggauacucaaaaguauacuaaaaguaaaaagaaguuuaggaauguuuguaucagauacaccuggugaaagaaacccauacgaaaauauauuauacaaaauauguuuaucaggagauggauggccuuauauagcaucacgaaccucaauagcagguagagcaugggaaaauacaacagucgacuuagaaucagauggaaaaccacaaaaaguaggagcagcaggaagcaauaaaagucuucaaagugcuggauuuccaacaggauuaacauauagccaacuaaugacauuaaaagauucaaugaugcaacuagacccuagugcaaaaacauggaucgauauugaaggccgaccagaagacccaguugaaauagcauuauaucaaccgaugucaggauguuauauucacuucuuuagagaaccaacagaucuaaaacaauuuaaacaagaugcaaaauauucacacggaauagacguagcagacuuauuuccagcacaaccuggacuaacaucagccguaauagaagcauugccaagaaacaugguacucacaugucaaggaagugacgacauaaaacgauuauuagacagucaaggccgacgagauauuaaacuaauagacauagcacuaaguaaagcagacuccagaagauuugaaaacgccguaugggaccaaugcagagauuuaugucauaugcauacuggugucguaguagaaaagaagaaaagaggaggaaaagaagaaauaacuccucauugcgcauuaauggauuguauaauguacgacgcagcuguaucaggaggacucaacauuccuguccuaagggcaguauuaccaagagauaugguauuuagaaccaguucacccaaaguuguuuuauaa

SEQ ID NO: 9350 - RNA, 1710 nt, Artificial Sequence
  derived and/or modified CDS sequence (opt6) from LASV(Lassa virus/H.sapiens-wt/NGA/2015/ISTH_0543;Clade II)__AVO03640__NP
augagugcaucaaaagaaguaaaaagcuuucuauggacacaaucauuaagaagagaauuaaguggauauugcucaaauauaaaauuacaagucguaaaagaugcacaagcacuacuacacggauuagauuucucagaaguaagcaauguacagcgacucaugagaaaacaaaaaagagacgacucagacuuaaaaagacuaagagaucucaaccaagccguaaauaauuuagucgaacuaaaaagcacucaacaaaaaucaauauuaagaguaggcacacuaacaagcgacgacuuacuaacacucgcagcagaucuugaaaaacuaaaaagcaaaguaauaagaacagaaagaccauuauccucagguguauacauggguaaccuuucaacacaacaacuagaacaaagaagagcacuacucaacaugauaggaaugguaggcggagcacaaggaacacaaccaggaagagacggaguaguaagaguaugggauguaaagaacccagauuuacuuaauaaccaauuuggaacaaugccaucauuaacauuagcaugcuuaacuaaacaaggccaaguagacuuaaaugaugcaguacuggcauuaacagacuuagguuuaaucuauacagcaaaauauccaaauucaucagauuuagacagacucucacaaucacacccaauuuuaaacauggucgacacaaaaaaaucaucucuaaauauuucaggauauaacuucucauuaggagcagcgguaaaagcaggagcauguaugcuagacgguggaaauauguuagaaacaauaaaaguaacaccacaaacaauggauggaauacugaaaucaauacuuaaaguaaaaaagagccuaggcauguucguaucagauacaccaggagaaaggaacccauaugaaaacauacuuuacaaaauaugcuuaucuggugacggauggccauauauagcuucaagaacaucuauaguagggagagcaugggaaaauaccacaguagaucucgaaucugacggaaaaccccaaaaaguagguucagcagguucaaauaaaaguuuacaaucagcuggauuuccaacaggacuaacuuauucacaacuaaugacauuaaaagauucaaugaugcaauuagauccaucagcaaaaacauggauagauaucgagggaagaccugaggauccuguagaaauagcauuauaucaacccaugucagguugcuauauacauuuuuucagagaaccaacagaucuaaaacaguucaaacaagacgcaaaauacagccacggaauagacguagcagaccuauuuccagcacaaccaggacuaacaagcgcuguaauagaggcacuaccuagaaacauggucuuaacaugccaaggaagugacgacauuaaaagacuacuagauagccaagguagaaaagacauuaaacuuauagacaucgcauuaucaaaagcagacucgagaagauuugagaacgcaguaugggaccaaugcaaagauuuaugccauaugcauaccgguguaguaguugagaaaaaaaaaagaggagguaaagaagaaauaacgccacacugugcacuaauggauugcauaauguaugacgcagcaguaucaggaggauuaaacauacccguauuaagagccguacuaccacgcgauaugguuuucagaacaagcucgcccaaaguaguauuauaa

SEQ ID NO: 9351 - RNA, 1710 nt, Artificial Sequence
  derived and/or modified CDS sequence (opt6) from LASV(Lassa virus/H.sapiens-wt/NGA/2015/ISTH_0547;Clade II)__AVO03584__NP
augagcgcaucaaaagaaguaaaaucguuucuuuggacccaaucucuacgaagagaauuaaguggauauugcagcucaauaaaauuacaaguaguaaaagaugcccaagcauuacuacauggacuagauuucucugaaguaucuaauguucaaagauuaaugagaaaacaaaaaagagaugacucagauuuaaaacgauuaagggacuuaaaucaagcagucaauaacuuagucgaauuaaaaucaacgcaacagaaaucaauauuaagaguaggaacucucacaagugaugaucuucuaacauuagcagcagaucuagaaaaacuaaaaucuaaaguaauaagaacagaaagaccauuaucaagcggaguauauaugggaaaccuaagcacccaacaacucgaacaaagaagagcccuauuaaauaugauaggaaugguagggggcgcacaaggaacucaaccaggaagagauggaguuguaagaguaugggauguuaaaaacccagauuuacuaaauaaccaauucggaacaaugccgucauuaacauuagcaugucucaccaaacaaggacaaguugauuuaaaugaugcaguacuagcucuaacagaccuuggucuaaucuauacagcaaaauaucccaauaguucugaucuugaccgacuuucacaaucacauccaaucuuaaauaugguagauacaaaaaaaucaucgcuaaauaucaguggauacaacuuuucauuaggcgcugcaguaaaagcuggagcauguaugcuagacggaggaaauauguuagaaaccauaaaagucacaccacaaacaauggauggaauacuuaaaucaauauuaaaaguaaaaagaucucuagguauguuugucucagauacaccuggagaaagaaauccuuacgaaaauauauuauauaaaauuuguuuaucaggcgacggauggcccuauauagccuccagaacaucaauagucggacgugccugggaaaauacaacaguagaccuagaaagugauggaaaaccacaaaaagucggaguagcaggaucaaauaaaaguuuacaaagcgcaggauucccaacaggauuaacauacucccagcuaaugacacuaaaagacucaaugaugcaacucgauccuuccgccaaaacuuggauagauauagaaggaagaccagaagauccaguggaaauagcauuauaucaaccuaugucaggauguuacauacacuucuucagagaaccuacagaccuaaaacaauuuaaacaagaugcaaaauauagucauggaauugaugucgcugaucuuuuuccagcucaacccggauuaacaucagccguaauugaagcacuaccuagaaacaugguauuaaccugucaaggaucagaugacauaaaaagauuacucgacagucaaggaagaagggacauuaaacuuaucgauauagcacuaaguaaagcugacucacgacgcuuugaaaaugcaguaugggaccaaugcaaagaucucugucacaugcauacaggaguaguaguugaaaaaaaaaagcguggagguaaagaagaaauuaccccccacugcgccuuaauggacugcauaauguaugaugcagcaguuucaggaggccuaaacauacccguacuacgagcaguacuaccaagagauauggucuucagaacaucaucuccaaaaguaguccuuuga

SEQ ID NO: 9352 - RNA, 1710 nt, Artificial Sequence
  derived and/or modified CDS sequence (opt6) from LASV(Lassa virus/H.sapiens-wt/NGA/2015/ISTH_0574;Clade II)__AVO03658__NP
augucagcauccaaagaaguaaaaucauuuuuauggacacaaucauuaagacgugaacuuagcggauauuguaguaauauuaaauuacaaguaguaaaagaugcacaggcuuuacuacacggacuagauuucucagaaguaucgaauguacaaagacuaaugagaaaacaaaaacgagaugacucagaccuuaaaagauuaagagacuuaaaucaagcaguaaacaaccuagucgaacuaaaaucaacacaacagaaaagcauauuaagaguaggaacucuaacaucagaugaucuacuaacacuagcugcugaccuagaaaaacuaaaaaguaaaguaauaagaacugaaagaccauuaaguagugggguauauaugggaaaucuaaguacccaacaacucgaacaaagacgagcacucuuaaacaugauaggcaugguaggaggcacacaaggaacacaaccuggcagagacggcguuguaagagucugggacgucaaaaauccagauuuacuaaauaaucaauucggaacaaugccaucucuaacuuuagcuugcuuaacaaaacaaggacaaguagacuuaaaugaugcaguacuagcacuaacagaccuaggacuaauauacacagcuaaauauccaaacagcucagacuuagacagauuaagucaaagucauccaaucuuaaauaugguagacacaaagaaauccucauuaaacauuaguggauacaauuucucacuaggcgcagcaguaaaagccggagccugcaugcuagauggaggaaauauguuagaaacaaucaaaguaacuccacaaacaauggacgggauccucaaaaguauccuaaaaguuaagaaaucauuaggaauguuuguuucagauacccccggagaaagaaauccauacgaaaauauacuauauaaaaucugccucagcggagaugguuggccauauauagcaagcagaacaucuauuguaggacgagcaugggaaaauacaacagucgauuuagaaucagaaggaaaaccacaaaaaguaggcacugcaggaucaaauaaaucacuccaaucugcuggauucccaaccggauuaacuuacagucaacuaaugacacuaaaagauagcaugaugcaauuagauccaagugcaaaaaccuggauagauauugaagguagaccagaagacccuguagaaauagcauuauaccaaccaauguccggaugcuacauucacuuuuucagagaaccaaccgaucuaaaacaauuuaaacaagacgcaaaauacucucaugguauagacgucgcagaucucuuuccugcucaaccuggauuaaccucagccguuauagaagcacuacccagaaacaugguucuuacaugucaaggaagcgaugauauaaaacgauuacuagauagucaaggucgaagagacauaaaacuaauagacauaucacuaucaaaagcagacuccagaagguuugaaaacgcaguaugggaccaaugcaaagaucuaugccauaugcauacgggaguagucguagagaaaaagaaacgagguggaaaagaagaaauaacaccacacugugcccuaauggacugcauuauguaugaugcggcaguaucaggcggauuaaauauaccaguacuaagagcuguacuacccagagauaugguauucagaacaucaucaccaaaaguaguucuauaa

SEQ ID NO: 9353 - RNA, 1710 nt, Artificial Sequence
  derived and/or modified CDS sequence (opt6) from LASV(Lassa virus/H.sapiens-wt/NGA/2015/ISTH_0682;Clade II)__AVO03626__NP
augucugcauccaaagaaguuaaaucuuuucuauggacacaaucccuuagacgagaacuaucaggauauugcucaaguaucaaauuacaaguagucaaagaugcacaagcacuucuacauggacuagacuucucagaaguaucaaauguacaaagauuaaugagaaaacaaaaacgagacgauagcgaccuaaaaagauuaagagaccuaaaucaagcagucaauaaccuaguagaauuaaaaagcacucaacaaaaaucuguacuaagaguaggaacucuaacaagugacgaccuauugacauuagccgccgaccuagaaaaacuaaaaucuaaaguaauacgaacagaaagaccacuaaguucaggaguauauaugggaaaucuuucaacacaacaauuagaacaaagacgagcacuauuaucaaugauaggaaugguaggaggaacccagggaacacagccaggacgagacggcguuguuagaguaugggauguuaaaaacccagacuuacuaaacaaucaauucggaacaaugccaucauuaacacuagcaugcuuaaccaaacaaggacaagucgacuugaacgacgcaguacuagcccuaacagaucuuggucuaauauauaccgcaaaauauccaaacuccuccgaccuggacagguuaucacaaagccacccaauccuaaacaugguagauaccaaaaaaucaucacuaaauauaucaggauacaauuuuagccuaggagcagcuguuaaagcaggagcauguauguuagauggaggcaauaugcuagaaaccauaaaaguaacaccacaaacaauggacggaauacuaaaaaguauauuaaaaguaaaaaaaucauuaggaauguuuguaucagauaccccaggagaaagaaaccccuaugaaaacauacuguacaaaaucugccuuaguggagacggauggccauacauagcuucacgaacaucaauagucggaagagcuugggaaaauacuaccgucgauuuggaaagcaauggaaaaccacaaaaagugggcacagccggaaguaauaaaagccuacaaagcgcaggauuuccaacuggacucacauacucacaauuaaugacacuaaaagauaguaugaugcaacuagacccaagcgcaaaaacuuggauagauauagaaggcaggccagaagacccuguagaaauagcacuauaccaaccaaugucaggcuguuauauacacuuuuucagagaaccaacugaccuaaaacaguucaaacaagaugcaaaauauucacacgguauagauguagcugaucuauuuccagcacaacccggauuaacaucagcaguuauagaagcauugccaagaaacaugguauuaacaugucaaggaagcgaugacauaaaaagacuacuagauagccaagggagaagagacauaaaacuaauagauauaucacuuucaaaagcagacaguagaaaauuugaaaacgcaguaugggaccaaugcaaagaucuaugucauaugcauacggggguaguaguugaaaaaaaaaaacgagguggaaaagaagaaauaacaccacacugugcauuaauggacugcauaauguaugacgcugcaguaucuggaggacuaaauauuccaguucuaagagccguguuacccagagacaugguauuucgcaccucaucuccaaaaguaguacuauaa

SEQ ID NO: 9354 - RNA, 1710 nt, Artificial Sequence
  derived and/or modified CDS sequence (opt6) from LASV(Lassa virus/H.sapiens-wt/NGA/2015/ISTH_0687;Clade II)__AVO03582__NP
augucagcaucaaaagaaguaaaaucauucuuauggacacaaaguuuaagacgcgaacuaaguggcuauuguucuucaauaaaacuacaaguaguaaaagacgcucaagccuuauuacauggcuuagacuucucagaaguuucuaauguccaaagauuaaugcguaaacaaaaacgagaugauucagauuuaaagagauuaagagaccuaaaucaagcaguaaacaaucuuguagaauuaaaaaguacacaacaaaaaaguauauuaagaguuggaacuuuaacaagugaugacuuacuaacucuugccgccgauuuagaaaaauuaaaauccaaagugauacgaacagaacguccccuaaguucugguguauauauggguaaucuaucaacacaacaacuagaacaaagaagagcccuauuaaauaugauagguauggugggaggagcccaauccacacaaccagguagagacggagugguaagaguuugggauguuaaaaacccagacuuacuaaauaaccaauuuggaacaaugccaagcuuaacacucgccugcuuaacaaaacaaggccaaguagaccuaaacgacgcaguucuagcacuaacugacuuaggauuaauauauacagcaaaauacccaaauaguucagacuuagacagauuaagucaaagccauccaauauuaaauaugguagauacaaaaaaaagcucucuaaauauaagcggauacaauuucucuuuaggagcagcaguaaaagcaggagcaugcauguuagauggaggcaacaugcuagaaacuauaaaaguaacaccucaaaccauggacggaaucuuaaaguccauacuaaaaguaaaaaggucauuaggaauguucguaucagacacaccgggagaacgaaauccauaugaaaacauauuauauaaaauauguuuaucaggagacggauggccauauauagcaucaagaacaucaauaguaggaagagccugggaaaacacaacagucgaccuagaauccgauggaaaaccacaaaaaguaggugcaacuggaucaaauaaaucauuacaaagugcaggauuuccaacaggcuuaacauauucacaacucaugacauuaaaagauucaaugaugcaacuagauccaagugccaaaacauggauugauauagaaggaagaccagaagauccaguagaaauagcauuauaccaaccaauaucaggaugcuacauacacuuuuuuagagaaccaacagacuuaaaacaauuuaaacaagacgcaaaauacagccacggcaucgacguagcagacuuauuuccagcgcaaccaggacuaacaagugcaguuaucgaagcccuuccaagaaauaugguacugaccugucaaggcucagaugacauuaaaagacuuuuagacagccaagguagacgggacauaaaauuaauagacaucgcacuaucgaaagcagacucaagaagauucgaaaaugcagucugggaucaauguaaagaccuaugccacaugcacaccgguguaguaguagaaaaaaaaaaacgaggaggaaaagaagaaauuacaccccauugcgcacuaauggauuguauaauguaugacgcagcaguuagcggaggauugaacauuccaguauuacgagccguacuaccaagagauauggucuuuagaacaaguagucccaaaguaguccuauaa

SEQ ID NO: 9355 - RNA, 1710 nt, Artificial Sequence
  derived and/or modified CDS sequence (opt6) from LASV(Lassa virus/H.sapiens-wt/NGA/2015/ISTH_0736;Clade II)__AVO03574__NP
augucagcaucgaaagaaguaaaaucauucuuauggacacaaucacuaagaagagaauuaagcggauauugcuccaauauaaaacuacaaguagucaaagacgcacaagcucuucuacauggcuuagauuucucagaaguaucaaauguccaaagauuaaugagaaaacaaaaacgugacgauucagaucuuaaaagacucagggauuuaaaucaagcagucaauaaucuaguagaauuaaaaaguacucaacaaaaaaguguccuaaggguaggaacccuaacuucagacgacuuauuaacauuagcugcagauuuagaaaaauuaaaaucaaaaguaaucagaacagaacgaccacuauccaguggagucuacauggguaacuuaagcacacaacaacuagaacaccgaagagcuuuacuuaauaugauagguaugguaggaggagcucaaggaacacaaccaggaagagacgguguaguccgaguaugggacguaaaaaacccagaccuuuuaaauaaccaauuugggacuaugccuaguuuaacauuagcaugcuuaacaaaacaaggacaaguugacuugaaugaugcaguacuagcacuaacugacuuaggauuaauauacacagcaaaauacccuaauucuuccgacuuagaccgauuaucacaaagccacccgauauuaaacaugguagauacaaaaaaaucaucauugaauauaagcggauacaauuucucauuaggagcagccguaaaagcaggugccuguauguuagacgguggaaacauguuagaaacaauuaaagucacaccucaaacaauggacggaauuuuaaaaaguauacuuaaaguaaaacguucauuaggcauguucgucagugauacccccggcgaaagaaaccccuaugaaaauauacuauacaaaauauguuuaucaggagaugguuggccauacauagcaagcagaacaucaauaguaggacgugccugggaaaauacaacaguagauuuagaaagcgauggaaaaccucaaaaaguaggaacagcaggaucaaauaaaucccuacaaucagcaggcuuucccacaggcuuaacauauucacaacuaaugacauuaaaagacucaaugaugcaauuagacccuuccgcaaaaacauggaucgauauagaaggccgacccgaagacccaguugaaauagcccuauaccaaccaauaaguggcuguuacauccauuuuuuuagggaaccaacagaucuaaaacaauuuaagcaagaugcaaaauacucacauggaauagauguagcagaccuauucccggcgcaaccgggauuaacaagugcaguaauagaagcuuuaccaagaaauaugguacuaacaugucaagguucagaugacauaaaaaggcucuuagauucacaaggucgcagggacauaaaacuuauagauauagcacucaguaaagcugacagcagaagauuugaaaaugcgguaugggaucaaugcaaagaucuaugucacaugcauaccggaguagugguagaaaaaaaaaaaagaggaggaaaagaagaaauaacaccacauugugcauuaauggacuguauaauguaugacgcagcaguaucaggcggauuaaauauuccaguacuaagagcaguacuaccaagagauaugguauucagaacaucaaguccuaaaguaguacuuuaa

SEQ ID NO: 9356 - RNA, 1710 nt, Artificial Sequence
  derived and/or modified CDS sequence (opt6) from LASV(Lassa virus/H.sapiens-wt/NGA/2015/ISTH_0789;Clade II)__AVO03552__NP
augagcgcaucuaaagaaguaaaaucuuuuuuauggacacaaagcuuaagaagagaacuaucaggauacuguucaaacauaaaacuacaaguaguaaaagaugcacaagcucuacuacauggacuugauuuuucagaaguaagcaauguacaaagauuaaugagaaaacaaaaaagagaugauggagacuuaaaaagauuaagagauuuaaaucaagcuguaaacaauuuaguagaauuaaaaucaacacaacaaaaaucaguacuaagagucggaacacuaucaucugacgaccuacuuauauuagcagcagauuuagaaaaacucaaaaguaaaguuauaagaaccgaaagaccacuaaguagcggugucuauaugggaaaccuaagcagccagcaacuagaccaaagaagagcacuacuaaauaugauaggcaugacuggaggaggacaaggagcaaacgcagguagggauggcauaguaagagucugggauguaaaaaacgcugaauuacuaaacaaccaauuuggaacaaugccaucauuaacucuugcaugccuaacaaaacaaggacaaguugacuuaaacgacgcaguacaagcauuaacagacuuagguuuaauauacacagcaaaauaucccaacagcucugaccuagauaggcuaucacaaagccacccaauauuaaacaugaucgauacaaaaaaaucaaguuuaaauauaucugguuauaacuuuuccuuaggagcagcaguaaaagcaggugcuugcauguuagacgggggcaauauguuagaaacuauuaaaguaucaccacaaacaauggacggcauauuaaaaaguauacucaaaguaaaaagaucacuaggaauguucguuagugaugcaccaggagaaagaaaucccuaugaaaauauuuuauauaaaauaugucuaucaggagauggauggccguauauagcuucaagaacuagcauaauugguagagcaugggagaauacaguaguagacuuagaaagcgauaacaaaccacaaaaacuaggaaacuccggaagcaauaggagucuacaaucagcaggauacccagcaggacuuacuuauucacaacuaaugacccuaaaagauucuauguuacaacuagaccccaacgcaaaaacauggauggacguagaaggaagaccagaugacccuguagaaauagcauuauaucaaccuagcucaggauguuacauacacuuuuucagagaaccaacagaccuaaaacaauuuaaacaagacgccaaauacucacacggcauagacguaggugaucuauuugcagcacaaccuggcuuaacauccgcuguaauagaagcauuaccaagaaacaugguaauuacaugucaaggaucagaagacauuaaaaaacuacuagagucgcaaggaagaaaagacauaaaacuuguagacauaucaaugucaaaauuagauucaagaaaauucgaaaacgcaguaugggaccaguacaaggaccuuugccacaugcauacaggaauaguaguagaaaaaaaaaaacgaggagguaaagaagaaaucacaccacauugcgcacuaauggauugcauaauguuugacgcugcaguuguuggaggauuagaugcaaaaauauuaagagcaguacuaccaagagauaugguuuucagaacaucaacaccaaaaguuguauuauag

SEQ ID NO: 9357 - RNA, 1710 nt, Artificial Sequence
  derived and/or modified CDS sequence (opt6) from LASV(Lassa virus/H.sapiens-wt/NGA/2015/ISTH_0821;Clade II)__AVO03642__NP
augucagcauccaaagaaguaaaaaguuucuuauggacacagagccuacgaagagaauuaaguggauauugcucaaauauaaaacuccagguaguuaaagaugcacaagcacuacuacacgguuuagauuucucagaaguaucaaauguacaaagauugaugagaaaacagaaaagagaugauagcgaucuaaaaagauuaagagaucugaaucaagcaguaaacaaccuagucgaauuaaaaucaacacaacaaaaaucaauacuucgagucggaacucuaacaagugacgacuuacucacauuggcagcagauuuagaaaaauuaaaaucaaaaguaauacgaacagagagaccacuuucaaguggaguauacauggguaacuuaucaacacaacaacuagaacaacguagagcauuauuaaacaugaucggaauggugggaggagcacaaggcacacaaccaggaagagacgguguuguuagagugugggaugucaaaaacccugacuuauuaaauaaucaauucgguacaaugccaucacuaacacuagcauguuuaacaaaacaaggacaaguagacuuaaacgaugcaguauuagcacuaacagaucuagguuuaauauauacagcaaaauauccaaacucauccgaucuagacagacuaucacaaucacacccaauauuaaauaugguagauacaaagaaaucuagccucaacauaagcggauacaauuucagcuuaggagcagcaguaaaagcaggagcauguaugcuagauggaggaaauauguuagagaccauaaaaguaacaccacaaacaauggacggaauauuaaaaucuauauuaaaagugaaaagaucauuaggaauguucguaucagauacaccaggagaaagaaaccccuacgaaaacaucuuauacaagauaugccuuaguggagauggcuggcccuauauagcauccagaacaucaauaguaggcagagccugggaaaauacaacaguagauuuagaaagcgauggaaaaccucaaaaagucggcauugcaggaucaaauaaaagucuacaauccgcaggcuuuccaacaggcuuaacauauucacaauuaaugacauugaaagacucaaugaugcaacuagacccaucugcaaaaacauggauagauauagagggcagacccgaagacccuguagaaauagcauuauaucaaccaaugucaggcuguuacauacacuuuuuccgagaaccaacagaucuaaaacaauuuaaacaagacgcaaaauauagucauggcauagauguugcagauuuauuucccgcucaacccggacuaacuucagcaguuauugaagcccuaccaagaaauauggucuuaacuugucaaggaagugaugauauaaagaaacuacuugauagucaaggaagaaaagauauaaaacucauagacauagcucuaagcaaaguagacaguagaagauucgaaaacgccgucugggaccaaugcaaagacuuaugccauaugcacacaggaguaguaguugagaaaaagaaacgaggaggaaaagaagaaauaacaccacacugugcccuaauggauugcauaauguaugacgcagccguaucgggaggauuaaacauacccguacuccgugcaguacuaccaagagauaugguauuuagaacuagcaguccaaaaguaguauuauaa

SEQ ID NO: 9358 - RNA, 1710 nt, Artificial Sequence
  derived and/or modified CDS sequence (opt6) from LASV(Lassa virus/H.sapiens-wt/NGA/2015/ISTH_0831;Clade II)__AVO03546__NP
augagcgcaucaaaagaaguaaaaucauuccuauggacacaaucacucagaagagaacuagcuggauacugcucaaacaucaaacuucaaguaguuaaggaugcccaagcccuacuacauggucuagacuuuagcgaaguaucaaauguacaaagacuuaugagaaaacaaaaaagagacgacagugaccuaaaacguuuacgagaucuaaaucaagcaguaaacaaucuggucgaauuaaaaucaacucaacaaaaaaguauuuugagaguaggaacauuaagcuccgaugauuuauuaacauuagccgcagacuuagaaaaacuuaaaucaaaagucauaagaacagaaagaccauuaucaucuggaguauauaugggaaacuuaucaacucaacaacucgaucaaagaagggcacuauuaaacaugauaggaauggucgguggaucacaaggaacuucagcaggaagagacggaauuguaagaguaugggaugucagaaacccagaauuauuaaauaaucaauuuggaacaaugccguccuuaacauuagcaugccugacaaaacaaggacaaguagaucuaaaugacgccguucaagcccuaacagaucuaggauuaauauauacugcaaaauaucccaauuccagugaucuagacagacugucacaaagccauccaauucuaaauaugauugacacaaaaaaauccucaauuaacauaagcggauacaacuucagcuuaggcgcagcaguaaaagcaggcgcauguauguuagauggaggaaauaugcuagaaacaauaaaaguaagcccucaaaguauggacggaauacuaaaaucuauuuuaaaaguaaaaagaagucuuggaauguucguaucagacacaccaggagaacgaaauccauaugaaaauauauuauauaaaauaugucuaucaggagacggauggccauauaucgcaagccguaccucaauaacagguagagcaugggaaaauacaguagucgacuuagaaagugauaacaaaccaaaaaaaccaggaaacaaugaaucaaacagaucauuacaaagcgcaggcuuuccagccggccucaccuauucacaauuaaugacauuaaaagacagcaugcuacaacuagauccaaaugcaaaaacauggauggauauugaaggcagaccagaugacccagucgaaauagcccuauaccaaccaaacagcgggugcuacauucacuucuucagagaaccaacagauuuaaaacaauuuaaacaagacgcuaaauauagccauggaauagacauaagcgaccuauuugcagcacaaccagguuuaacuagugccguaauagaagcauuaccaagaaacaugguaauuaccugucaagguucggaagauauaaaaaaacuacuagaaagucaaggaaggaaagacauaagauugguugauauaucauuaagcaaagccgacucaagaaaauuugaaaacgcaguaugggaucaauauaaagaccuaugucauaugcauacaggaauaguaguagaaaaaaaaaaaaaaggaggaaaagaagaaauaacaccacauugugccuugauggacugcauaauguuugaugccgcaguaaugaacggacuagacgcaagaguucucagggccguacuaccacgagauaugguauuccgaacaucaacaccaagaguaguauuauaa

SEQ ID NO: 9359 - RNA, 1710 nt, Artificial Sequence
  derived and/or modified CDS sequence (opt6) from LASV(Lassa virus/H.sapiens-wt/NGA/2016/ISTH_0009;Clade II)__AVO03572__NP
augucugcaagcaaagaaguuaaaucuuuuuuauggacacaaucauuaagaagagaauuaagcggauacuguagcaacauaaaauuacaaguaguaaaagaugcacaagcacuguuacauggauuagauuucagcgaaguuucaaacguacaaagacuaaugaggaaacaaaaaagagaugauagcgaucuaaaacgguuaagagaucuaaaucaagcaguaaauaauuuaguagaauuaaaaagcacacaacaaaaaaguauauuaagaguaggaacccuaacaucagaugauuuauuaacguuagcagcagaccuugaaaaacuuaaaucuaaaguaauaagaacagaaagaccauuaagcaguggagucuauaugggaaaucuaagcacacaacaauuagaacaacgucgagcacuauuaaauaugaucggaaugguaggaggagcacaaggcacacaaccaggaagagacgggguaguaagagucugggacguaaaaaauccagauuugcuaaacaaccaauucggaacaaugccgagucucacauuggcuugcuuaacaaaacaaggucaaguagaccuaaacgacgcaguucuagcacuaacagaccuaggacuuauuuauacagcuaaauauccaaauucuucagacuuagauagacuaucccaaucccaccccauacugaauaugguagauacaaaaaaaucaucauugaauauuucaggcuauaauuucagucuaggagcagcaguaaaagcuggagccuguaugcuagacggugguaauaugcuagaaacaauaaaaguaacaccccaaacaauggacggaauacuaaaaucaaucuuaaaaguuaaaaaaagccuuggaauguucguaagugauaccccaggcgaaagaaacccuuacgaaaauauacuauauaaaauaugucuaucaggagacggauggccuuauauagccuccagaaccucuauaguuggaagggcaugggaaaauacaacaguagaucucgaaucagacggaaaaccacaaaaaguagggagcgccgguaguaacaagagucuacaaagcgcuggauucccaacaggcuuaacauauagucaauuaaugacuuuaaaagauaguaugaugcaacuagauccauccgccaaaaccuggauagauauagaaggaagaccagaagacccaguagaaauagcacuauaucaaccuaugucaggaugcuacauacacuuuuucagagaaccaacagauuuaaaacaauucaaacaggacgcaaaauauucacacggcauugauguagcagauuuauuuccagcacaaccaggauuaacaucagcaguaauagaagcucuaccaagaaacaugguacuaacaugucaaggaucagaugacauaaaaagacuauuagacagccaaggacgaagagauauaaaauuaauagauauagcuuuaagcaaagcugacucaagaagauucgaaaacgcgguaugggaccaaugcaaagaccugugccauaugcacaccggaguaguaguagaaaaaaaaaaaagaggaggaaaagaagaaauaacaccacauugugcuuuaauggauuguauaauguaugacgcagcaguaucaggaggacuaaauauuccuguacuacgagcuguacuaccacgagacaugguauuuagaacaagcucuccgaaaguaguacuauaa

SEQ ID NO: 9360 - RNA, 1710 nt, Artificial Sequence
  derived and/or modified CDS sequence (opt6) from LASV(Lassa virus/H.sapiens-wt/NGA/2016/ISTH_0017;Clade II)__AVO03568__NP
augucagccaguaaagaaguaaaaagcuuucuauggacacaaaguuuacgaagagaauuaucuggauacugcaguucaauuaaacuucaaguaguaaaagaugcucaagcauuacuacacggacuggauuucucagaaguaagcaauguacaaagacuaaugcgcaaacaaaaacgagacgauucagaucuaaaaagauuaagagaccuaaaccaagcaguaaauaacuuaguagagcuaaaaucaacacaacaaaaaucaauauugagaguaggaacauuaacuucagaugaccuacuuacuuuagcagcugaucuagaaaaauuaaaaucaaaaguaauaagaacagaaagaccucuuucaucaggaguauauaugggaaacuuaucuacacaacaacuagaacaaagaagagcauuauuaaacaugauagguauggccggcggagcacaagguacucaaccaggaagagauggagucgugcgaguaugggauguaaagaauccugauuuacuuaauaaucaauucggaaccaugcccagucucacacuagcgugcuuaacaaaacaaggucaaguagaccuaaaugaugcaguacuugcacuaaccgaucuaggauuaauauauacagcaaaauacccaaauucaucagacuuagacagauuaagccaaucacaccccauuuuaaauaugguugacacaaaaaaaucaagcuuaaacaucucaggauacaacuuuagccuaggagcagcuguuaaagcaggagcaugcaugcuagacggaggaaauauguuagaaacaauaaaaguaaccccccaaacaauggacgguauauuaaaaaguauccuaaaaguaaaaagaagcuuaggaauguucguaucagaugcaccaggagaaagaaacccauacgaaaauauacuuuauaaaauaugccucaguggcgauggauggccauauauagcaagcagaacuucgauaguaggaagagcaugggaaaauaccacaguagaucuagaaagcgaugggaaaccacaaaaaguaggagcaacaggaucaaacaaaaguuuacaaucagcagguuuuccaaccggacuaaccuauucacaauuaaugacauuaaaagauagcaugaugcaacuagaccccucagcaaaaacauggauagauauagaaggcagacccgaagacccaguagaaguagcucuauaucaaccaguaagcggaugcuauauacacuuuuucagagaaccgacagauuuaaaacaauucaaacaagacgcaaaauauucacaugguauugauguagcagaucuuuucccagcacaaccaggcuuaacaucagcaguaauagaagcacuaccaagaaacaugguauuaacaugccagggaucagacgacauuaaaaaacuauuagauucucaaggccgaaaagacauaaaacuaaucgauauagcucuaaguaaagccgauuccagaagauucgaaaaugcagucugggaccaaugcaaagauuuaugccacaugcauacaggaguaguugucgaaaaaaaaaaaagaggaggaaaagaagagauaacaccccacugugccuuaauggacuguauaauguacgacgcagcagucucaggaggauuaaauauaccaguacuaagagccguuuuaccuagagauaugguauucagaacaagcagcccuaaaguagucuuauaa

SEQ ID NO: 9361 - RNA, 1710 nt, Artificial Sequence
  derived and/or modified CDS sequence (opt6) from LASV(Lassa virus/H.sapiens-wt/NGA/2016/ISTH_0035;Clade II)__AVO03620__NP
augucugcgucaaaagaaguaaaaaguuuucuauggacacaaucguuaagaagagaauuaucuggauauuguaguuccauuaaacuucaaguagucaaagacgcacaagcacuauugcacgguuuagauuuuagcgaagucagcaauguacaaagauuaaugaggaaacaaaaaagagaugacagcgaucuaaaacgauuaagagacuuaaaucaagcaguaaacaauuuaguagaauuaaaaagcacacaacaaaaaucaauacuaaggguuggaacacuaacaucagacgaucuacuaaccuuagcggcagaccuggaaaaauuaaaauccaaaguuauaagaacagaaagaccauuaucuucaggaguauauaugggaaacuuaucaucacaacaacuagaacaacgaagagcacuacuaaacaugauuggcaugguagguggagcacaaggaacacaaccuggaagggauggaguaguaagaguuugggauguaaaaaacccagaccuauuaaauaaucaauuuggaacaaugccaucccuaacauuagcuugcuuaacuaaacaaggacaaguagauuuaaacgacgcaguacuggcacuuacagaucuaggauuaauauacacagcaaaauaucccaauagcucugaccuagauagguuaagucaaagucaucccauuuuaaacaugguagauacaaaaaaaaguucauuaaauauauccggauauaauuuuucacuuggugcagcaguaaaagcaggagcauguaugcucgacggaggaaacaugcuagaaacaauaaaaguaacaccacaaacaauggacggaauauuaaaaucaauacuaaaaguaaaacgaaguuuaggaauguuugucucagauacaccaggugaaagaaaucccuaugaaaauauacuauauaaaauaugucugucaggcgauggauggccauauauagcaucaagaacaucaauaguuggcagagccugggaaaauaccacuguagaucuagaaucagauggaaaaccacaaaaaguuggaucagcaggaucaaacaaaucucugcaaucagcaggauucccaaccggacuaacauauagccaauuaaugacacuaaaagauucaaugaugcaauuagauccaagcgcaaaaacguggauagauauagaaggacgaccagaagauccaguagaaauagcauuauaucaaccaauaaguggauguuacauacauuuuuuuagagaaccaacugauuuaaaacaauucaaacaagacgcuaaauauagccauggaauagacguagcagauuuauuucccgcacaaccaggacuaacuagugccguaaucgaagcacuaccuagaaacaugguuuuaacaugucaaggaucagaugauauaaaaagacuacucgacagucaaggaagaagagacauuaaauuaauagauauagcacuuuccaaagcagacucaagaagauuugaaaaugcaguaugggaccaauguaaagaccuaugccauaugcauacuggaguggucguagaaaaaaaaaaacgagguggaaaagaagaaauuacaccucauugugcacuaauggauugcauaauguaugacgcagcaguuucagguggacugaacauuccaguauuacgagcaguacuaccaagagauauggucuuccguacauccagcccaaagguaguacuauaa

SEQ ID NO: 9362 - RNA, 1710 nt, Artificial Sequence
  derived and/or modified CDS sequence (opt6) from LASV(Lassa virus/H.sapiens-wt/NGA/2016/ISTH_0104;Clade II)__AVO03632__NP
augucagcaagcaaagaaguuaaaucauucuuauggacacaaucauuaagaagagaacuaagugguuauugcuccaacauaaaauuacaaguaguaaaagacgcacaagcacuacuacauggcuuagauuuuucugaaguaucgaacguacaaagauuaaugagaaaacaaaaacgugacgacucagaccuaaaaagacucagagacuuaaaccaagcaguaaauaacuuaguagaauuaaaaagcacucaacaaaaaucaauccuaagaguaggaacucucacaucagaugaccuacuaacauuagcagcagacuuagaaaaauuaaaaagcaaaguaauuagaacagaaaggccauuauccagcggaguauauauggguaaucucucaacccaacaacuagaacaaagaagagcacuacuaaauaugauaggaauggugggaggcacacaaagcacucagccaggacgagauggcguagucagagucugggauguaaaaaaucccgacuuauuaaauaaucaauuugguacaaugccaagccuaacacuagcaugucuaacaaaacaaggacaaguagaccucaacgaugcaguuuuagcgcuaacagaucuaggccuaauauacacagcaaaauaucccaauucaagcgaucuagaucgcuuaucacagucacacccuauauuaaacaugguagauacaaaaaaaaguucauuaaacauaucaggauacaauuucucucuaggggcagcaguaaaagccggcgcaugcaugcuagaugguggaaacaugcuagaaacuauaaaaguaacaccacaaacaauggacgguauucuaaaaucaauauuaaaaguaaaaagaagccuaggaauguucguaucagacacaccgggagaaaggaaccccuaugaaaacauauuauacaaaauauguuuaaguggcgacggauggccuuauauagcaucaagaacaagcauaguaggaagagcaugggaaaauaccacaguagauuuagaaagcgaugggaaaccacaaaaagucggaacaacaggaucuaauaaaucacuccaauccgcuggcuuuccaacuggacuaacauauagccaacuaaugacuuuaaaagacucaaugaugcaacuagauccaucagcaaaaacauggauagauauagaaggaagaccagaagacccaguagaaaucgcacuauaccaaccaaugaguggauguuauauacauuucuuuagagaaccaacagaccuaaaacaauuuaaacaagacgcuaaauauagccauggcauagacgucgcagacuuauucccagcucaacccggauuaaccucagcaguaauugaagcauuacccagaaauauggucuuaaccugucaaggaagcgacgauauuaaaaaauuacuugacucacaaggacgacgagacauaaaacuaauagauauaucacuaucaaaagcagacucaagaaaauuugaaaaugccguuugggaucaaugcaaagaccucugucauaugcacacaggagucguaguagaaaaaaaaaaaagaggcgguaaagaagaaauaacaccacacugugcacuaauggauugcauaauguuugaugcagcaguuucuggaggauuaaacaucccaguauuaagagcaguccuaccuagagauaugguauucagaacuucaucacccaaaguaguacuguaa

SEQ ID NO: 9363 - RNA, 1710 nt, Artificial Sequence
  derived and/or modified CDS sequence (opt6) from LASV(Lassa virus/H.sapiens-wt/NGA/2016/ISTH_0133;Clade II)__AVO03636__NP
augagcgccuccaaagaaguaaaaaguuucuuauggacucaaucucuccgaagagaacuaucaggauauugcaguaacauaaaauuacaaguaguaaaagacgcacaagcgcuacuacauggauuagacuucuccgaaguaagcaauguccaacgauuaaugagaaaacaaaaaagagacgauucagaucuuaaaagguuaagagaucuaaaccaagcaguaaauaacuuaguagaauuaaaaaguacacaacaaaaaucaauacuaagaguuggaaccuuaacaagugaugacuuauuaacacuagcugccgauuuagaaaaacuaaaaaguaaaguaauaaggacagaacgaccguuaagcagcggaguauauaugggaaaucuaagcgcccaacaauuagaacaaaggcgagcauuacugaacaugauaggaaugguaggaggcacacaaggaacucaaccaggaagagacggaguaguacgaguaugggacgugaaaaacccagauuuauuaaauaaucaauucggaacaaugccaagcuuaaccuuagcaugccuaacaaaacaaggacaaguugacuugaaugaugcaguuuuagcauuaacagaucuaggacugauuuacaccgcaaaauauccaaaugcuucagauuuagacagacucucacaaucacacccaauauuaaacauggucgauacaaaaaaaucaucauuaaauauuucaggauauaauuuuucuuuaggagcagcaguuaaagcaggagcauguaugcuagacggugguaauaugcuugaaacaauaaaaguaacuccccaaacaauggacggcauauuaaaaucaguucuaaaaguaaaaaaaucacuaggcauguuugugucugauacaccaggagaaagaaauccuuacgaaaacauauuauacaaaaucugucugucaggagauggauggccuuauauugcuaguagaacaagcauaguuggaagagcaugggaaaauacaacagucgauuuggaaucagauggaaaaccacaaaaaauaggaccagcaggaagcaacaaaaguuuacaaucggcaggauuuccagcaggacuaacauauagccaauuaaugacacuaaaagauucaaugaugcaacuugaccccucagccaaaacauggauagauauagagggaagaccagaagacccuguggaaauagcccuuuaccaaccuaugucgggaugcuacauacacuuuuuccgcgaaccaacagaucuaaaacaauuuaaacaagacgcuaaauauagccauggaauagauguaacagauuuauuuagugcacaaccaggauugacaucagcaguaauagaagcacuaccaagaaacaugguuuuaacaugucaaggauccgaugacauaaaaagacuucuagacucucaaggaagaagagauauaaaacuuauagauauuucauuaucaaaaguggacucaagaagauucgaaaacgcaguaugggaucaauguaaagaccuaugccacaugcauacaggggucguaguugaaaaaaaaaaacgaggagguaaagaagaaauaaccccacauugcgccuuaauggauuguauaauguaugacgcagcagugucaggagggcugaauauaccaguucuaagggcaguauuaccaagagacaugguuuuucgaacaucaucaccuaaaguaguuuuauaa

SEQ ID NO: 9364 - RNA, 1710 nt, Artificial Sequence
  derived and/or modified CDS sequence (opt6) from LASV(Lassa virus/H.sapiens-wt/NGA/2016/ISTH_0146;Clade II)__AVO03634__NP
augucagcaucaaaagaaguaaaaaguuuuuuauggacacaaaguuugagaagagaacuaucugguuauuguuccaacaucaaauuacagguaguaaaagacgcacaagccuuauugcacggacuagauuuuuccgaaguaucgaacguucaaagacuaaugagaaaacaaaaaagagacgauagcgaucuuaaaagacuaagggaucuaaaccaagcaguaaauaaccuagucgaacuaaaaucaacacaacaaaaaucgauauuacgaguaggaacccugacaagcgaugaccuacuaacauuagcagcagauuuagaaaaauuaaaaaguaaaguaauaagaacagaaagaccauuaucaaguggaguuuauaugggaaaccucucagcacaacaacuagaacaaagaagagcacuauuaaauaugauaggaauggcaggcggagcacaaucaacacaaccuggacgagacggagucguaagaguaugggauguuaaaaacccugaccuacugaauaaucaguucggaacaaugccaagucuaacauuagcaugccuaacaaaacaaggucaaguagauuuaaacgaugccguucuagcucuaacagauuuaggauuaauuuacacagcaaaauauccaaauucaucagaccuugauagauuaucccaaagucacccuauacuaaacaugguagacaccaaaaaaucaaguuuaaacauaucaggauacaauuucaguuuaggggccgcaguaaaagcaggugcaugcauguuagacggagguaauauguuagaaacaauaaaaauaacuccgcaaacaauggauggaauauuaaaaucuauauuaaaaguuaaaagaucauuaggcauguucguauccgacacacccggcgaacgaaauccauaugaaaauauauuauauaaaauaugcuuauccggcgacggauggccauauauagcuuccagaacaaguauagugggcagagcuugggaaaacacaacagucgaucuagaaucagacggaaaaccacaaaaaguaggaacaauaggaucaaauaaaagucuacaaagugcaggauuuccaaccggauuaacauauucgcaauuaaugacauuaaaagauucaaugaugcaacuagauccauccgcaaaaacauggauagauauagaaggacgaccagaagauccuguagaaauagcuuuauaucaaccaaugucaggcuguuacauacacuucuuccgagaaccaacagaucuaaagcaauucaaacaagaugcaaaauauagccauggaauagauguagcagaucuauucccagcacaaccaggacuaacauccgcuguaauagaagcauuaccaagaaauaugguauuaaccugccaaggaucagaugacauuaagagauuauuggacucucaaggaagaagagacauuaaauuaauagauaucgcauuaaguaaagcagauucaagaagauuugaaaaugcaguaugggaccaauguaaagaucugugccauaugcauacaggagucguuguugaaaaaaaaaaacgagguggaaaagaagaaauaacaccacauugcgcacuaauggacugcauaauguaugacgcggccguaagcggaggauuaaauauacccguacuaagagcaguacuaccaagagacaugguauucagaacaaguuccccaaaaguaguccuauaa

SEQ ID NO: 9365 - RNA, 1710 nt, Artificial Sequence
  derived and/or modified CDS sequence (opt6) from LASV(Lassa virus/H.sapiens-wt/NGA/2016/ISTH_0187;Clade II)__AVO03550__NP
augucagugaguaaagaaguaaaaucauuuuuauggacucaaucuuuaagacgagaacuaucaggauauuguucuaacauaaaauuacaaguaguuaaagaugcacaagcguuauuacauggauuagauuuuuccgaagugucaaauguacaaagacuaaugagaaaacaaagaagagaugacggagaucuaaaaagauuaagagaucuaaaucaagcgguaaacaaccuagucgaacuaaaaaguacacaacagaaaagcguacucagaguaggcacauuaaguuccgaugacuuauuaguacuagcugcagaucuagaaaaacugaaaagcaaaguaauaagaacagaaagaccauuaaguaguggaguauauaugggaaacuuaucaagccaacaacuagaccaaagacgagcauuauuaaacaugauaggaaugacuggaggaaacagaggagguucagcuaguucagauggaauagucagagucugggauguaaagaacgcagaauuacuaaauaaucaauucggaacaaugcccuccuuaacacuagcgugucuaacaaaacaaggucaaguagaccuaaacgaugcaguacaggcuuuaacagaccucggacuaauauauacagcaaaauauccuaacucaucagaccuagaucgauuagcacaaagucauccaauuuugaauaugauugacaccaagaaaucaucacuuaacauaaguggauacaacuucaguuuaggagcagcaguaaaagcaggagcauguaugcuagacggugguaacaugcuagaaaccauaaaaguaucuccacaaacaauagacggaauccuaaaaacaauccuaaaaguuaaaaagagcuuaggaauguuuauaucagauguaccaggagaaagaaauccuuaugaaaauauccucuacaaaaucuguuugucaggagauggauggccauauauagcaaguagaacaaguaucguuggccgugcuugggaaaauacuguaguagauuuagaaagugauaacaaaccucagaaaacuggaaaugguggaagcaauaaaagucuacaaagugcaggauuugcagcaggacuaacauauucacaauuaaugacuuuaaaagauucaauguuacaacuagacccgaacucaaaaacauggauggacauugaaggcagaccagaagacccaguagaaauagcacuuuaucaacccagcucaggauguuauauacauuucuuuagagaaccaaccgaucuaaaacaauuuaaacaagacgcaaaauauucacacggaaucgacguaacagauuuauuugccgcacaaccaggucuaacaucugcuguaauagaagcauuaccaagaaauaugguuauaaccugucaaggcagugaagacauaagaaaacuacuagaaucccaaggcagaagagacauaaaauuaauagacauaucacuuaauaaagcagacucaagaaaauuugaaaacgcaguaugggaucaauuuaaagacuugugccauaugcauacagguguaguuguagagaaaaagaaaagaggagguaaagaagaaauaacaccacauugugccuuaauggauugcauaauguuugacgcagccguaagcgguggacuagacacaaaaguacuaagagcgguauuaccgagagauaugguauuccgaacaaguacacccaaaguaguauuauaa

SEQ ID NO: 9366 - RNA, 1710 nt, Artificial Sequence
  derived and/or modified CDS sequence (opt6) from LASV(Lassa virus/H.sapiens-wt/NGA/2016/ISTH_0419;Clade II)__AVO03540__NP
augucagcaucaaaagaaguaaagagcuuuuuauggacacaaucacuaagacgagaauuaaguggauauuguucaaacauaaaacuacaaguagucaaagacgcacaagcauuacuacacggauuagacuucagcgaaguaucaaauguacaacgauuaaugcgaaaacaaaaacgagacgauggagauuuaaaaagauuaagagacuuaaaucaagcaguaaauaaucuaguagaauuaaaaagcacacaacagaaaagcguacuaagaguagguacacuaucuucagaugaucuauuaacacuagcagccgauuuagaaaaauuaaaaucuaaaguuaucagaacagaacgaccuuuaaguucaggaguuuacaugggaaaucucucaucacaacaacuggaucaaagacgagcauuacuaaacaugauaggaaugaccggcggaggacaaggagcaucagcaggaagagauggaauagucagagucugggacguuaaaaacgcagaacuucuaaauaaccaauucgguacaaugccaucacuaacgcuagccuguuuaacuaaacaaggucaaguagauuuaaacgacgcaguccaggcuuuaacagaccuaggucuaauauauacagcaaaauaucccaacucaagcgacuuagauagauuaagucaaucacacccuaucuuaaauaugauagauacaaagaaaucuagccuuaauauuagcggauauaauuuuucauuaggagcagcaguaaaagcaggagcaugcauguuagauggaggaaacauguuagaaacaauaagaguaucaccacaaacuauggauggcauucucaaaaguauauuaaaaguaaaaagaagucuaggaauguuuguaagcgacauaccaggagaaagaaacccauaugaaaauauacuuuacaaaauauguuuaucgggagauggauggccauauauagcaaguagaacaagcauaacgggccgagcaugggaaaauacaauaguagacuuagaaagugauucaaggccacaaaaaccaggaaacucaggaagcaauagaucacuacaaagugcuggauuuccagcuggacuuacuuauagccaacuaaugacucucaaagauagcauguuacaacuagauccaaacgcaaaaacauggauggauauagaaggacgucccgaugacccaguugaaauagcacuauaucaaccaagcagcggauguuacauucacuuuuucagagaaccaaccgaucugaaacaguuuaaacaagacgcaaaauauucccauggcauagacguaggagauuuauuuacagcacaaccuggccucaccucugcaguacucgaagcauuaccaagaaacaugguaauaacaugccaaggaucagaagauauaaagaaacuacuagaaucacaaggaagaaaagacauaaaacucguagauauaagcaugucuaaaccugacucaagaaaauucgaaaaugcuguaugggaucaauacaaagaccuaugucauaugcauacaggaauaguaguagaaaagaagaaacguggaggaaaagaagaaauaacaccacacugugcucuaauggacugcauaauguuugaugcagcaguaguaggaggauuagaugcaaaaauacuaagagcaguacuaccaagagacaugguuuuuagaacuuccaccccgaaaguuguacuuuaa

SEQ ID NO: 9367 - RNA, 1710 nt, Artificial Sequence
  derived and/or modified CDS sequence (opt6) from LASV(Lassa virus/H.sapiens-wt/NGA/2016/ISTH_0447;Clade II)__AVO03560__NP
auguccgcuucaaaagaaguaagaucauucuuauggacacaaagucuaagaagagaauuaucuggauauuguagcucaauuaaauuacaaguuguaaaagaugcacaagcauuacugcauggauuagauuucucugaaguaaguaacguacaacgauuaaugcgaaaacaaaaaagagaugauuccgauuuaaaaagauuaagagauuuaaaucaagcaguaaauaaccuaguugaacuaaaauccacucaacaaaaaucaaucuuacgaguaggaacauuaacaagugacgaucuacugaccuuagccgcagaccucgaaaaacuuaaaaguaaaguuauccguacagaaagaccacuuucaucaggaguuuauaugggaaacuuaaguagucagcagcuagaacaacgacgagcacuacuaaauaugauaggcaugguuggaggugcucaaggaacacaaccaggacgagauggaguuguaagaguaugggauguaaaaaauccagaucuauuaaauaaucaauucggcacaaugcccagucuaacccuugcauguuuaacaaaacaaggacaaguagacuuaaaugacgcaguauuagcucuaacagacuuaggcuuaauauauaccgcaaaauaucccaauucaucagaccuagauagacuaagucaaucacauccaauauuaaauaugguagauacaaaaaaaucaucccuuaacauuagcggauauaauuucagucuaggagcagcaguaaaagcaggagcauguaugcuagauggaggaaauauguuagaaaccauaaaagucaccccccaaacaauggacgguauauuaaaaucaauauuaaaaguaaaaagaaguuuagggauguuugugucagauacgcccggagaaagaaauccauaugaaaauauacuauauaaaauaugucuaucaggagauggauggccauacauagcaucuagaacaaguauaguuggaagagcaugggaaaauacaacuguagaucuagaaagugauggcaaaccucaaaaagugggagcagccggaagcaccaaaucacuacaaucagcuggauuuccaaccggauuaacauauucccaacuaaugacauugaaagacuccaugaugcaacuagauccauccgcaaaaaccuggauagauauagaaggaagacccgaagauccaguugaaauagcauuauaucaacccaugucagguuguuauauacauuucuucagggaaccaacagauuuaaagcaauuuaaacaagaugcaaaauauucccaugguauagauguagcagauuuauucccagcacagccaggauuaacaagugcaguuauagaagcauuaccaagaaacaugguacucacaugucaaggaagcgaugacauuaaacgauugcuagacagucaaggaagacgugauauaaaauuaauagauaucgcacuuagcaaaguagauucaagaagauucgaaaaugcggucugggaucaguguaaagacuuaugccauaugcauacaggaguagucguagaaaaaaaaaaaagggguggaaaagaagaaauaacaccacacugugcauuaauggacugcaucauguaugaugcagcuguuucagguggauuaaauauacccguacucagagcuguacuuccuagagauauggucuucagaacaaguucaccaaaagugguacuauaa

SEQ ID NO: 9368 - RNA, 1710 nt, Artificial Sequence
  derived and/or modified CDS sequence (opt6) from LASV(Lassa virus/H.sapiens-wt/NGA/2016/ISTH_0543;Clade II)__AVO03596__NP
augagcgcuaguaaagaaguaaaaucauucuuguggacacaaucauuaagaagagaauuaucaggauauugcucaaacauuaaacuacaaguaguaaaagacgcacaagcacuacuacauggauuagauuucucugaaguaaguaauguacaaagauuaaugagaaaacaaaaacgagacgauggugauuugaaaagacuccgagaucucaaucaagcagucaauaaccuagucgaacuaaaaucaacacagcagaaaagcgucuuaagaguaggaacauuaacaucagaugauuuacuaauauuagccgccgauuuagagaaauuaaaaucuaaaguaauaaggacagaaagaccacuaucauccggagucuauaugggaaauuuaucaacacaacaauuagaacaaagaaaagcacucuuaaguaugauagggaugguaggcggugcgcaaggaacacaaccaggaagagauggaguaguccgaguaugggacguuaaaaacccugacuuacuaaacaaccaauucgguacaaugcccucacuaacacucgcuuguuuaacuaaacaaggacaaguagauuuaaacgaugcaguacuagccuuaacagauuuaggacuuaucuauacagcuaaauauccaaauaguucugacuuagaucgacuaucgcaaagccauccaauccuaaacaugguagauaccaagaaaaguucacuaaacauaucaggauauaauuucucauuaggagcagccguaaaagccggcgcuugcaugcuagacggaggaaauauguuagaaacaauaaaaguaacuccacaaacaauggauggaauauuaaaaucaauauuaaaaguaaaaagaagucuagguauguuuguuagugacacaccuggcgaacgaaaucccuaugaaaauauuuuauacaaaauaugucuuagcggggauggauggccauauaucgccagcagaacaaguauaguaggcagagcaugggaaaauacaacagucgaccuagaaucagaugguaaaccccaaaaaguagguaccgcaggaucaaauaaaaguuuacaaagugcaggauucccgacaggauugacauauagccaauuaaugacacuuaaagauaguaugaugcaauuagauccaucagcaaaaacauggauagacaucgaaggaagacccgaagauccuguagaaauagcauuauaucaaccaaugucaggauguuacauacacuuuuucagagaaccaacagaucuaaaacaauuuaaacaagaugccaaauauagucacggaauagacguuacagaccuauuuucggcacaaccaggacuaacgagugcaguaaucgaagcucuaccuagaaacaugguacuaacaugccaaggaucagaugauauaaagaaacuauuagacucacaagggagaagagacaucaaauuaauugauauaagucuaucaaaagcagacucgagaagauucgaaaacgcuguuugggaccaaugcaaagacuuaugccauaugcauacaggcguaguuguugagaaaaagaaaagaggagguaaagaagaaauuacuccacauugugcauuaauggacuguauaauguucgacgccgccguaucaggcggacugaacauaccuauucuuagagcaguccucccuagagauaugguauucagaacaagcucaccuaaaguuguauuauaa

SEQ ID NO: 9369 - RNA, 1710 nt, Artificial Sequence
  derived and/or modified CDS sequence (opt6) from LASV(Lassa virus/H.sapiens-wt/NGA/2016/ISTH_0565;Clade II)__AVO03638__NP
augagcgcuucgaaagaaguaaaauccuuucuauggacucaaucucuacgaagagaauugagcggauauuguucaaacauaaaauuacaaguaguaaaagacgcacaagcuuuacuacacggucuagacuucagcgaaguaagcaauguacaaagauuaaugagaaaacaaaaaagagacgauggagaccuaaaaagauuaagggaucuaaaucaagcaguaaauaaucuaguagaacuaaaaagcacacaacaaaaaaguguauuaagaguaggaacacuaacaagcgacgaucuacuaacauuagcugcagaucuagaaaaacuaaaaaguaaaguaauucgaacagaaagaccacuaucaaguggaguuuacauggguaauuuaaguacacaacaacuagaacaaagaaaagcacuacuauccaugauuggcaugguaggaggugcccagggcacacaaccaggaagagaugguguaguuagaguaugggacguaaagaauccagaucuucuaaauaaucaauuuggaacaaugccaucacuaacucuagcaugucuaacuaaacaaggacaaguagacuuaaaugacgcaguucuagcucuaacagauuuaggauuaauauauacagcaaaauauccaaauucaagugacuuagacagguuaagucaaucacacccaauuuuaaacaugguagauacaaaaaaaaguagucuaaauauuagugguuauaacuuuagccuaggugcagcaguaaaagcaggugccugcauguuagacggaggaaacauguuagagacaauaaaaguaaccccacaaacaauggacggaauauuaaaaaguauauuaaaaguaaaacgaucgcucggaauguuuguaagcgacacaccuggagaaagaaacccauaugaaaacauauuauauaaaauauguuuaucaggagacggauggccauauauugcaucaagaacaaguauaguaggaagagcaugggaaaauaccacuguagaccuagaauccgauggaaagccccaaaaaguggguacagcgggcuccaacaaaucacuucaaucagcaggauucccaacaggacuaacuuacucucaacuaaugacauuaaaagauucaaugaugcaacuagacccaagugcaaaaacauggauagauauagaaggaagaccagaagauccaguagaaauagcacuauaccaaccaaugucaggcuguuauauacauuuuuuuagagaaccaacagacuuaaaacaauuuaaacaagacgcaaaauauucacacgguauagaugugacagauuuauuuucagcacaaccuggauuaacaucagccguuauagaagcacuaccacgaaauaugguccuaaccugucaagguagcgaugauauaaaaaaauuauuagacagucaaggaagacgagauauaaaacuaaucgauauaaguuuaaguaaggccgacagucgaagauuugaaaaugcaguuugggaucaauguaaagaccuaugucauaugcauacaggagucguaguagaaaaaaaaaaaagaggaggaaaagaagaaauaacaccucauugugcauuaauggauugcauaauguuugacgcagccguaagcggaggcuuaaacauaccuauccuacgagcaguauuaccacgcgauaugguauucagaacaaguucaccaaaagucguauuauaa

SEQ ID NO: 9370 - RNA, 1710 nt, Artificial Sequence
  derived and/or modified CDS sequence (opt6) from LASV(Lassa virus/H.sapiens-wt/NGA/2016/ISTH_0610;Clade II)__AVO03586__NP
augucagcaucaaaagaaguaaaaucauucuuauggacucaaagucuaaggagagaacuuagcggauauugcucuaauauaaaauugcaaguugucaaagaugcacaagcucuauuacacggacuagacuucagcgaaguaucaaauguacaaagacuaaugagaaaacaaaaaagagaugauagcgaucuaaaaagauuaagagaucucaaucaagcaguaaacaaccuaguagaauuaaaaucuacucaacaaaaaucuguacuacgaguaggcacucugacaucagaugaccuucuaacacuagcagcagaucuagaaaaauuaaaaucaaaaguaauaagaacagaaaggccccuaucaaguggaguauacaugggaaaccuaagugcacaacaacuagaacaaaggagagcacuacuaaacaugauagguaugguaggaggagcacaaggcacgcaaccaggaagagauggaguaguaagaguuugggauguaaaaaacccggauuuauuaaauaaucaauucggaacaaugccaagccuaacacuagccugcuuaacgaaacaaggacaaguagauuuaaaugauguaguauuagcacucacagauuuaggacuuauuuacaccgcaaaauacccuaacagcucagauuuggauagacuaucacaaucacacccaauacuuaauaugguagacaccaaaaaaaguagccucaacauaucagguuacaauuucucacuaggagccgcaguaaaagccggugcuuguaugcucgacggaggaaauaugcuagaaacgauaaaaguaacaccacaaacaauggauggaauauuaaaaucaauauuaaaaguuaaaaaauccuuaggaauguucguaucagauacaccaggcgagcgaaacccauaugaaaauauauuauauaaaauauguuuaucuggagauggcuggccauauauagcauccagaacaucaauaaugggucgcgccugggaaaauacaacaguagaccuagaaagcgauggaaaaccucaaaaaguaggaacagcaggaagcaauaaaucauuacaaucugcaggauuuccaacaggacuuaccuauucacaauuaaugacucuaaaagauucuaugaugcaacuagauccaucagcaaaaacuuggauagauauagaaggcagaccagaagauccaguagaaauagcacuauaccaaccuaugucaggauguuacauacauuucuucagagaaccaacagaccuaaaacaauuuaaacaagacgcaaaauacucacacggcauagacgucacugauuuguuuucggcccaaccaggauuaacuucagcuguaauugaagcauuaccaagaaauaugguauuaaccugucaaggcucagacgauauaaaaagauuacuagacucacaaggcagacgagacauaaagcuaauagauauagcauuaucaaaagcagacaguagaagauucgagaacgcaguaugggaccaaugcaaagaccuuugccacaugcacaccggaguaguuguagaaaaaaagaaaagaggcggcaaagaagaaauuaccccccacugugcacuuauggauugcauaauguaugaugcagcagucucaggcggauuaaauauaccagugcuaagagcaguacuaccaagagacaugguauucagaacauccagucccaaaguaguauuauaa

SEQ ID NO: 9371 - RNA, 1710 nt, Artificial Sequence
  derived and/or modified CDS sequence (opt6) from LASV(Lassa virus/H.sapiens-wt/NGA/2016/ISTH_0621;Clade II)__AVO03544__NP
auguccgcaagcaaagaagucaaaagcuucuuauggacacaaucccuaagaagggaauuaagcggauacuguucaaacauuaaacuucaaguagucaaagaugcacaagcucuauuacauggacuagacuucuccgaaguaaguaacguacaaagauuaaugagaaaacaaaaaagagacgacggagaccuaaaaagauuacgagaccuaaaucaagcaguaaauaacuuaguugaacuaaaaucuacacaacaaaaaucaguucuaagaguaggaacacuaucaucagacgaccuacuaauacuagcagcagaccuagaaaagcuaaaaucaaaaguaauaagaacagaacgaccacugucaaguggaguuuacaugggaaaccucucaagucaacaacucgaccaacgucgagcauuauuaaauaugauaggcaugacaggaggaagucaagguacaaacaccgguagagauggaauaguaagaauaugggacguaaaaaacgcagaacuauuaaacaaucaauuuggaacuaugccaucacuaacacuagcaugucucaccaaacaaggacaaguugaucucaaugaugcaguacaagcuuuaacagaccuaggauuaauauacacagcaaaauacccaaauuccucagacuuagauagauuaagucagucacauccaauacuuaacaugauagauacuaaaaaaucaagucuaaauauuuccggauacaauuucucucuaggggcagccguuaaagcaggagcauguaugcucgauggaggaaauauguuagaaacaaucaaaguaaguccacaaacaauggacggaauauuaaaaucuauacuaaaaguaaaaaagucauuaggaauguucgucucagacacaccaggagaacgcaacccauacgaaaacauuuuauacaaaauaugcuuaucaggagauggauggcccuacauagccucacgaacuucaaucacaggucgcgcaugggaaaacaccauagucgauuuagaaacagacaacaaaucacaaaaaccuggaaauucaggcucuaauagaucucuacaaucagcaggauucccagcaggacuuacauauucucaacuaaugacauuaaaagauucaauguuacaauuagacccaaaugcaaaaacauggauggacauagaaggucgacccgaugacccaguugaaauagcauuauaucaaccauccagcggcugcuauauacacuuuuucagagaaccaacagaucuaaaacaauuuaaacaagacgcaaaauauucacauggcauagauguaucugauuuauuugcugcacaaccaggccuuacauccgcaguaaucgaagcauuaccuagaaacaugguaauaacaugucagggauccgaagacauacgaaaacuauuagaaucucaaggaagacgagauauaaaacuaguagacauaucacuaucaaaauccgacucaagaaaauuugaaaacgugguaugggaucaauucaaagauuuaugccacaugcauacuggaguaguaguagaaaaaaaaaaaaaaggaggaaaagaagagauaacaccacacugcgcauuaauggauugcauaauguucgacgcagcaguaaugggaggccuagacgcaagaguauuacgugcaguccuaccaagagauauggucuucagaaccagcaccccaaaaguaguuuuauaa

SEQ ID NO: 9372 - RNA, 1710 nt, Artificial Sequence
  derived and/or modified CDS sequence (opt6) from LASV(Lassa virus/H.sapiens-wt/NGA/2016/ISTH_0701;Clade II)__AVO03630__NP
auguccgcaucaaaagaaguuaaaagcuuuuuauggacucaaucacuaagacgagaauuaagugguuacuguaguaauauaaaauuacaaguaguaaaagaugcccaagcauuacuacacggacuagauuuuucggaaguaaguaauguacaaagauuaaugagaaaacaaaaacgagaugacagugaccuaaagagauuaagagacuuaaaucaagcuguaaauaaucuagucgaacuaaaaucaacacaacaaaaaagcauacuaagagucggaaccuuaacaagugacgauuuacuaauccuagcagcagaccuagaaaaacuuaaaaguaaaguaauaagaacagaacgaccauuaaguagcggaguauacaugggaaaucuaucaacacaacaacuugaacagagacgagcauuauuaaauuuaauaggaaugguaggaggcgcucaagggacccaaccuggaagagacggagucguccgagucugggacgucaaaaacccagacuuacuaaauaaccaauucggaacuaugcccaguuuaacucuagccugcuuaacaaaacaaggucaaguagaucuaaaugaugcgguacuagcuuuaacagauuuaggacuaauauacacagcaaaauacccaaauagcucagaccuagacagacuaagucaaucacauccuauacucaacaugguagauacaaaaaaaagcucacuuaacauaaguggauucaauuucucgcucggagcagcaguaaaagccggcgcauguaugcuagauggaggcaauauguuagaaaccauaaaagucacuccccaaaccauggauggaaucuuaaaauccauucuaaaaguuaaacgaucacuaggcauguucguaagugauacaccaggggaaagaaauccuuaugaaaauauauuauacaaaauaugucuauccggagacggauggccguauauagcauccagaaccucaauaguaggacgagccugggaaaacacaacuguagaccuagagagcgauggaaaaccacacaaaguuggaacagcaggaagcaauaaaucacuacaaucagcaggauuuccaaccggauuaaccuauucacaacuuaugaccuuaaaagauucaaugaugcaacuagaucccucagcuaaaacauggauagacauugaagguagaccagaagacccaguagaaauagcucuauaccaaccaaugaguggauguuacauacacuuuuuuagagaacccacagaucuaaaacaauucaaacaagacgcaaaauauucccauggaauagacguagcagaccuauuuccagcucaacccgguuuaacaucagcaguaauagaagcauuaccaagaaauaugguacuaaccugccaaggcucagaugacauaaaaagacuauuagacucacaaggaagaagagauaucaaacuaauagacauagcacucucaaaagcagacagcagaagauucgaaaacgcaguaugggaccaauguaaagaucugugccacaugcauaccggaguaguuguagaaaaaaaaaaaagaggaggcaaagaagaaauuacaccacauugcgcacuaauggauugcaucauguacgaugcugcaguuagcgggggacuaaacauaccaguccuuagagcaguacuaccaagagacaugguauuuagaacaucaucuccaaaaguaguccuauaa

SEQ ID NO: 9373 - RNA, 1710 nt, Artificial Sequence
  derived and/or modified CDS sequence (opt6) from LASV(Lassa virus/H.sapiens-wt/NGA/2016/ISTH_0702;Clade II)__AVO03558__NP
augucagcaaguaaagaaguaaaaagcuuucuauggacucaaucacuaagaagagaauuaucagguuacuguucuaauauaaaacuacaaguaguuaaagacgcacaagcccuacuacacggacuugauuucagugaaguaucaaacguacaaagauuaaugagaaaacaaaaaagagaugauucagaccuaaaaagacuuagagaucugaaccaagcugugaauaaucuagucgaacuaaaaucaacacaacaaaagaguauauuaagaguaggaacuuuaacaagcgacgaccuacuaacgcuagcagcagaucuagaaaaauuaaaaaguaaaguaauuagaacagaaagaccucuaucaucaggagucuauaugggaaaccuuucaacacaacaacuagaacaaagaagagcacugcucucaaugauaggcaugguaggaggaacucaaggaacccaaccaggaagagauggaguuguucgaguaugggacguaaaaaacccagacuuacuaaacaaccaauuuggaacaaugccaagucugacacuagcaugccuaacaaaacagggacaaguugacuuaaacgacgcaguucuagcacuaacagauuuaggccuaaucuauacugcgaaauauccaaauuccagcgaccuugauagauuaagucaaucacauccaauacuaaauaugguagauacuaaaaaaaguucauuaaacaucucagguuacaauuuuaguuuaggugcagcuguaaaagcaggcgcauguauguuagauggaggaaauaugcuggaaaccauaaaaguaacaccacaaacaauggacggaauacuaaaaaguauucuaaaaguaaaaaaaucacucgguauguuuguuuccgacacgccuggagaaagaaauccauaugaaaauauauuauacaaaauuugucuaaguggggauggauggccauauauagcaucaagaacaucaauagugggaagagcuugggaaaauacaaccguagauuuagaaagugacggaaaaccacaaaaaguaggaacugcaggaucaaauaaaagucuucaaagugcgggcuucccaaccggccuaacuuacucccaacuaaugacucuaaaagacucaaugaugcaauuagacccaucagcaaaaacuuggauagauauagaaggaagacccgaagaccccguagaaauagcacuauaccaaccaaugucgggauguuacauacauuucuucagagaaccaacagauuuaaaacaauuuaaacaagacgcaaaauauucacacgggauagacguugcagaccuauuuccagcacaaccuggacuaacuucagcaguaauagaagcauuaccaagaaauaugguccuaacaugccaaggaucagacgacauuaaaagacuauuagauucacaaggacgacgagacauuaaauuaauagacauaagucuaagcaaagcagauaguagaagauucgaaaacgcaguaugggaccaauguaaagacuuaugccauaugcauacaggaguaguagucgaaaaaaaaaaacgaggagguaaggaagaaauaacaccacauugcgcacuaauggacuguauaauguaugaugcagcaguaucagguggacuuaauauacccguacuucgagcagucuuaccuagagauaugguauucagaacaagcagcccaaaaguaguucucuaa

SEQ ID NO: 9374 - RNA, 1710 nt, Artificial Sequence
  derived and/or modified CDS sequence (opt6) from LASV(Lassa virus/H.sapiens-wt/NGA/2016/ISTH_0717;Clade II)__AVO03548__NP
augagcguaagcaaagagguaaaaucauuucuauggacgcaaucauuaaggagagaacucucaggauacugcaguaauauaaaaguacaaguagucaaagaugcacaagcauuauuacacggacuagacuucucagaaguuagcaauguacaacgauuaaugagaaaacaaaaacgagacgauggcgacuuaaaacgauuacgagauuuaaaucaagcagucaauaauuuaguagaauuaaagucaacacaacagaagucaguauugagaguaggaacacuaucaagcgaugacuuacuuguauuagcagcagaucuagaaaaauuaaaauccaaaguuauacguacagaaagaccacuaucauccgguauauauaugggaaaccuaaguucacagcaauuggaccaaagaaaagcauuacuaaacaugauagggaugacaggcggaaauguaggaagaaauacaacaggagacgguguaguuagaguaugggauguuaaaaacgcugaauuacuaaacaaucaauucgguacaaugccaucgcuaacacuagcaugccuaacaaaacaaggacaaguagaccuaaacgacgcaguauuagcacuaacagacuuagguuuaauauauacagcaaaauauccaaauagcucagaccuagaucgauuagcacaaagccacccaauacuaagcaugauagauacaaagaaaucaagccuaaacauaagcggguacaauuuuucccuaggagcagcaguaaaagcuggagcaugcauguuagacggaggaaauauguuagaaacaauaaaaguaaguccacaaacaauagacgggauacuaaaaucaauacuuaaaguuaaaagaucauuaggaauguucauaagcgauacaccgggagaaagaaauccauaugaaaauauauuauacaaaaucugccuaucuggagacggauggccuuauauagcgucuagaaccaguauaguuggcagagcaugggaaaacacaguuguagaccuagaaucugauaacaaaccucagaaaacagguaaugguggaaguaacaaaucacuacaaagugcuggauuugcagcaggauuaaccuauagucaacuaaugacguuaaaagacuccaugcuacaauuagauccaaaugcaaaaacauggauggacaucgaaggcagacccgaagauccuguagaaaucgcauuauaucaaccaagcaguggauguuacauacacuucuuuagagaaccaaccgacuuaaaacaauucaaacaagacgcaaaauacucacaugguauagauguaacagaucuauucgcagcacaaccaggauuaacaagugcaguuauagaagcucugccaagaaacaugguuauaacuugccaagguagcgaagacauaagaaaauuacuagaaucacaaggaaggagagacauaaaacuaauagauauauccuuaaguaaaguggacaguagaaaauucgaaaacgcuguuugggaucaauucaaagauuuaugccacaugcauaccggaauagucgucgaaaagaagaaaagagggggaaaagaagaaauuacaccccauugugcacuaauggauugcauaauguuugaugcugcaguaaguggaggaguagacgcaaaaguacuaagagcuguuuuaccaagagauaugguuuucagaacaucaacaccaaaaguagucuuauaa

SEQ ID NO: 9375 - RNA, 1710 nt, Artificial Sequence
  derived and/or modified CDS sequence (opt6) from LASV(Lassa virus/H.sapiens-wt/NGA/2016/ISTH_0753;Clade II)__AVO03610__NP
augagcgcaucaaaagagguaaaaaguuuccucuggacacaaucacuacggagagaacuuucaggauauugcucaucaauaaaauugcaaguaguaaaagacgcacaagcacuacuacacgguuuagacuucucggaagucaguaauguacagagauuaaugcgaaaacaaaaaagagacgauagcgaucuaaaaagauuaagagaccuaaaccaagcggugaauaaucuaguagaacuaaaaucaacccaacaaaaaucuauacuuagagucggaaccuuaacaucagaugacuuacuaacacuagccgcagaccuagaaaaacuaaaaagcaaaguaauuagaacagaaagaccauuaaguagcggaguauauaugggaaaccuaaguacacaacaacuagaacaaagaagagcuuuacuuaauaugaucggcaugguaggaggugcccaaggaacacaaccaggaagagacggcguaguaagaguaugggauguaaaaaaucccgauuuauuaaacaaccaauucgggacaaugccuagucugacgcuagcauguuuaacaaaacaaggacaaguagauuugaaugaugcagucuuagcacuaaccgaccucggcuuaaucuauacagcaaaauacccaaauucaucagauuuagacagacuuucacaaucacauccaauauuaaauaugguagauaccaaaaaaaguucauuaaauauaucaggauauaauuucagcuuaggagcagcugucaaagcaggugccuguaugcuagacggaggaaauauguuagaaaccauuaaaguaacaccacaaacaauggacgguauacuaaaaucaguauuaaaaguaaaaagaagcuuaggaauguucguaagcgauacgccgggagaaagaaauccauaugaaaauauauuauacaaaauaugucuuaguggagauggcuggccauauauagcaagucgaaccucaauaguuggccgagcaugggaaaauacaacuguagauuuagaaagugauggaaagccacaaaaaguaggcgcagcaggaaguaacaaaucuuuacaaagugcaggauuucccacaggcuuaaccuacagucaacuaaugacacuuaaagauucuaugaugcaacuagacccaucagcuaaaacguggauagacauugaaggaagaccagaagacccaguugaaauagcgcucuaucaaccaaugagcggauguuacauacacuuuuucagagaaccaacagaucuaaaacaauuuaaacaagaugcaaaauauagccauggaauugauguggcagauuuauuuccagcucaaccaggacuaacaucugcagucauagaagcacuaccacgaaauaugguacuaacaugucaagguucagaugauauaaaaagacucuuagauucacaaggaagaagagauauaaaauuaauagauauugcuuuaucaaaagccgacucacgaagauucgaaaacgcaguaugggaccaaugcaaagaucuaugccauaugcacacaggugucguaguagaaaaaaaaaaaagaggagguaaagaagaaaucacgccacauugcgcauuaauggacuguauaauguaugacgcagcaguaucagguggauugaauauuccaguguuacgagcaguccuaccaagagauaugguauuccguacaagcagcccuaaaguuguauuauaa

SEQ ID NO: 9376 - RNA, 1710 nt, Artificial Sequence
  derived and/or modified CDS sequence (opt6) from LASV(Lassa virus/H.sapiens-wt/NGA/2016/ISTH_0759;Clade II)__AVO03594__NP
augagugcaaguaaagaaguaaaaagcuuccuauggacacaaucauuaagaagagaacuaagcggauacugcagcaguauaaaacugcaaguaguaaaagacgcucaagcacuacuacacggacuagacuuuucagaaguaaguaauguacaaagauuaaugaggaaacaaaaaagagaugauagugaucuaaaaagacugagagaucuaaaccaagcaguaaauaaccuaguagaacucaaaagcacucaacaaaaaagcauauuaagaguaggaacacucacaucagaugauuuacuaacauuagcagcagaucuagaaaaauuaaaaagcaaaguaaccagaacagaaagaccacuauccucuggaguauauaugggaaaucuaucaacacaacaguuagaacaaagaagagcauuauuaaacaugauaggaaugguaggcggagcacaggguacacaaccaggcagagacggugucguaagaguuugggauguaaaaaauccugaucuacuaaauaaccaauucggaaccaugccaucacucacauuagcaugccuaacaaaacaaggacaaguagaucucaaugacgcagugcuagcguuaacugacuuagguuuaauauauacagcaaaauauccaaauucaucugacuuagacagacuaagucaaucacacccaauacuuaauaugguagacacaaaaaaaucaagccuaaacauaucggguuacaacuuuucgcuaggggcagcaguuaaagcaggagcauguauguuagacggaggaaauauguuagagacaaucaaagucaccccacaaacaauggacggaauauuaaaaucaauauuaaaaguaaaaagaucauuaggaauguucguaucagaugcaccaggugaaagaaauccauaugaaaauauuuuauacaaaaucugucuaagcggagauggcuggccauauauagcuagccgaacuucaauaguaggucgagcuugggaaaacacaaccguagaucuagaaucugauggaaaaccucaaaaaguaggaacggcuggaaguaauaaaucauuacaaucugccggauuuccaaccggauuaaccuauucacaacuaaugacauuaaaagacucaaugaugcaacuugauccaagugcuaaaacauggauagauaucgaaggccgaccagaagauccaguagaaauagcauuguaucaaccaaugaguggaugcuauauccauuuuuuucgagaacccacagauuuaaagcaauuuaaacaagacgcaaaauacagucacggaauugauguagcagaucuauuuccagcucaaccaggauuaacaucagcggugauagaagcauuaccaagaaacaugguccucacaugucaaggaucagacgacauaaaaaaacuauuagauagucaaggaagaagagacauaaaacuaauagacauagccuuaucgagagcagacuccagaagauucgaaaaugcagucugggaucaauguaaagauuuaugccauaugcauacaggaguaguaguagaaaaaaaaaaaagaggaggcaaagaagaaauaacuccacacugugcacucauggauugcauaauguaugacgcagcuguaagcgguggacuaaauauuccaguuuuaagagcaguucuaccacgggauaugguauuuagaacaucgucuccaaaaguaguauuauaa

SEQ ID NO: 9377 - RNA, 1710 nt, Artificial Sequence
  derived and/or modified CDS sequence (opt6) from LASV(Lassa virus/H.sapiens-wt/NGA/2016/ISTH_0777;Clade II)__AVO03616__NP
augagugcaucaaaagaaguaaaaucauucuuauggacacaaaguuuaagaagagaacuuagcggcuauugcagcaauauaaaauuacaaguagucaaagaugcucaagcacuauuacauggacuagauuucucagaaguuucaaauguacaaagacucaugagaaaacaaaaacgugaugauggagaucuaaaaagacuuagagaucuaaaccaagcaguaaacaaucuaguagaauuaaaauccacacaacagaaaagcguauuaagaguagguacauuaacuucagaugaccuguuaacauuagcagccgaucuagaaaaauuaaaaucaaaaguaauaagaacagaaagaccacucucaucaggugucuacaugggaaacuuaagcacacaacaacucgaacaaagaaaagucuuauuaaguaugauaggaaugguaggcggcacccaaagagcccaaccuggaaaagaugguguaguaagaguaugggacguuaaaaacccagaccuauuaaacaaccaauucggaacaaugccaagucuuacucucgcaugcuuaacaaaacaaggacaaguagaucuaaaugauaccguacuggcacuaacagaccuaggauuaauauauacagcaaaauacccaaauagcucagauuuagauagauuaucacaaucacauccaauucuaaacaugguagacacaaagaaaucaucucuaaacauaaguggauauaacuuuucacuaggagcagcaguaaaagccggugcauguaugcuagaugguggaaauaugcuagaaacaauaaaaguaacaccacaaacaauggauggaauauugaaaagcauacuaaaagugaaaagaagccuaggaauguuuguaucagauacaccaggagaaagaaaucccuaugaaaauauacucuacaaaaucugcuuaucaggagauggauggcccuacauagccucaagaacaucaauaguuggcagagcaugggaaaauacaacaguugaucuggaaagcgauggaaaaccucaaaaaguaggcacagcagggaguaauaaaucacuacaaucagcaggauuuccaacaggacuaacauauagucaauuaaugacccuaaaagacaguaugaugcaauuagacccaagugcaaaaacauggauagauauagaagguagaccagaagacccaguagaaauagcacuauaucaaccaguaucaggaugcuacauacacuucuuuagagaaccgacagaccuaaaacaauuuaaacaagacgcaaaauacucacauggaauagauguaaccgauuuauuuucagcacagccaggauuaacauccgcaguuauugaagcacuaccaagaaacaugguauuaacaugccaaggauccgacgacaucaagaaauuacuagacagccaaggaagaagagacauaaaauuaauagauauaucccuaucuaaauuugacucgagaaaauucgaaaacgcaguuugggaucaaugcaaagacuuaugccacaugcauacaggaguaguaguagagaaaaagaaaagaggaggaaaagaagaaauuacaccucacugugcacuaauggauugcauaauguucgacgcagcuguaucaggaggauuaaacauacccauuuuaagagcaguccuuccacgagauauggucuucagaacaucaaguccaaaagugguauuauaa

SEQ ID NO: 9378 - RNA, 1707 nt, Artificial Sequence
  derived and/or modified CDS sequence (opt6) from LASV(Lassa virus/H.sapiens-wt/NGA/2016/ISTH_0779;Clade II)__AVO03656__NP
aguguuucaaaagaaguaaaaaguuucuuauggacacaaagcuuaagaagagaacuaucuggguauuguucaaauauaaaauuacaaguaguaaaagacgcucaagcauuauugcacgggcuagauuucucggaaguaucaaauguucaaagauugaugagaaaacaaaaacgggaugacaacgaucucaaaagauuaagagaucuuaaucaagcuguaaacaauuuaguagaacuaaaaagcguccaacagaaaagcaucuuaagaguaggaacacuaucaucagacgacuuauuaauacucgccgcagacuuagaaaaacuaaaaagcaaagucauaagaaccgaaaggccauuaucaucaggaguauacaugggaaauuuaucaagucaacaacuagaacaaagaaaagcauuacuaaacaugauaggaaugacaggagggagucaaggagcacaaccuggaagagauggaguagugagaguaugggauguaaaaaauucagaucuacuaaauaaccaauucggaaccaugccaagccuaacacuagcaugccucacaaaacaaggacaaguugacuuaaaugaugcaguacuagcauuaacagacuuaggauuaauauacacagcaaaauaucccaauacaagugaucuagacagauugucacaaucacauccaauauuaaauaugguugauacaaaaaaaucuucauuaaacauuagcggauacaacuuuagccuuggagcagcagucaaagcaggcgcauguauguuagacggaggaaacauguuagaaaccauaaaaguaacaccacagacuauggauggaauauuaaaaagcauacuaaaaguaaaaagagcacuaggaauguucgucucagauacaccaggagaaagaaauccauaugaaaauauauuauacaaaauuugcuuaucuggugaagguuggccauacauagcaucacgcaccaguauaacuggacgugcuugggaaaacacaauaguagauuuagaaucagacucaaaaccacaaaaaaugggaacaacaggaaguaacaagucucuacaaagugcaggcuuuccagcaggccuaacauauucacaauuaaugaccuuaaaagacucaaugaugcaacuagauccuucagcaaaaacauggauagauauagaaggaagaccagaagauccugucgaaaucgcauuauaucaacccauaucaggaugcuauauccacuuuuucagagaaccgacagaccuaaaacaauucaaacaagacgcaaaauauucucauggaauagauguagcagaucuauuuucagcccaaccaggacucacaagcgcgguaauagaagcauuaccaagaaauaugguacuaacaugucaaggcucugaugacauaaaaaaacuacuagauucacaaggccguagagacaucaaacuuauagauauaagccuaaauaaagcagacucaagaagguucgaaaacgcaguaugggaccaauguaaagacuuaugccauaugcauacuggaguaguaguagaaaaaaaaaaaagaggaggaaaagaagaaauaacaccucauugugcacuaauggauugcauaauguuugaugcagccguaucaggaggauuaaauauaccaauacuacgagcaguacuacccagagauauggucuucagaacaaguagcccaaaggugguauuauaa

SEQ ID NO: 9379 - RNA, 1710 nt, Artificial Sequence
  derived and/or modified CDS sequence (opt6) from LASV(Lassa virus/H.sapiens-wt/NGA/2016/ISTH_0917;Clade II)__AVO03536__NP
augucagcaucaaaagaaguaaaaucauucuuauggacucaaucacuaagacgugaacuaagugguuauuguucaaacaucaaacugcaagucguaaaagaugcucaagcacuacuacacggacucgauuucucagaaguuagcaauguccaaagauuaaugagaaaacaaaaaagagacgauagugaucuaaaaagacuuagagaucucaaccaagcgguuaacaaucuaguugaacuaaaaaguacucaacaaaaaucaauacuaagaguaggaacccuauccucagaugaucuauuaacucuugcaacagaucuagaaaaacuaaaaucaaaaguaauaagaacagaaagaccacuuucaagcggaguauauaugggaaaucuaucaacacaacaauuagaccaacguagagcacuauuaaacaugauaggcaugguaggaggaucacaaggcacaagugcgggcagagauggcaucguaagaguaugggauguacgaaacccagaauuacuuaauaaccaauucggaacaaugccaucauuaacacuagcauguuuaacuaaacagggacaaguagaccuaaacgaugcaguccaagcacuaacagaccugggcuuaauauacacagcaaaauauccuaauucaucagauuuagacagacuaagccaaucucauccaauauuaaacaugauagauaccaaaaaauccagcauaaauauaucaggauauaauuucucacuuggagcagcagugaaagcaggagccuguaugcucgacggaggcaacaugcuagaaacaauaaaaguaaguccacaaucaauugauggaauauuaaaaucaauacuaaaaguuaaaagaacacuaggaauguucguaagcgacaccccaggagaaagaaauccauacgaaaauauauuauacaaaaucuguuuauccggagauggcuggcccuacauagcaagcagaaccucaaucacagguagagccugggaaaauacaguagucgaucuagaaucagacgauaaaccaaaaaaaccgggaaauaaugaaagcaauagaucauuacaaucagcuggauuucccgcaggccuuacauacagccaauuaaugacacuaaaagauucaaugcuacaacuagauccaaaugcaaaaacauggauggauauagaaggaagaccagacgauccaguagaaauagcuuuauaucaaccaaauucaggauguuacauucacuuuuuucgagaaccgaccgaucucaaacaauuuaaacaagaugcuaaauacucacacggaauagacauaggcgauuuauucgcaagccaaccaggacucacaucagcaguaauugaggcauuaccacgaaacaugguaauaaccugucaaggaagugaggacauaaaaaaacuacuagaaucucaaggacgaaaagacauaaggcuuguagauaucucacuaucaaaagcugauucuagaaaauucgaaaaugcgguuugggaccaauauaaagacuuaugccacaugcauacaggaauaguaguagaaaaaaaaaaaaaaggaggaaaagaagaaauaaccccacacugugcacuaauggauuguauaauguucgaugcagcaguuaugggaggauuagaugccaaaguguuaagagcuguauuaccacgagauaugguauuccgcacaucuaccccacgcguuguacuauaa

SEQ ID NO: 9380 - RNA, 1710 nt, Artificial Sequence
  derived and/or modified CDS sequence (opt6) from LASV(Lassa virus/H.sapiens-wt/NGA/2016/ISTH_0919;Clade II)__AVO03660__NP
augagcgcaaguaaagaagucaaaaguuuccuauggacacaaucacuacgaagagaauuaucuggauauugcucaaacauaaaauuacaaguaguaaaagaugcacaagcucuacuacauggauuagauuucucagaaguaagcaauguacaacguuuaaugagaaaacaaaaaagagaugauucagaucuaaaaagauuacgagaucuaaaccaagcuguaaauaaucuaguagaauuaaaaucaacacaacaaaaauccauacuucgaguaggcacccuaacuagugaugacuuacucacacuagccgcugaccuagaaaaacuaaaaucuaaaguuauacgcacagaaaggccacuaucaagcggcguauacauggguaacuuaucaacacaacaauuagaacaaagacgugcuuuacuaaacuuaauaggaaugguaggaggugcacaaggagcacaaccaggacgagacggagucguaagaguuugggacguuaaaaacccagaccuauuaaauaaucaauucggaacaaugccaucccucacauuagcuugccuaaccaaacaaggacaaguagaucuaaacgacguuguucucgcccucacagauuuaggauugaucuacacugcaaaauaucccaauagcagugacuuggauagacuaucucaaagucacccaauuuuaaacaugguggacacuaaaaaaagcaguuuaaacauaucuggauuuaauuucucauuaggagcugcaguaaaagcaggagccugcaugcuggauggaggcaauauguuagaaacuauaaaaguaacaccacaaacaauggacggcauauuaaaaucaauacugaaaguaaaaaaaucucugggaauguucguauccgauacaccaggugaacgaaauccauaugaaaauauacuauacaaaauuugucuaucaggagacggauggccauauauagcaaguagaacuucaauaguuggcagagcaugggaaaauaccacuguagauuuagaaucagauggaaaaccacauaaaguaggaacagcaggaucuaauaaaucccuacaaagcgcagguuuucccacaggauuaaccuauagccaacuaaugacccuaaaagauucaaugaugcaacuugauccaagugcaaaaacauggaucgauauagaaggaagaccagaagauccaguagaaauugcauuauaucaaccaaugucaggauguuauauacacuuuuuucgagaaccaacugaccuaaagcaauuuaaacaagacgcuaaauauucacacggaauagauguagcagaccucuuuccagcucaaccaggauuaacaucagcaguuauagaagcccuaccaaggaauaugguauuaacaugucaaggauccgaugacauaaaaagacuauuagacucacaagguagacgagauauaaaauugauagacauagcucuaucaaaagcugauucaagaagguuugaaaaugcaguaugggaccaaugcaaagaucuuugucacaugcauacaggaguaguaguagaaaagaaaaaaagaggaggaaaagaagaaauaacaccccauugugcacuaauggacugcauaauguaugaugcugcaguguccggaggauuaaacauuccaguauuaagagcgguauuaccaagagauaugguauuucguacuucuucaccuaaaguaguccuuuaa

SEQ ID NO: 9381 - RNA, 1710 nt, Artificial Sequence
  derived and/or modified CDS sequence (opt6) from LASV(Lassa virus/H.sapiens-wt/NGA/2016/ISTH_1006;Clade II)__AVO03644__NP
augucagcuucuaaagaaguaaaauccuuccuauggacacaaucauuacgaagagaauuaucaggauacuguucaaauauaaaauuacaaguaguaaaagacgcacaagcacuacuacacggacuagauuucucagaaguaagcaacguacaacgauuaaugagaaaacaaaaacgcgaugauucugaccucaaaagacuaagagaucuaaaucaagcaguaaauaaucuaguugaacuaaaaagcacccaacaaaaauccauauuaagagucggaacauuaacauccgacgauuuauuaacccuugcagcugauuuagaaaaauuaaaaucaaaaguaauacguacagaaaggccguuaagcaguggaguauacaugggaaaccuaagcacacaacaacuagaacaaagacgagcacuauuaaacaugauaggaaugguaggaggaacacaaggaacacaacccggaagagauggcgucguuagaguaugggauguuaaaaauccagauuuacuaaauaaccaauucggcacaaugccaucacucacguuagcaugccuaacaaaacaaggacaaguagaccuaaaugacgcaguacuagcauuaacagauuuaggacuuauuuacacagcaaaauauccuaauagcucagauuuagacagacugagccaaagucacccaauacuaaauaugguagauaccaagaaauccucccugaacauaagugguuacaauuuuucauuaggcgcagcggucaaagcuggagcguguaugcuugauggaggaaauauguuagaaacaaucaaaguaacuccacaaacaauggacggaauauuaaaaucaauccuaaaaguaaagaaaagucuaggaauguucguaagcgauacucccggagaaagaaauccauaugaaaauauacuauauaaaauauguuuaagcggagacggcuggccauacaucgcaagcagaacaaguauaguuggcagagcaugggaaaacacaacaguagaucuagaaagcgauggaaaaccacaaaaaguagguacagccggaagcaauaaaucauuacaauccgcaggauuuccaacaggauuaacauauucucaacuaaugacauuaaaagacucaaugaugcaacuagauccaucagcuaaaacuuggauagacauagaaggcagaccagaagacccaguagaaauagcacuuuaucaacccaugucaggaugcuacauacauuucuuuagagaacccacagauuuaaaacaauuuaaacaagacgccaaauauucacacggaauugacguagcagacuuauuucccgcacaaccaggacuaacaucagcaguaauagaggcuuuacccagaaauaugguccuuacaugccaagguucagacgacauaaaaagacuacuagauucucaaggucgaagagauauaaaauuaauagauauaucacucucaaaagcagacagcagaagauucgaaaaugcagucugggaucaaugcaaagauuuaugucauaugcauacgggaguaguuguagaaaagaagaaacgaggaggaaaagaagaaauuacaccacauugcgcauuaauggacugcauaauguaugaugcagcagucucugggggauuaaacauaccaguucuaagagcaguauuaccaagagauaugguauucagaacgucaagcccaaaaguaguacuauaa

SEQ ID NO: 9382 - RNA, 1710 nt, Artificial Sequence
  derived and/or modified CDS sequence (opt6) from LASV(Lassa virus/H.sapiens-wt/NGA/2016/ISTH_1026;Clade II)__AVO03590__NP
augucagcuucaaaggaaguaaaaucauuuuuauggacacaaucauuaagaagagaauuaucuggcuauugcagcaacaucaaauuacaaguuguaaaagaugcacaagcacuuuuacacggauuagauuucucagaaguaucaaacguacaaagauuaaugaggaaacaaaaaagagacgauucagauuuaaaaagauuaagagaccuaaaucaagcagucaauaauuugguagaauuaaagucaacccagcaaaaaagcauccuccgaguagguacauuaacaagcgaugacuuacuuacacucgcagccgaucuagagaaauuaaaaucaaaaguaauaagaacagaaagaccucuaucaucaggaguuuacaugggaaauuuauccgcacaacaacucgaacaaagaagggcacuacuaaaucuaauaggaauggucggaggcgcccaaggaacucagccuggaagagacggaguaguaagaguaugggaugucaaaaacccagaucuacuaaacaaccaauucggaacaaugccuucacuaacauuagcuugucuaacuaaacaaggacaaguugauuuaaaugaugcaguacuagcacuuacagaccuagguuuaauuuauacagcaaaauauccaaauucauccgauuuagacagacuaucucaaucacacccaauauuaaacauggucgauacaaaaaaaagcucuuugaacauaagcggauuuaacuuuucacucggcgcagcaguaaaagccggagcaugcauguuagacggcggaaacauguuagaaacaauaaaaguaacaccacaaacaauagacggaauacuaaaaagcauacuaaaaguaaaaaaaucuuuaggcauguucguaucagauaccccaggagaacgaaaucccuaugaaaacauauuauacaaaauaugccuaucaggcgacggauggcccuacauagcauccagaacaucaauaguagguagagcuugggaaaauaccacagucgaucuagaaucugacggaaaaccacacaaaguuggcacugcaggaucaaauaaaucacuacaaagugcaggcuuucccacaggacuaacauauagucaacuaaugacauuaaaagauucaaugaugcaacuagauccuagcgcaaaaacuuggauagacauagaaggaaggccagaagacccuguagaaauugcgcuguaucaacccaugucaggauguuauauacauuucuucagagaaccaacagaccuaaaacaauuuaaacaagaugcaaaauauagccauggcauagacguggcagauuuauuuccagcacagccaggacuaaccagugcaguaauugaagcacuaccacgaaauaugguuuuaacuugucaaggaucagacgacauaaaaagauuauuagauucucaaggcagacgagacauaaaacuaauagauauagcauuaaguaaagcagacucaagaagauucgaaaacgcaguaugggaccaaugcaaagaucuaugccauaugcauacaggaguaguugucgagaaaaaaaaaagaggaggaaaagaagaaauaacaccacacugcgcacugauggacugcauuauguaugacgcugcaguaucaggaggacuaaauaucccuguguuaagagcuguucuacccagggauaugguuuuuagaacauccucaccaaaagugguauuauaa

SEQ ID NO: 9383 - RNA, 1710 nt, Artificial Sequence
  derived and/or modified CDS sequence (opt6) from LASV(Lassa virus/H.sapiens-wt/NGA/2016/ISTH_1070;Clade II)__AVO03652__NP
augagcgcaaguaaagaaguaaaaaguuuccucuggacacaauccuuaagaagggaauuaaguggauauugcucaaacauuaaauuacaaguaguaaaagaugcacaagcacuauuacacggauuagauuucagugaaguauccaauguccaaagauuaaugagaaaacaaaaacgagacgacggugauuuaaaaaggcuaagagauuuaaaucaggcaguaaauaaucuaguagaacuuaaaucuacacagcaaaaaucaguacuaagaguaggaacucuaacuucagacgaccuauuaacacuagcagcagaucuggaaaaacuaaaaucuaaaguaauaagaacugaaagaccauuaagcuccggaguguauaugggaaauuuaucaacacaacaacuagaacaaagaagagcacuauuaucaaugauaggcaugguaggaggagcgcaaggaacacaaccuggaagagauggcguagucaggguaugggauguuaaaaacccagacuuacuaaauaaucaauuuggaacaaugccaucacuaaccuuagcauguuuaacaaaacaaggacaaguagaccuaaacgacgucguacuagcacucacugauuuaggauuaauauacaccgccaaauauccaaacucaagugacuuagauagacuaucacaaucacacccaauucuaaacaugguagacacaaaaaaaucaucacuaaacauaucaggauacaacuucucguuaggagccgccguaaaagcaggagcauguaugcuagauggaggaaauauguuagaaaccaucaaagucacaccacaaacaauggacggcauauuaaaaagcauacuuaaaguaaaaaaaucauuaggaauguucguaucagauacaccaggugaaagaaaucccuaugaaaauauacucuacaaaauauguuuaagcggugauggauggccuuacauagcuuccagaacagccauaguaggaagagccugggaaaauacaacaguagauuuagaaagcgauggcaaaccccaaaaaguaggugcaacuggcucaaauaaaucauuacaaagcgcuggcuuuccaacaggauuaacauacagccaacuaaugacacuaaaagauaguaugaugcaauuagauccuucagcaaaaacauggauagauauagaaggaagaccagaagacccaguagaaauagcauuauaccaaccaaugagcggauguuauauacauuucuucagagaaccaacagauuugaaacaauucaaacaagacgcaaaauauucucauggaauagacguaacagacuuauuuucagcccaacccggauuaaccagugcaguaauagaagcacuaccaagaaauaugguauuaacaugucaagggucugaugauauaaaaagacuucuagauucccaaggcagaagagacaucaaauuaaucgacauagcauugucaaaagcagauucaagaagauucgaaaacgccguaugggaccaaugcaaagaccuaugccauaugcauacaggaguaguaguagaaaaaaaaaaaagaggaggcaaagaagaaauuacaccacauugugcauuaauggauuguauaauguaugacgcggcaguauccggcggauuaaacauaccaguucuaagagcaguacuaccaagagacaugguauuuagaacaucaucaccaaagguaguacuauaa

SEQ ID NO: 9384 - RNA, 1710 nt, Artificial Sequence
  derived and/or modified CDS sequence (opt6) from LASV(Lassa virus/H.sapiens-wt/NGA/2016/ISTH_1150;Clade II)__AVO03628__NP
augucagcauccaaagaaguaaagucauuucuauggacucaaucuuuaagacgcgaacuaucaggauauugcucaagcauuaaauuacaaguagugaaagacgcacaagcucuuuuacauggacuagauuucucugaaguuagcaacguacaaagauuaaugaggaaacaaaaaagagacgacucagauuugaaaagauuaagagacuuaaaucaagcagucaauaaucuagucgaauuaaaaagcacucagcagaaauccauauuaagaguaggaacuuuaacaucagacgauuuacuaacuuuagcagcagauuuagaaaaacuaaaaaguaaaguaauacgaacagaaagaccacuaaguagcggaguauacaugggaaaccuaaguacacaacaacuagaacaacgaagggcccuacuaucaaugauaggaaugguaggcggcgcacaaggaacacaaccaggaagagauggaguaguucgaguuugggauguaaagaauccagacuuacuaaauaaccaauucggcacgaugccgucacuaacauuagcaugucuaacaaaacaaggucaaguagacuuaaacgauacaguucuagcauuaacagaccuaggacuaauauacacagcaaaauauccaaauuccagugaccuugaucgacuaucccaaucacacccuauucuuaauaugguagacauaaaaaaaaguagucuaaauaucucaggauacaauuuuucucuaggugcagcuguaaaagcaggcgcauguaugcuugacgguggaaauaugcuagaaacuauuaaaguaacaccgcaaacaauggacggaauacuaaaaucaauauuaaaagucaaaagaagcuuaggaauguucguaucagacacaccaggagaaaggaauccuuacgaaaacauauuauacaaaauaugucuuucaggcgauggauggccuuauauagccaguagaacaucaauaguaggaagagcuugggaaaauacaacaguagauuuagaaucagauggaaaaccacaaaaagucggaacagcaggauccaacaaaagucuacaaagugcuggauuuccaacaggauuaacauauucccaacuuaugacucuaaaagauucuaugaugcaguuagacccaucggcaaaaaccuggauagacauagaaggcaggccagaagauccuguggaaauagcauuauaucaacccaugucaggaugcuacauccacuuuuucagagaaccaacugacuuaaaacaauucaaacaagaugcaaaauacagccacggcaucgaugucacagaccuauuuucagcucaaccaggauuaacaucagcuguaauagaagcauuaccaagaggaaugguacuaacaugucaaggaucagaugauauaaaaaaauugcuagauucacaaggaagaagagacauaaaguuaaucgauauaucauuaaguaaagccgacucaagaagauuugaaaaugcaguaugggaccaauguaaagacuuaugccacaugcauacaggaguaguaguagaaaaaaaaaaaagaggaggcaaagaagaaauaacaccacacugugcucuuauggauugcauaauguucgacgcagcagucucaggaggacucaacauuccaauacuaagagcaguauuaccacgugacaugguauucagaacauccucaccuaaaguuguuuuauaa

SEQ ID NO: 9385 - RNA, 1710 nt, Artificial Sequence
  derived and/or modified CDS sequence (opt6) from LASV(Lassa virus/H.sapiens-wt/NGA/2016/ISTH_1174;Clade II)__AVO03556__NP
augucagccagcaaagaagucaaaucauucuuauggacucaaucacuaagaagagaacuuucaggauauugcuccaacauaaaacuucaaguaguaaaagacgcacaagcacuauuacauggauuagacuucucagaaguaaguaacguacaaagacuaaugaggaaacagaaaagggaugauucagauuuaaaacgauuaagagaucuaaaucaagcaguaaauaaucucguagaauuaaaaaguacucaacaaaaaucaauacuaaggguaggaacucuaacaucagacgaccuacuaacacuugcagcagauuuagaaaaauuaaaaucaaaagucauaaggacagaaagaccauuaucuagcgguguauauaugggaaauuuaucaacucaacaauuagaacaaagacgagcacuauuaaacaugauaggaaugguaggaggcgcacaaucaacacaaccugguagggacggaguaguaagaguaugggaugucaaaaacccugaccuccuaaauaaccaauuuggaacaaugcccagccuaacacuagcuugccuaacuaaacaaggucaaguagaucuaaacgaugcaguauuagcacuaacagaccuaggccuaauauacacagcaaaauauccaaacagcucagaccuagauagacucagccaaagccauccaauacuaaauaugguagauacaaagaaaaguuccuuaaauauaucaggauauaacuucaguuuaggcgccgcaguaaaagcaggagcauguaugcuagauggaggaaacaugcucgaaacgauaaaaauuacaccacaaacaauggacggaauacuaaaaucaauucuuaaaguaaaacgaagccuagguauguucguaagcgauacaccaggagaaagaaaucccuaugaaaacauauuguauaaaguaugucuaucaggagacggcuggccuuauauagcaucuagaacuucaauagucggacgagcaugggaaaacaccacaguugaucuagaaagcgauggaaaaccccaaaaaguaggaaccguaggaagcaacaaaucacuacagucagcaggguuuccaacaggcuuaaccuacagccaacuaaugacauuaaaagauucaaugaugcaauuagauccaucggcaaaaacauggauagauauagaaggccgacccgaggacccaguagaaauagcacuuuaucaaccaaugagcggauguuauauacacuuuuucagagaaccaacagacuuaaaacaauuuaaacaagacgcaaaauauagucauggaauagauguagcagaucuauuuccagcacaaccaggacuuacaucagcaguaaucgaagcacuacccagaaauaugguuuuaacaugucagggauccgaugauauaaaacgauuacuagauucacaaggaagaagagauauaaaauuaauagauauagcuuuaagcaaagccgauucucgcagauuugaaaacgcaguaugggaccaaugcaaagauuuaugccacaugcacacaggcguagucguagagaaaaagaaaagaggagggaaagaagaaauuacaccacauugcgcuuuaauggauugcauaauguacgaugcagcaguaaguggcggauuaaauaucccaguauuaagagcgguuuuaccaagagacaugguauuucgaacaucaucuccaaaaguaguuuuauaa

SEQ ID NO: 9386 - RNA, 1710 nt, Artificial Sequence
  derived and/or modified CDS sequence (opt6) from LASV(Lassa virus/H.sapiens-wt/NGA/2016/ISTH_1207;Clade II)__AVO03600__NP
augucggcaucaaaagaaguaaaaaguuuucuauggacacaaaguuuaagaagagaacuuucaggauauuguucaaacauuaaguugcaaguuguaaaagacgcacaagcauuauuacacggccuagauuuuucagaaguuucaaauguacagagacucaugagaaaacaaaaaagagacgauagugaucuaaaaagauuaagagauuuaaaucaagcaguaaauaaucuaguagaauuaaaaucuacccaacaaaaaucaauccuaagaguaggcaccuuaacaucagaugaucuacuaauacucgcagcagaccuagaaaaacucaaaucuaaaguuauaagaacagaacgaccacuaucaagcggagucuauaugggaaauuuaucaacucaacaauuagaacaaagaagagcauuacuaaauaugauagguaugguagauggagcacaaggcacucaacccggacgagauggaguaguaagagucugggauguaaaaaauccagaucuauuaaauaaccaauucggcacaaugccaucauugacauuagcaugcuuaacaaaacaaggucaaguagauuuaaacgaugcaguacuagcccuaacagacuuaggacuaauauacaccgcaaaauacccaaacuccagugaccuagacagacuuucacaaucacauccaauacuaaacaugguagacaccaaaaaaucaaguuuaaauauuagcggauauaauuucaguuuaggugcagccguaaaagccggagcaugcaugcuagacggaggaaauaugcuagagacaauaaaaguuacaccucaaacuauggauggaauauuaaaaucaauucuaaaagucaaaaaaagccuaggaauguucgugagcgacacuccaggagaaagaaauccauaugaaaauauuuuauacaaaauauguuuaucaggagaugguuggccauauauagccucaagaacauccauagucggaagagcaugggaaaauacaacagucgaucuagaaagcgauggcaaaucucaaaaaguaggaacggcaggaucaaauaaaucauuacaaagugccggauuuccaacaggauuaacauauagccaauuaaugacuuuaaaagauucuaugaugcaacuugacccaucagccaaaacuuggauagauauagaaggaagaccagaagauccaguagaaauagcacuauaccaaccgaugucagguuguuacauucauuuuuuccgugaaccuacagacuuaaaacaauuuaaacaagacgcaaaauauucacauggaauagauguagcugauuuauuuccagcacaaccuggauuaacaucagcaguaauagaagcacuuccaagaaacaugguacuaacgugccaaggaagugacgacauaaaaagauuacuagacagccaagguagaagagacauaaaauuaauagacaucgccuuaagcaaagcagauucacgaagauuugaaaacgcugucugggaccaauguaaagaccucugccacaugcacacaggaguuguagucgaaaaaaaaaaaagaggaggaaaggaagaaauaacaccucauugugcacuuauggauugcauuauguacgaugcagcaguuuccggaggucucaacauaccaguacuaagagcaguacuaccacgggauaugguauuccgaacuuccagcccaaaaguaguauuauaa

SEQ ID NO: 9387 - RNA, 1710 nt, Artificial Sequence
  derived and/or modified CDS sequence (opt6) from LASV(Lassa virus/H.sapiens-wt/NGA/2016/ISTH_1306;Clade II)__AVO03624__NP
augagcgcaucaaaagaaguaaaaaguuuucuauggacccagagucuaagaagagaacuaucaggauauugcucaaacauuaaauuacaagugguaaaagaugcccaagcacucuugcacggacuagauuucucagaaguaagcaauguacaaagacuaaugagaaaacaaaaaagagacgacggagauuuaaaacgacuaagagaccuaaaucaagccguaaauaauuuaguagaacuaaaaucuacacaacaaaaauccauacuucgagucggaacccuuacuagcgaugaccuuuuaacauuagcagcagaucucgaaaaauuaaagagcaaaguaauacgaacagaacgaccauuaucaucagguguauauauggguaacuuaucaacacaacaacuagaacaaagacgcgcacuccuuaacaugauagggaugguaggcggagcacaaggaacccaaccagguagagauggaguaguaagagugugggauguaaaaaauccugacuuauuaaacaaccaauuuggcacaaugccuagucucacacuagcauguuuaacuaaacaaggacaaguagauuuaaacgaugcaguacuagcacuaacggacuuaggcuuaaucuauacagcaaaauacccaaacucaucugaucuagauagauuaagucaaucacauccuaucuuaaacaugguagauacaaaaaaaucuagccuaaacauuucaggauacaacuucucacuaggagcagcagucaaagcaggagccuguaugcuggacggaggaaauaugcuagaaacaauaaaaguaacuccacaaacaauggaugguauauuaaaaucaauauuaaaaguaaaaaaaucacuuggaauguucguaagugauacgccaggagaacgaaauccuuaugaaaauauacuauauaaaauaugucuaucaggagauggauggcccuauauagcaaguagaaccucaauaguaggaagagcaugggaaaauacuacugucgauuuagaaucagauggaaaaccacaaaaaguaggcacagcaggaucaaacaaaucacugcaaucagcgggauuuccaaccggauuaacauauucacaauuaaugacuuuaaaagauucaaugaugcaguuagacccaucagcuaaaacauggauagauauagaaggcagaccagaagacccaguagaaauugcuuuauaccaaccaaugucaggaugcuacauacacuuuuucagagaaccuacagaccuuaaacaauucaaacaagaugcuaaauauucccauggaauagauguagcugauuuauuuccagcccaaccuggucuuacaagcgccguaauagaagcacuaccaagaaauaugguacuaacaugccaaggaagcgaugauauaaaacgauuauuagacagccaaggaagaagagauauaaaauuaauagauauagcauuaagcaaagcagacucaagaagauuugaaaacgcaguaugggaucaaugcaaagauuuaugccauaugcauacaggaguaguaguagaaaaaaaaaaaagaggaggcaaagaagaaauaaccccccauugcgcccuuauggacugcauaauguaugacgcagcaguaaguggaggacuaaauaucccaguacuaagagccguacuaccacgggauaugguauuucgaacaaguucaccaaaaguaguauuauaa

SEQ ID NO: 9388 - RNA, 1710 nt, Artificial Sequence
  derived and/or modified CDS sequence (opt6) from LASV(Lassa virus/H.sapiens-wt/NGA/2016/ISTH_1311;Clade II)__AVO03576__NP
augagcgcaagcaaagaaguaaaaaguuuuuuauggacccaaucacuacguagagaauuaucaggauacuguagcaacaucaaauuacaaguaguaaaggacgcacaagcauuacuacauggucuagauuuuagugagguaucuaauguacaacgacuaaugagaaaacaaaaaagagacgacggcgaucuaaaaagauuaagagaucuaaaccaagcuguuaauaauuuaguagaacucaaaucaacacaacaaaaaucaguauuaagaguaggaacacuaacuucagacgaucuuuuaauccuugcagcagaccuagaaaaauuaaaaagcaaaguuauaaggacugaaagaccacuaucaucaggagucuauaugggaaaucuuucaacccaacaacuagaacaaagaagggcauugcuaucaaugauaggaaugguaggaggugcacaagggacacaaccaggaagagacggaguaguaagagucugggacgucaaaaacccagauuuacuaaauaaucaauucggaacaaugcccucacuaacucuggccugucuaacaaaacaaggacaaguagaccuuaacgacgcaguucuagcccuaacagaccucggacuaauauauacaguaaaauaucccaauagcagugacuuagaccgauuaucacaaucacauccaauacuaaauaugguagacaccaaaaaauccucauuaaacauaagcggcuauaauuuuucacuaggcgcagcagucaaagcaggcgcuuguauguuagacggaggaaauauguuagaaacaaucaaaguaacaccacaaacaauagauggaauuuuaaaaucuauccuaaaaguaaaaaggaguuuaggaauguucguaagugacacaccaggagaaagaaacccauaugaaaacauacuauacaaaauaugucuuaguggagacggauggccauauauagcaagucgcaccucaauaguaggacgagcaugggaaaauacaacaguagaccuugaauccgacggcaaaccccaaaaaguaggagcagcaggaaguaauaaaagcuuacaaagugcaggauuuccaacaggauuaacuuauucccaauuaaugacacuuaaagacucaaugaugcaacuagacccaucagcaaaaacauggauagauauagaaggaaggccagaagauccaguagaaauagcauuauaucagccaaugucaggauguuauauacauuuuuuucgugaaccaacagauuuaaaacaauuuaaacaagaugcuaaauacagucauggaauugacguaacugauuuauuuucagcacaaccuggucuuacaagcgcaguaauagaagcauuaccacgaaacaugguacucacaugccaagguuccgacgacauaaaaaaacuacuagauucacaagguagacgagacauaaaauuaauagauauaucacuaaauaaaacugacagcagaagauuugaaaaugcuguaugggaccaaugcaaagacuuaugccauaugcacacagguguuguuguagaaaaaaaaaagagaggugggaaagaagaaauaacaccacauugugcauuaauggauuguauaauguuugacgcagcaguaucaggaggauuaaacauaccaauauuaagagcaguacuaccccgagauaugguuuuccgaacaagcaguccuaaagucguacuauaa

SEQ ID NO: 9389 - RNA, 1710 nt, Artificial Sequence
  derived and/or modified CDS sequence (opt6) from LASV(Lassa virus/H.sapiens-wt/NGA/2016/ISTH_1423;Clade II)__AVO03578__NP
augagugcaucaaaagagguaaaaaguuucuuguggacucaauccuuacgaagagaacuaucagguuauuguucgaacaucaaacuacaagucguaaaagacgcgcaagcacuauuacacggacuagacuucagugaaguaucaaacguacaaagauugaugagaaaacaaaaaagagacgacagcgacuuaaaaagauuacgagaccuaaaccaagcaguaaacaaccuaguggaacuuaaaucaacccaacaaaaaucaauacuaagaguaggaacguuaacaagugaugacuuauuaacauuagcugcagaccuagaaaaauuaaagucaaaaguaauacgaaccgaacgaccacuaucaucuggcgucuauaugggaaacuuaaguacacaacaacuagaacaaaggagagcauuauuaaauaugauaggaaugguaagcggaacccaaggaacacaaccaggacgugauggaguagucagaguaugggauguaaaaaauccagauuuacuaaauaaucaauucgguacaaugccgagccuaacauuagcaugcuuaaccaaacaaggacaaguagacuuaaaugaugccguauuagcacuaacagaccucgguuuaauauacacagccaaauauccaaauaguucagaccuagaucgacuuagucaaucgcauccaauccuaaacaugguugacacuaaaaaaucaucacuuaacauuucaggauacaauuuuaguuuaggugcugcaguaaaagcaggcgcauguauguuagauggaggcaacaugcuagaaacaauaaaagucacaccacaaaccauggacggaauacugaaauccauauuaaaaguaaaaaaaucauuaggcauguucguaagcgacacgccuggagaaaggaauccauaugaaaauauucuauauaaaauaugcuuaaguggagacggauggcccuacauagcaaguagaacaucaauaguuggaagagcaugggaaaauacaacaguugaucucgaaucagacggaaaaccccaaaaaaugggcacagccgggucuaauaaaucccuacaaucugcaggauuuccuacaggacuaacauacucacaauuaaugacauuaaaagauagcaugaugcaauuagauccaucagcaaaaacauggauagauauagaaggaagaccagaagacccaguagaaauugcacuauaucaaccuaugucaggaugcuacauacacuuuuucagagaaccaacagauuuaaaacaauuuaaacaagaugcaaaauacucacauggaauagacgucgcugacuuauuuccagcacaaccaggauuaacaagugcaguaaucgaagcucuaccaagaaauaugguccuuacaugucaaggaagugaugacauaaaaaaauuauuagacagccaaggaagaagagacauaaagcuuaucgauaucgcauuaaguaaagcagacagccgaagauucgaaaaugcuguaugggaucaaugcaaagacuuaugccauaugcauacaggaguaguuguagaaaaaaaaaaaagaggaggcaaagaagaaauaacuccacacugugcacuaauggauuguauaauguaugaugcagccguaagcggaggcuuaaacauuccuguacuaagagcaguuuuaccucgagacaugguauucagaacaucaaaucccaaagugguauuauaa

SEQ ID NO: 9390 - RNA, 1710 nt, Artificial Sequence
  derived and/or modified CDS sequence (opt6) from LASV(Lassa virus/H.sapiens-wt/NGA/2016/ISTH_1472;Clade II)__AVO03606__NP
augagcgcaaguaaagaaguuaaaaguuuccuuuggacucaaucacuaagaagagaacuaucuggguacugcuccaacauuaaacuacaaguaguaaaggaugcacaagcguuacuacauggacuagacuucucagaaguauccaauguacaaagauuaaugaggaaacaaaaaagagacgauucagaccuaaaaagauuaagagaucuaaaucaagcaguaaacaauuuaguagaacuuaaaaguacacaacaaaaaucaauuuuacgaguaggaaccuuaacgucagaugauuuauuaaccuuagcagcagauuuagaaaaacuaaaaucaaaaguuauacgaacagaaagaccucuaucauccggaguguauaugggaaaccuaucaacacaacaacuagaacaaagaagagcccuacuuaacaugauaggaaugguaggggguauacaaggaacacaaccuggaagggauggaguaguaagagugugggacguaaaaaacccagaccuccuaaauaaccaauucggaacaaugccaagccuaacacuagcauguuuaacaaaacaaggucaagucgauuuaaacgauacaguacaagcacuuaccgauuuaggauuaauuuauacagcaaaauauccaaauucaucagacuuagaccgacuaagccaaagccauccuauauuaaacaugguagauacaaaaaaaucaucacuaaacauaucaggauauaauuucucauuaggagcggcaguaaaagcaggagcaugcauguuagacggaggaaauauguuagaaacaauaaaaguaacgccacaaacaauggacggaauacuaaaaucaaucuuaaaaguaaaaaaaagcuuaggaauguucguaucagacacgccuggagaaagaaacccguacgaaaauauucuauacaaaauaugcuuaucaggagacggauggcccuauauagccaguagaaccucaauaguaggaagagcaugggaaaacacaaccguagaccuggaaucagacgguaaaccgcaaaaagucggaaccgcagguucuaauaaaaguuuacaaucagcaggauucccaacaggacuaacauauagucaacuaaugacucuuaaagacaguaugaugcaacuggacccaucagcaaaaacauggauagacauagaaggcagaccugaagacccaguagaaauagcacuuuaucagccaaugucaggauguuauauacacuuuuucagagaaccaacagauuuaaaacaauuuaaacaagacgcaaaauacucacauggcaucgauguagcagauuuauucccagcucaaccaggacucacaucagcgguaauagaagcauuaccacgaaacaugguuuuaacaugucaaggaucagaugauauaaaaagacuacuagauucacaaggaagacgcgacauaaaauuaauagauauaagucuaagcaaaacugacucaagaagauucgaaaacgcaguuugggaccaauguaaagaccuaugccacaugcauaccggaguaguagucgaaaaaaaaaaaagaggcggaaaagaagaaauaacaccacacugcgcucuuauggacuguauaauguaugaugcagcaguuuccggcggauuaaacauaccaguauuaagagcaguacugccacgagacaugguauuccgaacaaguaguccaaaaguaguacuauaa

SEQ ID NO: 9391 - RNA, 1710 nt, Artificial Sequence
  derived and/or modified CDS sequence (opt6) from LASV(Lassa virus/H.sapiens-wt/NGA/2016/ISTH_1474;Clade II)__AVO03614__NP
augucagcaaguaaagaaguaaaaucuuuccuauggacacaaagccuaagaagagaauuaucaggauauuguaguaacauaaaacuucaaguaguuaaagacgcacaagcacuacuacacggacuagauuucagugaaguaagcaauguacaaagauuaaugcgaaaacagaaaagagacgauagcgaucucaaaagacucagagaucuaaaucaagcuguaaacaaucuagucgaauuaaaaucaacacaacaaaaaucaauacuaagaguuggcacauuaacaucugacgaccuauuaacauuagcagccgauuuagaaaaacuaaaaagcaaaguaaucagaacagaaagaccuuuaucaucagggguuuacaugggaaauuuaucuacccaacaacuagagcaaagacgagcauuauuaaacaugaucggaauggugggcggaauacaaggaacacagccaggaagagauggaguuguaagaguaugggauguuaaaaacccggaucuucuaaacaaucaauuuggaacaaugccaucacuuacguuagcauguuuaaccaaacaaggacaaguagacuuaaacgauacuguacaagcacuaacagauuuaggcuuaaucuauacagcaaaauacccaaauucaagcgaccuugauagacuaucccaaucucauccuauacuaaauaugguagauacaaagaaaagcaguuuaaacauaucaggauacaauuuuucauuaggagcagcuguaaaagccggagcauguaugcuagacgggggaaauaugcuugaaaccauaaaagucacaccacaaaccauggacggaauacuuaaauccauauuaaaaguaaaaagaucacuaggaauguucguaucagauacaccaggcgaaagaaauccauaugaaaacauuuuauauaaaauaugccuuucaggggauggauggccauacaucgcaucuagaacaucaaucguuggcagagcuugggaaaauacaacaguagaccuugaaagcgacggaaaaccacaaaaaguaggaacagccggauccaauaaaagucuacaaagugcaggauucccaacaggacuuacauauucacaauuaaugacccuaaaagacucaaugaugcaacuagacccuagugcaaaaacauggauagauauagaaggcagaccagaagacccuguagaaauagcauuauaucagccaaugucagguuguuauauccacuuuuucagagaaccuacagauuuaaaacaauuuaaacaagacgcaaaauauagucacggaauagacguugcagauuuauucccagcacaacccggacuaacuagcgccguaauagaagcguuaccacgaaacaugguucuaacaugucaaggauccgaugacauaaaaaggcuauuagacucacaaggacgaagagauauaaaacuuauagauaucgcguuaucuaaagcagacuccagaagauucgaaaacgcaguaugggaucaauguaaagaccuuugccauaugcauacaggaguaguaguugaaaagaagaaaagagguggaaaagaagaaauaacaccacacugugcgcucauggauuguauuauguacgacgcugcaguauccggaggcuuaaacaucccaguauuacgagcaguacuaccaagagacaugguauuuagaaccaguagccccaaaguuguacuauaa

SEQ ID NO: 9392 - RNA, 1710 nt, Artificial Sequence
  derived and/or modified CDS sequence (opt6) from LASV(Lassa virus/H.sapiens-wt/NGA/2016/ISTH_1496;Clade II)__AVO03580__NP
augucagcaagcaaagaaguaaaaucauuuuuauggacacaaucacuaagaagagaauuaucaggauacugcucaaauauuaaacuucaaguaguaaaagaugcacaagcauuacuucacggauuagauuucagcgaaguaaguaauguucaaagguuaaugagaaaacagaaaagggacgauagcgacuuaaaaagacuaagagauuuaaaucaagcaguaaauaacuuaguagaauuaaaaucaacacaacaaaaaucaauucuuaaaguaggcacucuaacaucggacgacuuacuaacgcuugccgcagauuuagaaaaacuaaaaucaaaaguaauacguaccgaaagaccacuauccuccggagucuacaugggaaaccuaucaacacaacaacuggaacaacgacgagcauuacuuaacaugaucggaauggucggaggagcccaaggaacacaaccaggaagggacggcguugugaggguaugggauguuaaaaauccagacuuacuaaauaaucaauuugguacaaugcccucacuaacccuagcuugccuaacaaaacaaggucaaguagaccuuaaugaugcaguacuagcccuaacagacuuagguuuaauauauacugcaaaauauccaaacucaucugauuuagaucgauuaucucaaucacauccuaucuuaaauaugguagauacaaagaaaucuagcuuaaauauaucaggauacaacuucucacuaggagcagcuguaaaagcaggcgcauguauguuagauggugguaauauguuagaaacuauaaaaguuacaccacaaacaauggauggaauacuuaaaucaauauuaaaaguaaaacgaucacuaggaauguuuguuucggauacaccaggagaacguaacccauaugaaaauauacuauacaaaauaugccuaaguggcgauggauggccguacauagccucaagaacaucaauagucggcagagcaugggaaaauacaacaguagaucucgaaucagauggaaaaccacaaaaaguaggaacaaucggaucuaauaaaucacuacaauccgcaggauucccaacaggacuaacauauucacaacuaaugacauuaaaggauucaaugaugcaauuagauccaagcgccaaaacguggauagacauagaaggaaggccagaagauccaguagaaauagcacuauaccaaccuaugucaggaugcuacauucauuucuuuagagaaccuacagaucuaaaacaguucaaacaagacgcuaaauauucacacggaauagauguagcggauuuauucccagcucaaccaggacuaacuucugcaguaauagaagccuuaccaagaaacaugguacuaacaugucaaggaagcgaugauauaaaaagacuauuagacagucaaggaagacgagauauaaaauuaauagauauugcacuaucaaaagcugauuccagaagauucgaaaacgcagugugggaccaaugcaaagaucuuugucauaugcacacaggaguaguuguagaaaagaagaaaagaggaggaaaagaagaaauaaccccacauugcgccuuaauggauugcaucauguaugacgcagcaguaucaggaggauuaaacauacccguacuacgagcaguacuaccucgcgacaugguauucagaacuucaaguccaaaaguaguauuauaa

SEQ ID NO: 9393 - RNA, 1710 nt, Artificial Sequence
  derived and/or modified CDS sequence (opt6) from LASV(Lassa virus/H.sapiens-wt/NGA/2016/ISTH_1541;Clade II)__AVO03554__NP
augagcgcaucuaaagaaguaaaauccuuucuauggacacaaucccuacguagagaacugucuggauauuguagcaauaucaaauuacaaguaguaaaagacgcacaagcauuauuacauggacuagauuucuccgaagugucaaauguucaaagacuuaugcguaaacaaaaaagagacgauggagauuuaaaacgauuaagagaucuuaaucaagcaguaaacaacuuaguagaacuaaaaucaacucaacaaaaaucuauauuaaggguaggaacccuaucuucagacgacuuauuaauacuagcagcagaucuagaaaaacuaaaaaguaaaguaauaagaacagaaagaccuuuaaguagcggcguauacaugggaaaccuaucaagucaacaacuggaccaacguagagcuuuauuaaauaugaucggaaugacaggcgguaaucaaggagcaucaacaggaagagauggcauagugcgaguaugggauguaaaaaacgcagaauuacucaacaaccaauucggaacaaugcccucacuaacacuagccugccuaacaaaacaaggacaaguugaccuaaaugaugcaguacaagcauuaacagaucugggacuuauauauaccgcuaaauauccaaauucaagcgacuuagacagauuaucacaaucacacccaauauuaaacaugaucgauacaaaaaaaagcucauuaaacauaaguggauacaacuucucacuaggagcagccguuaaggcaggugcauguauguuagaugguggcaauauguuagaaaccauaaaaguaucuccacaaacaauggauggaauauuaaaaaguauacuaaaaguaaaaaaaucacuagguauguucguaagugauacaccaggagaaagaaacccauacgaaaauauauuauacaaaauauguuuaucaggcgauggauggcccuauauagcuagcagaacaucaauaauagguagagcaugggaaaacacaauuguagauuuagaagcugacaacaaaccacaaaaaucaggaaauaacgguucaaacagaaguuuacaaagcgcaggauucccaagcggcuuaacauauagccaacuaaugacacuaaaagauuccauguuacaacuagauccaaaugcgaaaacauggauggacauagaaggacgccccgacgacccaguagaaauagcccuuuaucaaccaucaaguggauguuacauucacuuuuuuagagaacccacagauuuaaaacaauucaagcaagacgcuaaauauucacauggcaucgaugucagugauuuauucgcagcacaaccuggacucaccagugcaguaauagaagcacuaccaagaaacauggucauaacaugucaagguucagaagauauaaaaaaacuguuagaaucacaaggaagaaaagauauaaaauuaguagacauaaguuuaucaaaauuagacucaagaaaauucgaaaacguaguaugggaccaauauaaagacuuaugucacaugcauacgggaauagucguagagaaaaaaaaaagaggcgguaaagaggaaauaacaccacacugugcacuaauggacugcauuauguuugacgcugcaguaaugggagguuuagacgcaagaguacuaagagcaguuuuaccaagggacaugguauucagaacaagcacaccuaaaguaguacuauaa

SEQ ID NO: 9394 - RNA, 1710 nt, Artificial Sequence
  derived and/or modified CDS sequence (opt6) from LASV(Lassa virus/H.sapiens-wt/NGA/2016/ISTH_1546;Clade II)__AVO03538__NP
augagcgcaucaaaagaaguuaaaucauucuuauggacucaaucacuaagaagagagcucucgggcuauugcaguaauauaaaacuacaaguagucaaagacgcgcaagccuuacuacacggauuagauuucuccgaagucaguaacguccaaagauuaaugagaaaacagaaaagagacgauggagauuuaaaaagacuaagagaucuaaaucaagcaguaaauaacuuaguagaacuaaaaucaacacaacaaaaaucuguuuuaagaguuggaacucuaucaagugaugacuuauuaauacuagcagcagauuuagaaaaauuaaaaucuaaaguaaucagaacagaaagaccccuaucuagcggaguauacaugggaaaccucuccucucaacaacuagaucaacgaagagcuuuacuaaauaugauagguaugacaggaggaaaucaaggaacaaacgccgguagagacgguauaguaagaauaugggacguaaaaaacgcagaauuauuaaacaaucaauucggaacaaugccaaguuuaacacuagcaugcuuaacaaaacaaggacaaguagauuuaaaugacguaguucaagcccuaacagacuuaggccuaaucuacacagcaaaauaccccaacucaucagaucuagacagacuaucacaaucacacccaauacucaauaugauugauacaaaaaaauccagcuuaaauauaucagguuacaacuucucacuaggcgcagcaguaaaagcaggagcaugcaugcuagauggaggaaauaugcuagaaacuaucaaagucucaccacaaacuauggacggaauauuaaaaucaauuuuaaaaguaaaacgauccuuaggcauguucguaagugauacacccggugaaagaaacccauaugaaaauauacuauacaagauaugcuuaaguggagauggauggccauacaucgcaaguagaacaucaauaauaggcagggcaugggaaaacacaauaguagaccuagaaaccaauaacaaaccacaaaaaccgggaaacaacggauccaauagaucacuacaaucugcaggcuuucccgcaggacuaacauauagucaauuaaugacauuaaaagauaguaugcuacaacuugauccaaacgcaaaaacauggauggauauagaaggccgacccgacgacccaguagaaauagcacucuaucaaccaucuucaggauguuacauacauuucuucagagaaccuacagauuuaaaacaauuuaaacaagacgcaaaauauucacauggaauagacuuaucagaucuauucgcagcacaaccgggacuaacauccgcugucauugaagcacuaccaagaaacaugguaauaacaugucaaggaagcgaagacauaaugaaacuauuagaaucccaaggaagaaaagacauuaaacuagucgauaucucucuaucaaaaagugacucaagaaaauuugaaaaugcuguaugggaccaauauaaagaccuaugucacaugcauacaggcauaguaguagaaaaaaaaaaaaaaggcggcaaagaagaaauaacaccacacugugcccuaauggauuguauaauguucgacgccgcaguaaugggcggacuagacgcaaaaguccucagagcaguucucccaaaagacaugguauuucgaacaaguacaccaaaaguaguauuauaa

SEQ ID NO: 9395 - RNA, 1710 nt, Artificial Sequence
  derived and/or modified CDS sequence (opt6) from LASV(Lassa virus/H.sapiens-wt/NGA/2016/ISTH_1568;Clade II)__AVO03562__NP
augucagcuucaaaagaaguaaaaucauucuuauggacucaaagucucagacgagaacuaucaggauacuguucaucaauaaaauuacaagucguaaaagacgcacaagcauuacuacacggauuagauuucucagaaguuucaaauguucaaagauuaaugaggaaacaaaaaagagacgacucagaccuaaaaagauuaagagacuuaaaucaagcaguaaauaaucuaguagaacuaaaaagcacacaacaaaaaagcaucuuaagaguaggaacccuaacaagcgaugaccuacuaacacuugcagcagaucuagaaaaacuaaaaucaaaaguaaucagaacagaacgaccauuaaguuccggaguauacauggguaaccugaguagccaacaauuagaacaacgaagagcacuacuaaauaugauaggaaugguaggcggugcacaaggaacccaaccuggcagagauggaguaguuaggguuugggauguuaaaaauccugauuuacuaaauaaucaauucggaaccaugccaagucuaacacuugcaugccuaacaaagcaaggucaaguagacuuaaacgaugcaguuuuagcuuuaacugaucuuggacuaauauauacagcaaaauauccaaacagcucggacuuagauaggcuaucacaaucacacccaauucuaaauaugguagauacuaaaaaaaguagcuuaaacauaucugguuacaauuuuucccuaggagcagcaguaaaagcaggagcaugcauguuagacggaggaaauaugcuugaaacaauaaaaguaacaccucaaacuauggacggaauauuaaaaucaauacuaaaagucaagaggagccuaggaauguuugucucagacacaccuggugaaagaaacccauaugaaaauauacuauauaaaauauguuuaucaggcgauggauggccuuauaucgcaagcagaacauccauaguaggccgagcaugggaaaauaccacaguagaucuagaaucagauggaaaaccacaaaaaguagggcccgcuggaucaaauaaaagucuacaaagugccggauucccaacaggauuaacauauucucaacuaaugacucuaaaagauucaaugaugcaacuagaucccucagcaaaaacauggauagauauagaagguagaccugaagauccaguagaaauagcguuauaucaacccauaucaggauguuacauccacuuuuucagagaaccaacagaucuaaaacaauuuaaacaagaugcaaaauauucccauggaauagacgucgcagaucuauucccagcacaaccagguuuaacuucagcaguaauagaagcauuaccaagaaacaugguacuaacuugccagggaagcgaugacauaaaaagauuauuagacucacaagguagaagagacauaaaauuaauagacauagcauuaaguaaagcagauucucgaagauuugaaaacgcuguaugggaccaaugcaaagaccuaugucacaugcauacuggagucguuguugaaaaaaaaaaaagaggaggaaaagaagaaauaacaccucacugugcguuaauggacuguaucauguaugacgcugcaguaucuggaggacuaaacauuccaguacuuagagcagugcugccacgagauaugguauuccggaccagcucaccuaaaguaguacuguaa

SEQ ID NO: 9396 - RNA, 1710 nt, Artificial Sequence
  derived and/or modified CDS sequence (opt6) from LASV(Lassa virus/H.sapiens-wt/NGA/2016/ISTH_1591;Clade II)__AVO03648__NP
augucagcgucaaaagaaguaaaaucauuucuauggacacaaucucuaagaagagaauuaucaggcuacugcaguuccauaaaacugcaaguuguuaaagaugcacaagcacuucuacacggacuagacuuuucugaaguuagcaauguacaacgauuaaugagaaaacaaaaaagagaugauuccgauuuaaaaagauuacgagauuuaaaucaagcaguaaauaauuuaguagaacuaaaauccacacaacaaaaaucaauacuaagaguaggaacccuaacaucagaugaccuacucacacuagccgcagauuuagaaaaauuaaaaucaaaaguaauaagaacagaacguccacuguccuccggaguauacaugggaaaccuuaguucacaacaauuagaacaaagacgagcacuauugaauaugauuggaaugguaggaggagcacaaggcacacaaccuggucgagaugguguaguaagaguaugggacguaaaaaaccccgacuuauuaaacaaccaauucggaaccaugccuucauuaacccuagcaugccuaacaaaacaaggacaaguagacuuaaaugaugcaguauuagcacuaaccgauuuaggacuaaucuauacugcaaaauauccaaauucaucagaccucgacagauuaucacaaucucauccaauauugaacauggucgauacaaaaaaaaguagucuaaacauuagcggauacaacuucagucuaggagcagcaguuaaagcaggagccuguauguuagauggaggaaacaugcuagaaacaauaaaaguaaccccccaaacaauggauggaauauuaaaauccauauuaaaaguaaaaagaucacuagggauguuuguauccgauacaccaggcgaaagaaauccauaugaaaacauauuauauaaaaucugucugaguggcgauggcuggccauauauagccaguagaacaagcauaguaggacgagcaugggaaaacacaacaguagaccuugaaagugacggaaaaccacaaaaaguaggaucagccgggaguaacaaaagccuccaauccgcaggauuuccaacuggacuaacuuauucucaauuaaugacauuaaaagacucaaugaugcaauuggacccuucagcaaaaacauggauagauauagaagguagaccagaagauccuguagaaauugcucuauaucaaccaaugucaggauguuauauacacuuuuucagagaacccacagaucuaaaacaauuuaaacaggaugcaaaauacagucauggaauagaugucgcagacuuauuuccugcccaaccaggacuuacaucggcaguaauagaagcacuaccuagaaacaugguauuaacuugccaagguagugacgacguaaaaagauuauuagacucacaagguagacgagauaucaaacuuauagauauugcauuaucaaaagcagauagucgacgauucgaaaacgcagugugggaucaguguaaagaccuaugucauaugcacaccggaguuguaguagaaaaaaaaaaaagaggugguaaagaagaaaucacaccacacugugcauuaauggacugcauuauguaugacgcagcaguuagcggaggauuaaauauaccaguauuaagagccguacuaccacgagauauggucuuuagaacaagcucaccaaaaguuguuuuauaa

SEQ ID NO: 9397 - RNA, 1710 nt, Artificial Sequence
  derived and/or modified CDS sequence (opt6) from LASV(Lassa virus/H.sapiens-wt/NGA/2016/ISTH_1604;Clade II)__AVO03542__NP
augucagcaagcaaagaaguaaaaagcuuccuauggacccaaagcuuaagaagagaacuaagcggauauugcaguaacauuaaacuacaaguaguuaaagaugcucaagcacuauugcauggacucgauuucucagaaguaaguaauguacaaagauuaaugagaaaacaaaaacgagacgacggagaucuaaaacgacuaagagaucugaaucaagcgguaaauaacuuaguugaacuaaaaagcacucaacaaaaaaguauauuacgaguagguacauuaucuucagaugacuuacuaacauuagcagcugauuuagaaaaauuaaaaucaaaaguaauaagaacagaaagaccacuuucaucaggagucuauaugggcaaccuaucaacacaacaacuagaucaaagaagagcgcuacuaaacaugaucggaaugguaggagguucacaaggaacaagcgcaggcagagacggaauugucagaguaugggauguuagaaaucccgaacuguuaaauaaccaauucggcacaaugccuaguuuaacacucgcauguuugacuaaacaaggucaaguagacuuaaacgaugcuguccaagcauugacugaccuaggauuaauauauacagcaaaauacccaaauucaagugauuuagauagguuaagucaaucacacccaauauuaaacaugaucgauacaaaaaaaucaucaauuaauauaagcggauauaacuuuagucuaggugcagcaguuaaagccggagcauguauguuagacggaggaaacaugcuugaaacuauaaaagucucaccacaaucaauggauggaauauuaaaaaguauauuaaaaguaaaaagaagccuaggaauguuugucucagauacaccaggagaaagaaauccauaugaaaauauauuguauaaaaucugucuuagcggugauggcuggccauacaucgccucaagaacaucaauaaccggcagagcaugggaaaauaccgucguugaucucgaaagcgacaauaaaccaaaaaaaccuggaaacaacgaaagcaauagaaguuuacaaagugccggauuuccugcaggacuuacauacucacaacuuaugacacucaaagacucaaugcuccaacuagauccaaaugcaaaaacauggauggauauagaagggagaccagacgacccaguagagauagcacuauaucaacccaacaguggaugcuauauacacuucuuuagagaaccaacagaucuaaaacaauuuaaacaagacgccaaauauucccacggaauugauauaagcgaucuauuugcagcgcaaccaggacuaacaucagcaguuauagaagcauuaccuagaaauauggucauaacaugucaaggaagcgaagauguaaaaaaauuacuagaaucacaaggacgaaaagacauaagacuaguagauauaagucuaucaaaagcagacuccagaaaauucgaaaaugcagucugggaccaauacaaagaucuaugucauaugcacacaggaaucgucguagaaaaaaaaaaaaaaggaggaaaagaagaaauuacaccgcauugcgcacuaauggauuguauaauguuugacgcagcuguuaugaacggccuagaugcuaggguacuaagggcuguacuaccaagagacaugguuuucagaacaucaacaccacgaguaguacuguaa

SEQ ID NO: 9398 - RNA, 1710 nt, Artificial Sequence
  derived and/or modified CDS sequence (opt6) from LASV(Lassa virus/H.sapiens-wt/NGA/2016/ISTH_1609;Clade II)__AVO03662__NP
augucagcgucaaaagaaguaaaaucuuuuuuauggacacaaucccuuagaagagaacuuagcggauacugcucaaauauaaaacuccaagucguaaaagacgcacaagcccuauuacacggauuagauuuuucagaaguaucaaauguacaaagacuaaugagaaaacagaaacgagaugacggagaucugaaacgacuuagagacuuaaaucaagcaguaaacaaccuagucgaacuaaaaucaacacaacaaaaaucaauauuaagaguaggcacauuaucaucugacgauuuacucauauuagcagcugaccuugaaaaacuaaaaucaaaagucauaagaacggaaagaccauuaaguucaggagucuauaugggaaaccuaaguucacaacaacuagaucaaaggagagcauuacuaaacaugauaggaaugacaggaggaaaccaaggcaccaacacaggaagagacggaauagucagagucugggacguaaaaaaugcugaacuacuaaauaaucaauuuggaacaaugccaaguuuaacauuagcaugccuuaccaaacaaggccaaguagacuuaaaugacgcaguacaagcacuaaccgaucuaggauuaaucuauacagcaaaauacccaaauaguucugacuuagacagguuaucacaaagucauccaauccuaaacaugauugacacaaaaaaaaguagcuuaaauauaucagguuauaauuucagucuaggagcagcaguaaaagcgggcgcauguaugcuagacggagguaauaugcuagaaacaauaaaagucucaccacaaaccauggauggaauauuaaaaucaauauuaaaaguuaaaaaaucauuaggaauguucguauccgacaccccaggugaaagaaacccauacgaaaauauauuauauaaaaucuguuuaucaggagauggauggccauacauagcuagcagaacaaguauaacuggaagagcaugggaaaacaccaugguagacuuagaaacaaauaacaagagucaaaaacccggaaauaacggaagcaacagaucauuacaaagugcaggauucccagccggauuaacauauagucaacuaaugacacucaaagacaguauguuacaauuagaccccaacgcuaaaacuuggauggauauagaagguagaccagacgacccuguagaaauagcacuauaccaaccaucauccggauguuacauacacuuuuuuagagaacccacagaucuaaaacaauucaaacaagacgcaaaauacagccacgguauagauaucucagaucuauucgcagcacaaccaggauuaaccagcgccguaauugaaguauuacccaggaauaugacaauaaccugccaaggaucagaagauauaaaaaaacucuuagaaucucaaggaaggaaagauauaaaacuugucgauauaagucuaucaaaacuugacucacgcaaauucgaaaacgccguaugggaccaauuuaaagacuuaugucauaugcacacaggaauaguaguugaaaaaaaaaaaaaaggaggaaaagaagaaauaacaccacacugugcucuaauggacugcauaauguuugacgcagcuguaauggguggauuagaugcaaaaguacuaagagcaguacuaccaagagacauggucuuucgaacaucaacaccaaaagucguacuuuaa

SEQ ID NO: 9399 - RNA, 1710 nt, Artificial Sequence
  derived and/or modified CDS sequence (opt6) from LASV(Lassa virus/H.sapiens-wt/NGA/2016/ISTH_1610;Clade II)__AVO03604__NP
augagcgcaagcaaagaaauaaaaucauuccuauggacacaaaguuuaagacgagaacuaucaggauacugcaguucaauaaaauuacaagucguaaaagaugcacaagcuuuauuacauggacuagauuuuagcgaaguaagcaacguacaaagauuaaugagaaaacaaaaaagagaugacagugaucucaaacgacuaagagaucucaaucaagcaguaaauaauuuaguagaacugaaaucaacccaacaaaaaaguaucuuacgagugggaacacuaacaagcgaugacuuauugacauuagcagcagaccuagaaaaacuaaaaucaaaaguuauaagaacagaacgaccacucucaucaggaguauauaugggaaauuuaucuacacaacaacuugaacaaagaagagcacuacuaaacaugaucggcaugguagggggagcucaagguacacaaccuggccgugaugguguaguaagaguaugggacguaaaaaacccagacuuauuaaacaaccaauucggaacaaugccaaguuuaacauuggcaugcuuaaccaaacaaggacaaguagacuuaaacgaugccguacuagcucuuacggacuuaggauuaauauauacagcuaaauauccaaacagcucagacuuagaccgauuaagucaaucccaucccauauuaaauaugguagauacaaaaaaaucaucauuaaacauaucaggauauaauuuuucacuaggagcagcuguaaaggcaggagcauguaugcuagacggcggaaauaugcuagaaacaauaaaaguaacaccacaaacaauggacgguaucuuaaaaucaauuuuaaaaguaaaaagauccuuaggaauguucguaagcgauacaccaggagaaagaaauccauaugaaaauauacuguauaaaauaugccuaucaggagaugguuggccauacauugcuagccgaacuucaauaguaggaagagcgugggaaaacaccacaguagacuuagaauccgacgguaaaccacagaaaguugguacagcuggaaguaauaaaucacuacaaagcgcaggauuccccacgggacuaacauauucacaacuaaugaccuuaaaagauucaaugaugcaauuagacccuucagcuaaaacauggauagauauugaaggaagaccggaagaucccguagaaauagcauuauaccaaccuaugaguggauguuacauucacuuuuuuagagaaccaacagauuuaaaacaauucaaacaagacgcaaaauacucacauggaauagacguagcugaccuauucccagcacagccaggauugacaucagcaguaauagaagcacuuccaagaaauaugguacuuacaugucaaggaucagaugacauaaaaaaauuauuagauucacaaggaagaagagacauuaaacuaauagauaucgcauuaucuaaaaccgauucaagacguuuugaaaacgccgucugggaccaauguaaagaccugugucauaugcacacaggaguuguaguagaaaaaaaaaaaagaggcgggaaagaagaaaucacaccacauugcgcacucauggacugcauaauguaugacgcagcaguaucaggaggauuaaauauaccaguccuaagggcaguauugccaagggauauggucuucagaacaaguagcccgaaaguagucuuauaa

SEQ ID NO: 9400 - RNA, 1710 nt, Artificial Sequence
  derived and/or modified CDS sequence (opt6) from LASV(Lassa virus/H.sapiens-wt/NGA/2018/ISTH_0541;Clade II)__AVV65114__NP
auguccgccaguaaagaaguaaaaucauuccucuggacacaauccuuaagaagagaacuaagcggauauugcucaucaaucaaacuacaagucguaaaagaugcacaagcucuccuucauggacuagauuucuccgaaguaucaaauguacaaagauuaaugagaaaacaaaaaagagacgauagugacuuaaaaagacuaagagaccuuaaucaagcagucaauaaucuagucgaacuaaaaagcacacaacaaaaaaguauacuuagagugggaacauuaacgucagacgaccuacuaacauuagcugcagaucuagaaaaauuaaaaaguaaaguuauaagaacagaaagaccauuaucaaguggcguuuacauggggaacuuaagcacacaacaauuagaacaacgacgagcacuacuaaauaugauaggaauggucggaggagcacaaggaacacaaccagggagagauggaguuguacgaguaugggauguaaaaaacccugacuuguuaaauaaccaauuugguacaaugccaaguuuaacuuuagcaugcuuaacuaaacaaggacaaguagaccuaaaugacgcaguuuuagcacuuacagacuuaggauuaauauauacagcaaaauaccccaacucaagugaucucgauagauuaagucaaagccauccaauauuaaacauggucgacacaaaaaaaaguaguuuaaacauuaguggcuauaauuucagucuaggagcagcuguaaaagcaggagcuuguauguuagacggaggaaauauguuagaaacaauaaaaguaacaccacaaacaauggacggcauauuaaagaguauacuaaaagucaaaagaaguuuaggcauguucguaucagauacaccaggagaaagaaacccauaugaaaauauauuauauaaaauaugccucaguggagacggauggcccuauauagcgucaagaacgaguauaguaggccgagccugggaaaauacaacaguagaccuagaaucagauggaaaaccacaaaaaguuggaguagcaggaucaaauaaaagcuuacaaagugcaggcuuuccaacaggacuaaccuacucacaauuaaugacuuuaaaagacuccaugaugcaacuagauccaucagcaaaaacauggauugauauagaaggaaggccagaagacccaguagaaauagcacuguaucaaccaaugagcggaugcuacauucacuuuuucagggaacccacagaucuaaaacaauuuaaacaagacgcuaaauuuagucaugguauagauguugccgacuuauuucccgcccaaccaggauuaacaucagcaguaauagaagcccuaccacgaaauaugguauuaacaugccaaggaucagaugacauaaaaagauuauuagacucacaaggcagacgggacauuaaacuaauagauaucgcuuuaucuaaagcagauagucgacgauucgaaaacgcuguaugggaucaaugcaaagaucuaugccauaugcauacaggaguaguaguagaaaaaaaaaaaagaggaggaaaagaagagauuacuccacacugcgcucuaauggauugcauaauguacgaugcagcaguuagcggaggacuuaacauaccaguacuaagagcaguuuuaccaagagauaugguuuuccgaacaucaagccccaaaguagucuuauaa

SEQ ID NO: 9401 - RNA, 1710 nt, Artificial Sequence
  derived and/or modified CDS sequence (opt6) from LASV(Lassa virus/H.sapiens-wt/NGA/2018/ISTH_0664;Clade II)__AVV65096__NP
augagcgcuagcaaagaaguaaaaucguuucuauggacgcaaagucuaagaagagaauuaucaggauacugcucuagcauaaaauuacaaguaguaaaagacgcccaagccuuacuacacggcuuagauuucuccgaaguuucaaacguucaaagauuaaugaggaaacagaaaagagacgauucagauuuaaaaagguuaagagauuuaaaccaagccguuaacaacuuagucgaacuuaaaaguacacaacaaaaaucaauauuacgaguagguacacuaacaagcgaugaccuauuaacauuagcagcagaucuagagaaacuaaaaucaaaaguaauaagaacagaacgaccauuauccagcgggguauauaugggaaauuuaucaacccaacaacuagaacaaagaagagccuuauuaaacaugauaggaaugguaggagggacacaaggaacacaaccuggaagagacggagucguaagaguuugggaugucaaaaauccagacuuacuaaauaaccaauuugguacaaugccaucacuaacacuagcuugcuuaacuaaacaaggacaaguugaccuuaaugaugcuguucuugcucuaacggacuuaggacuaaucuauacagcaaaauacccuaacucaucggaccuagacagauuaucacaaucacaccccauauuaaacaugguagauacaaaaaaaaguagcuuaaacauuucaggauauaauuucucacuuggagcagcugucaaagcaggagcuugcauguuggauggagguaacaugcuagaaacuauaaaagucacgccacaaacaauggauggaauuuuaaaaagcauccuaaaaguaaagaaaagcuuaggaauguuuguaucagauacaccuggagaaagaaacccauaugaaaauauacuauacaaaauaugucuaaguggagacggauggccauacauagcaucaagaacaucaauaguaggaagagcaugggaaaauaccacagucgauuuagaaccagacggcaaauuacaaaaaguaggaacaguaggaucaaacaagucauuacaaucugcuggauucccaacuggauuaaccuauucacaauuaaugacauuaaaagauucaaugaugcagcuugacccaucagcaaaaacauggauagauauagaagguagaccagaagacccagucgaaauagcauuauaucaacccaugucaggcuguuacauacauuucuucagagaaccaacagauuuaaaacaauuuaaacaagacgccaaauacucacauggaauagauguagcagauuuauucccggcacaaccaggacuaacuagcgcagucaucgaagcacuaccaagaaacaugguacuaacuugccaaggaucagaugacauaaaaagacuauuagacucacaagguagaagagauauuaaauuaauagauauaaguuuaucaaaagcagauucacgaagauucgaaaacgcaguaugggaccaauguaaagaucuaugccauaugcauacaggaguaguaguagaaaaaaaaaaaagaggagguaaagaagaaauaacaccacauugugcauuaauggauuguauaauguaugaugcagcaguuucaggaggacugaacauaccaguacuccgugccguauuaccacgagauaugguauuccgaacaaguaguccaaaaguuguccuauaa

SEQ ID NO: 9402 - RNA, 1710 nt, Artificial Sequence
  derived and/or modified CDS sequence (opt6) from LASV(Lassa virus/H.sapiens-wt/NGA/2018/ISTH_0959;Clade II)__AVV65100__NP
augagcgcaagcaaagaaguaaaauccuuucuuuggacacaguccuuaagaagagaacuaucagguuacuguucgaacauaaaauuacaaguuguaaaagacgcacaagcucuacuacauggucucgauuuuuccgaagucagcaauguacaaagauuaaugagaaaacaaaaaagggaugacucagacuugaaaagacuaagagauuuaaaccaagcaguaaauaacuuaguagaauuaaaaucaacacaacaaaaaucaauauuaagaguagguacucuaaccucagaugauuuauuaacacuagcggcagaccuagaaaaacuaaaaucaaaaguuauucgaacagaacgaccucuaucaucaggcguauacauggguaacuuaaguacucaacaacuagaacaaagaagagcauuacuaaauuuaauagguaugguaggaggugcacagggaacacaaccaggcagggacggaguuguaagaguaugggauguaaagaauccugauuuacuaaauaaucaauucggaacuaugccaucacuaacacuagccugccuaacaaaacaaggucaaguagacuuaaaugacgucguacuggcccuaacagaccuaggauuaaucuauacagcuaaauauccaaauucaucagacuuagacagacuaucacaaucucacccaauauuaaacaugguagauacaaaaaaauccagccuuaacauaucagguuucaauuuuaguuuaggagcagcuguaaaagcaggcgcaugcaugcuagacggagguaauauguuggaaacaauaaaaguaacuccccaaaccauggacggaauacuaaaaucaauauuaaaagugaaaaaaagccuagggauguuugucagcgauacuccaggagaaagaaauccauaugaaaauauucuauacaaaauauguuuaucaggcgacggcuggccauauauagcaucaagaacaucaauaguaggaagagcaugggaaaauacaaccguagaucuagaaagcgauggaaaaccacauaaaguagguacagccggaucaaacaaaucucuacaaucagcuggauuuccaacgggacuuacauacagccaacuaaugacacuuaaagacaguaugaugcaacuggaucccucugccaaaacauggauugacaucgaaggacguccagaagacccagucgaaaucgcacuauaucaaccgaugucuggauguuacauucauuuuuuuagggaaccaacggauuuaaaacaauuuaaacaagacgccaaauauucacauggaauagacgucgccgaccuauucccugcucaacccggauuaacaucggcuguaauugaagcguuaccacguaacaugguauuaacaugccaaggaagcgaugacauuaaaagguuauuagauagucaaggaagaaaagauauaaaauuaauagauauagcacuaucaaaaacggacucacgaagauucgaaaacgcuguaugggaccagugcaaagaucuaugucauaugcauacaggaguaguuguagaaaaaaaaaaaagaggaggaaaagaagaaauaacaccacacugugcuuuaauggauugcauuauguaugaugcagcaguauccgguggccuaaacauaccaguauuacgagcaguucuaccaagagauaugguauucagaacuucaucaccaaaaguaguacuauaa

SEQ ID NO: 9403 - RNA, 1710 nt, Artificial Sequence
  derived and/or modified CDS sequence (opt6) from LASV(Lassa virus/H.sapiens-wt/NGA/2018/ISTH_1024;Clade II)__AVV65106__NP
augagcgcuucuaaagaaguuaaaucauuccuauggacacaaucucuacgaagagaacuaaguggauauugcaguucaaucaaauuacaaguagucaaagacgcacaagcccuauugcauggccuagacuuuagugaaguaucuaacguacaaagauuaaugagaaaacaaaaacgagaugauagcgauuuaaaaagacuacgagauuuaaaucaagcaguaaauaauuuagucgaauuaaaaagcacacaacagaaaagcguccuaagaguaggaacucuaagcagcgaugaccuccuaacacuagcagcagaucuagaaaaauuaaaaagcaaagugauaagaacagaaagaccacuaaguuccggaguauacauggguaaccuaucaacacaacaauuagaacaaagacgugcucuauuaaauaugauaggaaugguuggaggcgcacaaggaacgcaaccgggcagagacggaguaguuagaguaugggaugucaaaaacccagacuuacuaaacaaccaauucggaacaaugccaucacuaacccuagcaugccuaacaaaacaaggucaaguagacuuaaaugaugccguacuggcauuaacagacuuaggacuaauauauacagcaaaauauccaaauucaucagauuuagaucgauuaucacaaagucauccaauacuaaacaugguugauaccaagaaaucgucuuuaaauaucucaggauacaauuuuucacuaggcgcagcaguaaaagcaggagcaugcaugcuagacggaggaaacaugcuggaaacaauaaaaguaacaccucaaacaauagacgguauacuaaaaagcaucuuaaaaguaaagaaaagucucggaauguucguaagcgauacaccaggagaaagaaauccauaugaaaauauacuauacaaaauaugucuaaguggagauggauggccuuauaucgccucacgaacaagcauaguaggacgugcaugggaaaauacaacaguagacuuagagucagauggcaaaccccaaaaaguaggaacagcuggcucaaauaaaucauuacaaucagcaggauucccaacaggauuaacauacucacaacuaaugaccuuaaaagacucuaugaugcaacuagauccaucagcaaaaaccuggauagauauagaaggaaggccagaagauccagucgaaauagcacuuuaucaaccaaugucaggaugcuacauacauuucuuuagagaaccaacagaucuaaaacaauucaaacaagaugcaaaauauucacauggaauagacguaguugauuuauucccagcacaaccaggcuuaacaagcgcaguaauagaagcacuaccaagaaacaugguauuaacaugucaaggaucagaugauauaaaaagacucuuagacagucaaggcagaagagauauaaaauuaaucgauauagcuuuaaguaaagccgacagcagaagauucgaaaacgcuguaugggaucaauguaaagaucuaugucauaugcauaccggagucguaguagagaaaaagaaaagaggaggaaaagaagaaauaacaccacauugcgcacugauggacugcauaauguacgacgcagcaguaucagguggacuaaauauaccuguauuaagagcuguacuaccuagagacaugguauuuagaacaagcuccccaaaaguaguauuauaa

SEQ ID NO: 9404 - RNA, 1710 nt, Artificial Sequence
  derived and/or modified CDS sequence (opt6) from LASV(Lassa virus/H.sapiens-wt/NGA/2018/ISTH_1079;Clade II)__AVV65108__NP
augucagcaucaaaagaaguaaaaaguuuccuauggacacaaucucugagaagagaauuauccggauauugcucuaacauaaaauuacaagucguaaaagacgcacaagcauuauuacacggacuugauuucagugaaguaucuaacguucaacgcuuaaugcgaaaacaaaaacgagaugauucggauuuaaaaagacuaagagaucuaaaucaagcaguuaauaaccuuguagaauuaaaaagcacacaacaaaaaucaauacuucgagucggaacgcuaacauccgaugaccuauuaacauuagcagcagaucuugaaaaauuaaaaucaaaaguaauaagaaccgaaagaccguuaucaaguggagucuauaugggaaauuuaagcacacaacaauuagaacaaagacgcgcacuacuaaauaugauaggaaugguuggaggcacacagggaacucaaccuggccgagacgguguaguaagaguaugggacguaaaaaauccagaccuacucaauaaucaauuuggaacuaugccaagucuuacacuagcaugcuuaaccaaacaaggacaaguugaccuaaacgaugcaguacuagcauuaacagauuuaggauuaauauacacagcaaaauacccaaauucaucagaccuagaucgauuaucacaaucacacccuauucuaaauaugguagauacaaaaaaaagcucacuaaauauaagcggauacaauuucagcuuaggagcugcaguuaaagcaggagcaugcauguuagacggaggaaacauguuagagacaauaaaaguaacuccacaaacaauggacggaauacuaaaaucaaucuuaaaaguaaagaaaucauuagguauguuugucagcgauacaccaggagaacgaaauccauacgaaaauauacuuuauaaaauaugccuauccggagauggcuggccauauauagcaagccgaacauccauaguaggaagagccugggaaaauacgacagucgaucuugaaagcgacggaaaaccccaaaaaguaggaacagcaggaucuaauaaaucacuacaaagugcaggauuuccaacaggacuaacuuauucacaacuuaugacauuaaaagacaguaugaugcaacuggacccuucugcaaaaacauggauagauauagaaggaagaccugaagauccaguagaaauagcacuauaucaaccaauaucaggauguuacauacacuuuuuccgagaaccaacagacuuaaaacaauuuaaacaagacgcuaaauauucacauggaauugacguagcagaccuauuucccgcacaaccaggacuaacaucugcaguaaucgaagcccuccccaggaacaugguacuaacaugucaaggaucagacgauauuaaaagacuauuagauucacaaggaagacgcgacauaaaauuaauagacauaucauuaucgaaagccgacucacgaagauucgaaaaugcaguaugggaccaauguaaagaucuuugucauaugcauacaggaguaguaguagaaaaaaaaaaaagaggcgguaaagaagagauaacaccacacugugcacucauggacugcauuauguaugacgcagccguaagcggcggacugaacauacccguauuaagagcaguauuaccaagagacaugguauuuagaaccagcucaccaaaaguaguauuauaa

SEQ ID NO: 9405 - RNA, 1710 nt, Artificial Sequence
  derived and/or modified CDS sequence (opt6) from LASV(Lassa virus/H.sapiens-wt/NGA/2018/ISTH_1375;Clade II)__AVV65116__NP
augucagcuaguaaagaaguaaaaaguuuccuauggacccaaucacucagaagagaauuauccggauauuguagcaacaucaaacuacaaguaguaaaggacgcucaagcacucuuacauggauuagacuucucagaaguaagcaacguacaaagauuaaugagaaaacaaaaaagagacgauagugaccuuaaaagauuaagagaccugaaccaagccguaaauaauuuaguggaauuaaaaucaacacaacaaaaaagcauccucagaguaggaacacuaacaagugaugaccuauuaauacuagcagccgaccuagaaaaauuaaaaucaaaaguaauacgcacagaacgaccuuugucuagcgguguuuacaugggaaaccuaucuacacaacaacucgaacaacgaagagcacuauuaaacuuaaucggaaugguugguggagcacaaggcacacaaccaggaagagacggaguugucagaguaugggauguaaaaaauccagacuuauuaaauaaucaauuuggaacaaugcccagccuaacauuagcaugccuuacaaaacaaggucaagucgacuuaaacgacgcaguacuagcacuaacagacuuaggcuuaauauauacagcaaaauacccaaauuccucugaccuagacagacucucacaaagccacccaauauugaacaugguagauacuaaaaaaucaucacuaaacaucucaggauucaauuucaguuuaggagccgcuguaaaagcaggggcuugcauguuagauggaggaaacaugcuagaaaccauacgaauaacuccccaaacaauggauggaaucuuaaaaucuauacuaaaaguaaaaaaaagccuuggaauguuuguaagcgauacuccaggagagagaaaucccuacgaaaauauauuauacaaaauaugucucucuggagaugguuggcccuauauagcuagcagaacuucuauaguuggcagagcaugggaaaauaccacagucgaucuagaaagcgauggcaaaccacauaaaguaggaacagcagguucaaauaaaucacuacaaucagcagguuuucccacaggccuaacauauucccaauuaaugacauuaaaagauaguaugaugcaauuagacccaucagcaaaaacauggauagauauagaaggcagaccagaagauccaguagaaauagcauuauaucaaccuaugaguggauguuauauacacuuuuuuagagaaccaacagacuuaaaacaauuuaaacaagacgcaaaauacucacauggaauagacguagcagauuuauuccccgcacaaccaggucucacauccgcuguaauagaagcccuaccaagaaacauggucuugacuugucaaggaucugaugauauaaaacgacuuuuagacucacaagguagacgagacauaaaauuaauagacauagcauuaucaaaagcugacucaagaagauucgaaaacgcagucugggaucaaugcaaagaucuaugucauaugcauacaggaguaguuguagaaaaaaaaaaacgaggaggaaaagaagaaauaacaccccauugugcacucauggauugcauaauguaugacgcagcaguaaguggugguuuaaauauaccaguacuuagagcaguacuaccuagagauauggucuuccgaaccaguucaccaaaaguaguauuauaa

SEQ ID NO: 9406 - RNA, 1710 nt, Artificial Sequence
  derived and/or modified CDS sequence (opt6) from LASV(Lassa virus/H.sapiens-wt/NGA/2018/ISTH_1381;Clade II)__AVV65112__NP
augucaguaucaaaagaagucaaaucauuucuauggacacaaagucuuagaagagaauuaucuggauauuguucaucuauaaaacuucaagucguuaaagaugcccaggcuuuauuacacggucuagauuucucagaagucaguaacguacaaagauuaaugagaaaacaaaaaagagaugauagugacuuaaaaagacuacgagaccuaaaucaagcaguaaauaacuuaguagaauuaaaaucaacacaacaaaaaaguauauuaagaguaggaacauuaacaucagaugaccugcuaacacuagcagcagacuuagaaaaacuuaaauccaaaguaauaagaacagaacgaccauuaucaucaggcguauauaugggcaauuuaucaacccaacaacuagaacaaagaagagcacuucuaaacaugauaggaauggccgguggcgcacaaggaacacaaccaggaagggauggaguaguccgaguuugggauguaaaaaacccagauuuacuaaauaaucaauucggaacaaugcccucacuaacuuuagcauguuuaacaaaacagggacaaguagacuuaaacgacgcaguacuagcucuaacagauuuaggacucauauauacagcaaaauauccaaauucuucagacuuagacaggcucucacaaagucaccccauccuaaauaugguagacacaaaaaaaaguagcuuaaacauauccggauauaauuucagcuuaggagccgcaguaaaagccggugcaugcaugcuggauggagguaauaugcuugaaacaauaaaaguaacuccacaaaccauggacgguauacuaaaaaguauuuugaaaguaaaaagaucacuuggaauguuuguaucagauacaccaggagaacgaaauccauaugaaaauauauuguauaaaauaugcuuaaguggagauggcuggccauauauagcaucaagaacauccauaguaggccgagcgugggaaaacacuaccguagaccuugaaagcgacgguaaaccacaaaaaauaggaaauacuggaucaaauaaaucacuacaaagcgcaggauuuccaacaggauuaaccuauagccaauuaaugacgcuaaaagacucuaugaugcaauuagauccuagcgcaaaaaccuggauagacauagagggaagacccgaagauccaguugaaauagcauuauaccaaccaaugaguggcugcuacauucacuuuuucagagaaccaacagaucuaaaacaauucaaacaagacgcaaaauacucccauggaauagacguagcagauuuauuuccugcacaaccaggcuuaacuagugcagugauagaagcuuuaccacgaaacaugguacucacaugccaaggcucugaugauauaaaaagauuauuagaaucacaaggaagaagagacauaaaacucauagacauagcauuaaguaaagccgauagcagaagauucgaaaacgcaguaugggaccaauguaaagaucuaugucacaugcauacaggagucguaguagaaaaaaaaaaaagaggaggaaaagaagaaauaacaccccacugcgcauuaauggauuguauuauguaugacgcagcaguaucuggagguuuaaacauaccaguauuaagagcaguacuaccccgagauaugguuuuuagaacaucaucaccaaaaguaguacuauaa

SEQ ID NO: 9407 - RNA, 1710 nt, Artificial Sequence
  derived and/or modified CDS sequence (opt6) from LASV(LASV003-NIG-2008;Clade II)__AIT17581__NP
augucagcaucaaaagaaguaaaaucuuuccucuggacacaaucacuaagaagagaauuaucaggcuauuguucuagcauaaaacuacaaguaguuaaagacgcacaagcacuauuacauggacuagauuucagugaaguaagcaauguccaaagauuaaugagaaaacaaaaaagagacgauucagacuuaaaaagauuacgagaucuaaaucaagcagucaauaaucuaguugagcuaaaaagcacacagcaaaaaucaguacuaagaguaggaacacugacgucagacgaccuacuaacacuagcagcagaucuugaaaaacuaaaaucaaaaguaauaagaacagaaagaccauuaaguucaggaguauauauggguaaccuaagcgcacaacaacuagaacaaagaagaacucuacucaacaugaucggaauggucgguggcgcacaaggaacacaaccaggaagagaugguguaguucgaguaugggacgucaaaaauccagacuuauuaaacaaccaauuuggaacaaugccuucacuaaccuuagcaugucuuacaaaacaaggacaaguagaucuaaacgauguuguacuagcacuaacagacuuagggcuaauauauacagcaaaauauccaaacucaucugauuuagaccgucucucucaaucacacccaauauuaaguaugguagacaccaaaaaauccucacuaaauauaucaggauauaacuucagucuaggagcagcaguaaaagccggagcauguaugcuagacggaggaaacauguuagaaacaauaaaaguaacaccucaaacaauggauggaauccuaaaaucaauauuaaaaguaaaaaaaaguuuaggaauguucguaucagauacacccggcgaacgaaacccauaugaaaauauacuauacaaaaucugucucaguggagaugguuggccauacauagcaucacgaacuucuauaguaggacgugcaugggaaaauaccacagucgaccuagaaagcgauggaaaaccacaaaaaguagguacugcuggaucaaauaaaaguuuacaaucagcaggcuuuccuacuggacuaacuuauagccaauuaaugacccuaaaagauucuaugaugcaauuagauccgagcgcaaaaaccuggauagauauagagggaagaccagaagacccaguagaaauagcucuauaccaaccaaugagcggauguuacauccauuuuuuuagagaaccaacagaccuaaaacaauuuaaacaagaugcaaaauauagccauggaauagauguaaccgaucuuuuuccagcccaaccaggcuuaacaucugcuguuaucgaagcuuuaccaagaaacaugguauuaaccugccaaggaucagacgacauaaaaagauuacuagauucacaaggacgcagagauauaaaacugauagacauagcacuuagcaaagccgauucucguagauucgaaaaugcaguaugggaccaauguaaagacuuaugccacaugcacacaggcguuguaguagaaaaaaaaaagcgaggagguaaagaagaaauaacaccccauugugcauuaauggacugcauuauguaugacgcggccguuagcggagguuuaaauauaccaguauuacgugcaguacuaccaagagacaugguuuucagaacaucaucaccaaaaguaguacuauaa

SEQ ID NO: 9408 - RNA, 1710 nt, Artificial Sequence
  derived and/or modified CDS sequence (opt6) from LASV(LASV035-NIG-2009;Clade II)__AIT17589__NP
augagugccaguaaagaaguaaaaucauucuuguggacacaaaguuuaagaagagaacuuucaggauacugcucaagcauaaaacuacaaguaguaaaagaugcacaagcacuacuacauggacuagacuucagugaaguaucaaacguacaaagauuaaugagaaaacagaaaagagaugacucagaucuaaaaagauuacgagauuugaaucaagcaguuaauaacuuaguugaauuaaaaaguacacaacaaaaaucgauacuacgaguaggaacucuaacaucagaugaccuuuuaacacuagcagcugauuuagaaaaauuaaaaucaaaaguaauaagaacagaaagaccauuaagcucaggaguauauaugggaaauuugagugcacaacaacuagaacaaagacgagcucuccuaaauaugauaggaaugguuggaggagcacaagguacacaaccaggaagagacggaguaguuaggguaugggaugucaaaaacccugaucuauuaaacaaccaauuuggcacaaugccaagucuaacucuagcaugccugacuaaacagggacaaguagacuuaaacgaugcaguauuagcucuaacagacuuagguuuaauauauacagcaaaauauccaaauaguucugauuuagacagacuaucccaaucacacccaauucucaacaugguagauacaaagaaauccagucugaauauuucaggauacaauuucaguuuaggagcagccguaaaagcaggagccuguauguuagacggugguaauaugcuagaaacaauaaaaguaacaccccaaacaauggacggaauacuuaaaucaauauugaaaguaaaaagaucauuaggaauguuuguaagcgauaccccaggagaaagaaauccguaugaaaauauacuuuauaaaauaugucuaucaggagacggauggcccuauauagcaucaagaaccucaauagucggcagagcaugggaaaacacuacaguugauuuagaaucagauggaaaaccacaaaaaguaggaacaacaggaucaaacaaaucacuacaaucagcaggauucccuacaggucugacauacucccaacuuaugacauuaaaagacucaaugaugcaacuggauccaucagcuaaaacauggauagauauagaaggcagaccagaggacccgguagaaauagcucuauaucaaccaaugucagguuguuacauucacuucuucagagaaccaacagaucuaaaacaauucaaacaagacgccaaauauucacauggaauagauguagcagauuuauuuccagcacaacccggauuaacaagcgcugucauagaagcucucccaagaaacaugguauuaacaugucaaggcagcgaugauauuaagaaauuacuagacucacaaggacgaagagacauaaaacuaauagauauagcauugaguaaagccgauucaagaaaauuugaaaaugcaguaugggaucaauguaaagaucuaugucauaugcacacuggaguugugguugaaaagaagaaaagagguggaaaagaagaaauaacaccacauugugcauuaauggauugcauuauguaugacgcugcaguaucaggaggacuaaacauaccaguccuuagagcaguacucccaagagauaugguauuuagaacuucaucaccaaaaguaguauuauaa

SEQ ID NO: 9409 - RNA, 1710 nt, Artificial Sequence
  derived and/or modified CDS sequence (opt6) from LASV(LASV042-NIG-2009;Clade II)__AIT17593__NP
augagcgcguccaaagaaguuaaaucauuucucuggacacaaaguuuacgaagagaauuaucaggauacugcucauccauaaaauuacaaguaguaaaagacgcucaagcauuauuacacggauuagauuuuagcgaaguaucaaauguacaaagacuuaugcgaaaacagaaaagagacgacggagaucuuaaaagauuaagagaucuaaaccaagcuguaaauaacuuaguugaacuaaaaaguacacaacaaaaaucuauucugagaguuggaacauuaacaagugaugaccuauuaacacucgcagcugaucuagaaaaacuaaaaaguaaaguaauacgcacagaaagaccauuaucaucaggaguuuauaugggaaaucuaagcucacaacaacuagaacaacguagagcauuacuaaacaugauugguaugguaggaggagcacaaggaacacaaccaggaagagauggaguaguaagaguaugggaugucaaaaauccugaucuucuaaauaaucaauuuggcacaaugccaucucuaacucucgcaugccuaacaaagcaaggucaaguagacuuaaaugaugccguacuagcgcuaacagacuuaggauuaaucuacacagcaaaauacccgaauaguucagaccucgaucguuuaucacaaucacacccgauacuuaacaugguagauacaaagaaaucaucacuaaauauaaguggauacaauuucucacuaggagcagcaguaaaagcaggcgcauguauguuagacggaggaaacauguuagaaaccauaaaaguaacaccacaaacaauggauggaauacuaaaaaguauacuaaaaguaaaaagaagccuaggaauguucguaagcgauacacccggagaaagaaauccauacgaaaauauacuauacaaaauaugucuaaguggcgauggauggccauauauagccucaagaacaucaauuguuggcagagccugggaaaauacuacaguagaccuagaaagcgauggaaaaccccaaaaagugggagcugcgggaucaacaaaaucuuuacaaucagcuggguuuccaacaggacuuacauauagucaauuaaugacacuaaaagauuccaugaugcagcucgaccccucagccaaaacguggauagacauugaagggagaccugaagauccaguagaaauagcauuauaucaaccaaugaguggauguuacauacauuucuuuagggaaccaacagacuuaaaacaauucaaacaagaugcgaaauacagucauggaauagauguagcugaucuauuucccgcacaaccuggacuaacaagugcuguuauagaagcauuaccaagaaauauggugcuaacaugucaagguuccgaugauauaaaaagacuauuagauucucaaggccgaagagacauaaaauuaauugacauagcauuaucuaaaguagacucaagaagauucgaaaaugcuguaugggaccaaugcaaagaccuaugccauaugcacacaggaguaguuguagagaaaaagaaacgaggaggaaaagaagaaaucacaccacacugcgcauuaauggacugcauaauguaugacgcagcaguuucagguggacuaaauauaccaguauuaagagcuguauuaccgagagauaugguguuuagaacaaguucaccaaaagucguacuauaa

SEQ ID NO: 9410 - RNA, 1710 nt, Artificial Sequence
  derived and/or modified CDS sequence (opt6) from LASV(LASV049-NIG-2009;Clade II)__AIT17605__NP
augucagcaaguaaagaaguaaaaucuuucuuauggacccaaucauuaagacgagaauuaagcgguuacugcucaagcauaaaauugcaaguagucaaagaugcgcaagcacuauuacauggccuagacuucagugaaguuaguaauguacaaagacuaaugagaaaacaaaaaagagacgauucugaucuaaaaagacuaagagaucugaaccaagcagucaauaaccuaguagaacuaaaaaguacccaacaaaaaucaauauuacgaguuggaacccuaacaagugaugauuuacuaacacuagcagcggacuuagaaaaauuaaaaagcaaaguaauaagaacagaacgaccacuaucauccggaguauacaugggaaaucuaucaacccaacaauuagaacaaagaagagcacuauuaaacaugauaggaauggcaggaggagcacaaggaacacaacccggaagagacggaguaguaaggguuugggauguuaaaaauccagaucuauuaaauaaccaauucggaacgaugccuucacugacucuagcaugucuaacaaaacaaggacaagucgaucuaaacgaugcgguacuagcacuuaccgaccuaggccuaauauacacagcaaaauauccaaauucaagugauuuagacagacuaagccaaucucaucccauacuaaacaugguagauacaaaaaaaucaucacuaaacauaagcggcuauaauuuuucauuaggcgcagccguuaaagcaggcgcauguauguuagacggaggcaauaugcuagaaacaaucaaaguaacaccacaaacgauggacggaauauuaaaaucaauacuuaaaguaaaaaaaucauuaggaauguuuguuagcgacacaccaggggaaagaaacccauacgaaaauauacuauauaaaauaugcuuaagcggugacgguuggccuuacauagcaaguagaaccucaauaguuggacgagcaugggaaaauacaacaguagaucuagaaucggacggaaaaccacaaaaaguaggaacagcaggaagcaauaaaaguuuacagagcgcaggcuuucccacaggacuaacauauagucaacuaaugacauuaaaagacagcaugaugcaauuagauccaucagcaaaaacauggauagauauagaaggaagaccagaggacccaguagaaauagcucuuuaucaaccaaugucgggcuguuauauacacuucuucagggaaccaacagaucuaaaacaauuuaaacaagaugcaaaauacucacacggaauagacguagcagauuuauucagugcacaaccaggacuaaccagcgcaguaauugaagcauuaccacgaaacaugguacuuacgugucaaggaagcgaugacauaaagagacuauuagacucacaaggccgacgagauauaaaauuaauagauauugcacuaaguaaagcagauaguagacgauuugaaaacgcaguaugggaccaaugcaaagaucuaugccauaugcacacaggugucguuguagaaaaaaaaaaacgagguggaaaagaagaaauaacaccucacugugcguuaauggauugcaucauguaugacgccgcaguuucaggaggccuuaacauaccaguacuccgagcagucuuaccacgcgauaugguauuuagaacaucaaguccaaaaguaguauuauaa

SEQ ID NO: 9411 - RNA, 1710 nt, Artificial Sequence
  derived and/or modified CDS sequence (opt6) from LASV(LASV052-NIG-2008;Clade II)__AIT17609__NP
augucagcuagcaaagaagugaaaucauuccuauggacacaaucccuaagaagagaacuaagcggauauugcucaucaauaaaauuacaagugguaaaagacgcacaagccuuauuacauggacuagauuuuucagaaguuagcaauguacaaagacuaaugagaaaacaaaaaagagacgacagcgaucucaaaagauuaagagauuuaaaccaagcuguuaauaacuuaguagaauuaaaaagcacacaacaaaaaucaauacucagaguuggcacauuaaccucagacgaccuacucacauuagcagccgaccuagaaaaacuaaaaucaaaaguuauaagaacagaacgaccauuaucuucaggaguauauaugggaaacuuaaguacacaacaauuagaacaaagaagagcgcuauuaaauaugauaggaauggcaggaggugcacaaggaacccaaccaggcagagacggaguaguaagagucugggaugucaaaaauccugauuuacuaaacaaccaauucgguacuaugccaucauuaacacuagccugucuaacaaaacaaggacaaguugaccuaaacgaugcaguucuagcacuaaccgacuuaggacuaauauacacugcaaaauacccaaacucaucagaccuugacagauuaucccaaucacacccaauacuaaacaugguagacacaaaaaaaucuaguuuaaauauaucaggauacaauuuuucacuuggagccgcaguaaaagcuggagcauguauguuagacggugguaacauguuagaaacuauaaaaguaacaccacaaacaauggauggaaucuugaaaucaauacuaaaaguaaaaagaagcuuaggcauguucguuagcgauacaccuggggaaagaaacccauaugaaaacauucuuuacaaaauaugccuaaguggagauggcuggccauauauagcuucuagaaccucuaucguuggaagagcuugggaaaauacaacaguagaccuagagagugauggaaaaccccaaaaaguaggugcagcaggaucgaacaaaucacuacaaucagcaggauuuccuaccggacugacauauucacaacuuaugacacuaaaagauucuaugaugcaauuagacccaucagccaaaaccuggauagacauagagggaagaccagaagacccggucgaaaucgccuuauaucaaccaaugucagguugcuauauacacuuuuuuagagaaccuacagaucucaaacaauucaaacaagacgcaaaauauucucauggaauugacguugcggacuuauucccagcgcaaccaggacuaacuucagcaguuauagaagccuuacccagaaauaugguacuaacaugucaaggaagcgacgacaucaaacgacuuuuagauucacaagggagaagagauauaaaauuaauagacaucgcauuaucaaaagccgauucaagaagauucgaaaacgcaguaugggaccaaugcaaagacuuaugccacaugcauacaggaguuguagucgaaaaaaaaaaacgaggaggaaaagaagaaauaacaccacauugugcauuaauggauuguauuauguaugacgcugcaguaucaggaggauuaaacaucccaguauuaagagcaguacuaccuagagacaugguauucagaacaucaucaccaaaaguuguauuauaa

SEQ ID NO: 9412 - RNA, 1710 nt, Artificial Sequence
  derived and/or modified CDS sequence (opt6) from LASV(LASV056-NIG-2008;Clade II)__AIT17613__NP
augagcgcaucaaaagaaguaaaaucuuuccuauggacacaaucacuacgcagagaacuaaguggauauugcucuaauauaaaauuacaaguuguaaaagacgcacaggcacuuuuacacggccuagauuucagugaaguaagcaacguacaaagauuaaugagaaaacagaaaagagaugauucagaucuaaaaagauuaagagacuuaaaccaagcuguaaauaacuuaguagaauuaaaaaguacacaacaaaaaucaauauuaagaguuggcacguuaacaagcgaugaucuuuuaacauuagccgcggauuuagaaaaauuaaaaucaaaaguaauacgaacagaacgaccacuaagcucaggaguauacaugggaaaucuaucaacacaacaauuagaacaaagacgagcacuacugaacaugauaggaaugguaggaggagcacaaggaacucaaccaggaagagacggaguaguaagaguaugggauguuaaaaacccagacuuauuaaauaaccaauuuggaacuaugcccucacuaacauuagcauguuuaacaaaacaaggacaaguagacuuaaaugacgcaguauuggcacuaacagaccuaggauuaaucuauaccgcaaaauacccaaauaguucagauuuagacagacuaucacaaagucacccaaucuugaauaugguagauacaaagaaaucaaguuuaaauauaucaggauauaauuucagccuaggagccgcagucaaagcaggagccuguaugcuagacggugguaauauguuagaaacaauaaaaguaacuccccagacuauggacggaauauuaaaaaguauacuuaaagugaaaagaucccuuggaauguucgucagugauacacccggcgaaagaaauccauacgaaaacauauuauacaaaauaugccuaucaggugauggauggccauauauagcuucaagaacaaguaucguugggagagccugggaaaauacaacaguagaucuagaaucagacggaaaaccacaaaaaguaggaacagcgggaaguaacaaaucguuacaaucagcaggauuuccaacuggauuaacuuauucccaauuaaugacauuaaaagacagcaugaugcaauuagauccaagugcaaaaacauggauagacauagaaggaagaccagaagaucccguagaaaucgcacucuaucaaccaaugucaggauguuacauucacuucuucagagaaccaaccgaccugaaacaauuuaagcaagacgcgaaauacucacacggaauagacguagcagauuuauuuccagcccaaccaggacuaaccagugcaguaauagaagcauuaccacgaaacaugguucuaacuugccaaggcuccgacgacauuaaaagauuauuagauucacaaggaagaagagacauaaaauuaaucgauauagcauuauccaaaacugauucaagaagauuugaaaaugcuguaugggaccaauguaaagacuuaugccauaugcauacuggaguaguaguagaaaagaagaaaagaggaggaaaagaagaaauuacaccacauugugcacuaauggacuguauaauguaugaugcugcaguuagcgguggacuaaauauaccaguacuccgagcaguauuaccaagagauaugguguucagaacaagcagcccaaaaguuguauuauga

SEQ ID NO: 9413 - RNA, 1710 nt, Artificial Sequence
  derived and/or modified CDS sequence (opt6) from LASV(LASV058-NIG-2008;Clade II)__AIT17617__NP
augucagcaaguaaagaaguaaaaaguuucuuauggacacaaagucuaagacgagaacuuaguggguacugcucaagcauuaaauuacaaguagucaaagacgcacaagcacuccuacacggauuagacuucucagaaguaucuaauguacaacgauuaaugagaaaacagaaaagagaugauucagaucuaaaacgacuacgagauuuaaaucaagcaguaaauaaucuaguagaacuaaaaagcacacaacaaaaaucaauccucagaguaggaacauuaacguccgaugaucuacuaacuuuagcagcagaucucgaaaaauuaaaaagcaaaguaauaagaacagaaagaccacuaucaaguggaguauacaugggaaaccuaucagcccaacaauuagagcaaagaagggcacuucuaaauaugauaggcaugguuggcggagcacaaggaacacaaccaggaagagacggcguuguaaggguuugggacguuaaaaaccccgacuuacuaaacaaucaauuugggacaaugccuucacuaacauuagcaugucuaacuaaacaaggacaaguugauuugaaugaugccguauuagcacuaacugacuuaggacuaaucuauacagcaaaauauccaaauuccagugaccucgauagauuaucacaaagucacccgauacuaaacaugguugauacaaagaaaagcucauuaaauauaucaggauucaauuuuucacuaggcgcagcaguaaaagcaggggccugcauguuagauggagguaauaugcuagaaacaauaaaaguuacaccccaaacaauggacgguauauuaaaaucaauccuaaaaguuaaaaggucucuagguauguuuguaucagauacaccaggagaacgaaacccuuacgaaaacauacuauacaaaauauguuuaucaggagauggcuggcccuauaucgccagucgaacaucaauaguaggacgagcaugggaaaacacaaccguagauuuagaaucagauggaaaaccgcaaaaaguaggaacugcaggaagcaauaaaucccuacaauccgcuggauucccuacuggcuuaacauacagucaacuaaugacauuaaaagacagcaugaugcagcuagacccaucagcuaaaacauggauugauaucgaaggaagaccagaagacccagucgaaaucgcauuauaccaaccaaugaguggauguuacauucacuuuuucagagaaccaaccgaucuaaaacaauuuaaacaagacgcaaaauacucacauggaauagacguagcagaucuauuuccggcccaaccaggucuaaccucagcaguaauagaagcacucccuagaaacaugguacuaacaugccaaggaucagaugacauaaaaagacuacuagauagccaaggaaggcgagacauaaaauuaauagauauagcauuaaguaaagcggacucuagaagauucgaaaaugcaguaugggaccaauguaaagaccuaugucauaugcauacaggaguaguagucgaaaagaagaaacgaggaggaaaagaagaaauaaccccucacugcgcacuaauggauuguauaauguaugacgcagcaguaucaggaggauuaaauauaccaguauuaagagcuguauuacccagagauaugguauuuagaacuuccagcccaaaagucguauuauaa

SEQ ID NO: 9414 - RNA, 1710 nt, Artificial Sequence
  derived and/or modified CDS sequence (opt6) from LASV(LASV063-NIG-2009;Clade II)__AIT17621__NP
augucagccagcaaagaaguaaaaaguuuccuauggacucaauccuuaagaagagaauuaucaggauacuguucaucuauaaaacuacaaguaguaaaagaugcacaagcucuacuacacggacuugauuucucagaagucacaaacgugcaaagauuaaugagaaaacaaaaaagagacgauagcgacuuaaaacgucuacgagauuuaaaucaagcaguaaacaauuuaguagaauuaaaaucuacacaacaaaaaucaauacuacgcguaggaacauuaacaucagacgaccuauuaacauuagccgcagauuuagaaaaauuaaaaucaaaaguaauaagaacugaaagaccauuaucaucaggagucuacauggguaacuuaagcacucaacaacuagaacaaagaagagcacuacuuaacaugauagguaugguaggaggagcacaagguacacaaccaggaagagacggaguaguacgaguaugggauguuaaaaauccagauuuacuuaauaaccaguuuggaaccaugccuaguuuaacacuagcaugucuaacaaaacaaggacaaguagauuugaacgaugcugucuuagcacuuacagaccuuggcuuaauauauacagcaaaauaccccaacucaucugaccuagauagauuaagucaaagucacccaauacuaaacauggucgacacaaaaaaaagcucacuaaauauaagcgguuacaacuucucacuaggagcagcaguaaaagcaggugccugcauguuagacggaggaaauaugcucgaaacaauaaaaguaacaccacaaaccauggaugguauacugaaaucuauacuaaaaguaaaaagaucucuuggaauguuuguaagugacacaccaggagaaagaaacccauacgaaaauauccuauauaaaauaugucuaucaggagacgguuggccauauaucgcaaguagaaccucuaucguaggaagagcuugggaaaauacaacaguagaucuagaaagcgacgguaaaccucaaaaagucggcauagcuggaucaaacaaaucgcuacaaucagccggauuuccaaccggacuaacguacucacaacuuaugacauuaaaagauuccaugaugcaauuagacccaagugcaaaaacauggauagauauagaaggaagaccagaagacccaguagagaucgcacucuaccaaccaaugucugguuguuacauacacuucuucagagaaccuacagaucuaaaacaauuuaaacaagaugcaaaauauagccaugggauagauguagcagauuuauuccccgcacaaccugguuuaaccucagcaguuauugaagcguuaccaagaaauaugguauuaacaugccaaggauccgacgacauaaaaagauuauuagacucucaagguagaagagauauaaaacucauagacauagcauuaucaaaagccgacucaagaaaauuugaaaacgcaguaugggaucagugcaaagauuuaugccauaugcauacaggcguaguaguugagaaaaaaaaaagagguggaaaagaggaaauaacaccucacugcgcccuaauggauugcauuauguacgacgccgcaguaagcggcggacuaaauauaccaguauuaagggcuguuuuaccucgcgauaugguauucagaacaucaaguccuaaaguaguucucuaa

SEQ ID NO: 9415 - RNA, 1710 nt, Artificial Sequence
  derived and/or modified CDS sequence (opt6) from LASV(LASV1000-NIG-2009;Clade II)__AIT17783__NP
augagcgcaucaaaagaaguaaaauccuuccuauggacccaaagccuaagaagagaauuaucaggguacuguucaaauaucaaauuacaaguaguaaaagacgcacaagcauuauuacauggccuagauuucucagaaguauccaauguucaaagacuaaugcguaaacaaaaaagagacgacucagaccuaaaaagauuaagagaucuuaaccaagcaguaaauaauuuaguggaauuaaaaagcacucaacaaaaaaguauccuaagaguaggaacucuaacuagcgacgaucuucuaacauuagcagccgaucucgaaaaacuaaaaucgaaaguaauaagaacugaaagaccauuaaguagcgguguauauaugggcaaccuaagcacacaacaacuagaacaaagaagagcauuacuaaacaugauaggaaugguaggaggagcacaaggaacacaaccuggaagagacggaguaguaagagucugggacguaaaaaacccagacuuacuaaauaaucaauucggaacgaugccaagucuuacacuagcaugucuuacaaaacaaggucaaguugaccuaaacgauguaguucuagcacuaacagaucugggauuaauuuauacagccaaauaccccaacagcagugaccuugaccggcuaagucaaucacacccaauauuaaacauggucgauacaaaaaaaucaucucuaaacauaaguggauacaacuucaguuuaggagcugccguaaaagcaggugcauguaugcuagacggaggaaacauguuagaaacaauaaaagucacaccacaaacaauggaugggauauuaaaaagcaucuuaaaaguaaaaaaaucccuuggaauguucguaucagacacuccuggagaaagaaaucccuacgaaaauauacuauacaaaauaugucuaagcggcgauggauggccauauaucgcuucaagaacuucuauaguaggaagagcuugggaaaauacaacuguagaucucgaaagugacggaaaaccacaaaaaguuggaacagcaggaagcaauaaaucauuacaauccgcaggauuuccaacaggacugacauauagucaacuaaugacucuaaaagauaguaugaugcaauuagauccaucagcaaaaacauggauagacaucgaagguagaccagaagacccaguagaaauagcucuauaucaaccaguaaguggaugcuacauacacuucuucagggaaccaacagauuuaaaacaauuuaaacaagacgcuaaauauagucacggaauagacguagcagaccuauuuccagcacaaccaggccuaacaucugccguuauagaagcacuaccuagaaauaugguacucacuugccaaggaucagaugauaucaaaagacuauuagacucacaaggacgaagagacauaaaacuaauugacauagcauuaagcaaagcagauucaagaagauuugaaaacgcuguaugggaucaaugcaaagaccucugucacaugcauacaggaguagucguagaaaaaaaaaaaagaggagguaaagaggaaauaacaccgcacugugcauuaauggauugcauaauguaugacgcggcaguaucagguggauuaaauauaccuguauuaagagcagucuuaccacgagauaugguauucagaacuucgaguccuaaaguaguacuuuaa

SEQ ID NO: 9416 - RNA, 1710 nt, Artificial Sequence
  derived and/or modified CDS sequence (opt6) from LASV(LASV1008-NIG-2009;Clade II)__AIT17787__NP
augucagcaagcaaagaaguaaaaaguuuccucuggacucaaagucuacgacgagaauuaucaggauauugcuccaauauaaaauuacaaguagugaaagaugcacaagcacuacuucacggauuagauuucagugaaguaucaaaugugcaaagauuaaugagaaaacaaaaacgagacgacggagaucuaaaacgccuacgugauuuaaaucaagcaguaaauaaucuaguagaauuaaaaagcacacaacaaaaaucaauauuaagaguaggaacccuaacaucagaugacuuauuaacccuugcugccgaucuagaaaaacuaaaaaguaaaguaauacguaccgaaagaccauuaucaucagguguuuacaugggaaacuuaucaacacaacaacucgaacaacgaagagcauuacuaaacaugauaggaaugguaggaggugcacaaggaacucaaccaggucgagauggaguaguuagaguaugggacguaaaaaacccugaucuucuaaacaaucaauuuggaacaaugccaucauuaacguuagcaugccuaacaaaacaaggccaaguugaucuuaacgaugcugucuuagcucuaacugaccuaggacuaaucuacacagcuaaauauccaaauucuuccgaccuugacagacucucacaaucccacccuauacuuaauaugguagauacaaaaaaaaguucccuuaacauaucuggcuacaacuucucuuuaggagcagcaguaaaagcaggagcauguaugcuugacggcggaaacaugcuagaaacaauaaaaguaacuccccaaacaauggacggaauauuaaaaucaauauuaaaaguaaaaaaaucauuaggaauguuugugagcgauacaccaggagaacgaaauccauaugaaaacauauuauacaaaauauguuuaucaggagacggauggccauauauagcuucacgaacaaguauaguaggaagagccugggaaaacacaacaguagauuuagaaagugauggaaaaccacaaaaaguaggaaccgcaggaucaaacaaaucacuccaaagugcuggauucccgacaggauuaacguacucacaacuuaugacuuuaaaagauagcaugaugcaacuagacccauccgcaaaaacauggauagauauagaaggaagaccugaagacccuguagagaucgcccuauaucaaccaaugucaggaugcuauauacacuuuuuucgcgaaccaaccgaccuaaaacaauuuaaacaagacgcuaaauauucacacgguauagauguaacagaucucuuuagcgcacaaccaggcuuaacaucagcaguaauagaagcuuuaccucgaaacaugguauuaacaugccaaggaucagaugauauaaaaagacuauuagauucacaaggaagaagagauauaaaauuaaucgacauagcauuaagcaaaguugacuccagaagauuugaaaaugccguaugggaucaaugcaaagaccuuugccauaugcauacaggaguaguuguagaaaagaaaaaaagaggaggaaaagaagaaaucacaccacauugcgcuuuaauggacuguaucauguaugacgcagcaguaucaggaggauuaaacauaccaguacuaagagcaguauuaccaagagacaugguauuuagaacaagcucgccaaaaguaguauuauaa

SEQ ID NO: 9417 - RNA, 1710 nt, Artificial Sequence
  derived and/or modified CDS sequence (opt6) from LASV(LASV1015-NIG-2009;Clade II)__AIT17795__NP
augucugcaucaaaagaaguaaaaaguuucuuauggacacaauccuuaagaagagaauuaucgggauauugcucaaguaucaaacuacaaguaguaaaagaugcucaagcacucuuacacggcuuagauuuuucagaaguaucuaacguacaaagacuuaugagaaaacaaaaaagagaugauagugauuuaaaaagauuaagagaucucaaccaagcuguaaauaacuuaguagaacuaaagucaacacaacaaaaaucaauauuaagaguaggaacacuaacauccgaugaccuacuaacauuagcugcagaccuagaaaaauuaaaauccaaaguaauaagaacagaaagaccuuuaucuucaggaguauauaugggaaaccugucaacacaacaauuagaacaaagaagagcacuuuuaaacaugaucggaaugguaggaggagcacaaggaacacaaccaggaagagacggaguaguuagagucugggacgucaaaaaccccgaucuacuaaacaaucaauuuggaacaaugccuagucuaaccuuagcaugcuuaacuaaacaaggacaagucgaucuaaacgaugcaguacuagcauuaacagauuuaggcuuaauauauacagccaaauaccccaauucaagcgauuuagacagacuaagccaaagucauccuauacuaaacaugguagauacuaaaaaaucaaguuuaaacauaagcggauacaauuucucacucggagccgccguaaaagcaggcgcauguauguuagauggcggaaauaugcuagaaacaauaaaagucaccccacaaacaauggacggcauauuaaaaucgauauuaaaaguaaaaagaucacuuggaauguucguuucagauacuccaggcgaaagaaauccauaugagaauauccuauacaaaauaugcuuaucaggagacggauggccauacauagcaagcagaacaucaauuguaggaagggcgugggagaauaccacaguagauuuagaaucagauggaaaaccacaaaaaguagguacagcaggaucaaauaaaucucuacaaagugcaggcuuuccaacaggauuaacauauucacaacuaaugacauuaaaagauagcaugaugcaauuagacccaucagccaagacuuggauagauauagaaggacggccugaagacccagucgaaaucgcacuauaccaaccaaugucaggaugcuacauacacuuuuucagagaacccacagaucuaaaacaauuuaaacaagaugcaaaauauagccaugguauagacgucgcugauuuauuuccugcacaaccagguuuaacaucagcaguaauagaagcacuaccacgaaacaugguacucacaugucaaggcucagaugacauaaaaaaacuacuagacucacaagguagacgagacauaaaauuaauugauauagcauuaucaaaagcagauucaagaagauucgaaaacgcuguaugggaccaauguaaagacuuaugccauaugcauacaggagucguaguagaaaaaaaaaaacgaggcggaaaagaagaaauaacaccacacugugcacuuauggauugcauuauguacgaugcagcaguaaguggaggacuuaauauacccguacucagagcaguauuaccaagagauaugguuuucagaaccucaagcccaaaaguaguacucuaa

SEQ ID NO: 9418 - RNA, 1710 nt, Artificial Sequence
  derived and/or modified CDS sequence (opt6) from LASV(LASV1016-NIG-2009;Clade II)__AIT17799__NP
augucagcaucuaaagaaguaaaaucauuucuauggacacaaagccuaaggagagaacuauccggauauugcucaaacauuaaacuacaaguuguaaaagacgcucaagcucuuuuacacggacuagauuucucagaaguaucaaauguacaaagacuaaugagaaaacagaaaagagacgauagugauuuaaaacgauuaagggacuuaaaucaagcuguaaauaauuuaguagaauuaaaaaguacgcaacaaaaaucaauacuuagaguagggacacuaacaagugaugaucuacuaacacuugcagcugaucucgaaaaauuaaaaucaaaaguaauaagaacagaaagaccguuaagcucagggguauauaugggaaaccuaucagcacaacaacuagaacaacguagagcauuauuaaauaugauagguaugguagguggagcacaagguacacaaccagguagagauggaguaguucgaguaugggaugucaaaaaccccgauuuacuuaauaaucaauucggaacaaugccaagccugacauuagcaugucuaacaaaacaaggacaaguagacuuaaaugaugcaguauuagcauuaacagacuuaggacuaauauauacagccaaauacccaaacaguucagauuuagaccgauuaucccaaagucauccaauuuuaaauaugguagauaccaagaaaucaagccucaauauuaguggauauaauuucagucuaggagcagcgguaaaagcaggagccuguauguuagauggaggaaauaugcuagaaacuaucaaaguaacaccacaaacuauggacggaauacuaaaaaguauccuaaaaguaaagaaaucacuagguauguucguaagugauacaccaggagaaagaaauccauaugaaaauauauuauacaaaauaugccuaaguggcgauggauggcccuauauagcgagcagaacaagcauagucgguagagcaugggaaaauacaacuguagauuuagaaagcgauggaaaaccacaaaaaguaggaacugcaggaaguaacaaaagucuacaaagugcaggauuuccaacaggcuuaacauauucacaauuaaugacauuaaaagauucaaugaugcaauuagacccaucagcaaaaacauggauagauaucgaaggcagaccagaagauccaguugaaauagcgcuuuaucaaccaaugagcggaugcuauauacacuuuuucagagaacccacagaccuaaaacaauuuaaacaagaugcaaaauacagccauggaauagacguagcagauuuauuuccagcacaaccaggacuaacaucagcaguaauagaagcauuaccaagaaacaugguauuaacaugucaggggucagacgacauaaaacgacuauuagauagccaaggaagaagagauauaaaacucauagauauagcacuaagcaaagcggacucaagaagauucgaaaaugcaguaugggaccaaugcaaagaucuaugccauaugcacacaggaguaguagucgagaaaaagaaaagaggaggaaaagaagaaauuacaccgcacugcgcacucauggauuguaucauguaugacgccgcaguaagcggaggauuaaacauacccguacuacgagcaguauuaccaagagauaugguauucagaaccagcucaccaaaaguaguacuguaa

SEQ ID NO: 9419 - RNA, 1710 nt, Artificial Sequence
  derived and/or modified CDS sequence (opt6) from LASV(LASV221-NIG-2010;Clade II)__AIT17625__NP
augucagcaucaaaagaaguaaaaagcuuccuuuggacacaaucccuaagacgagaauuaucaggauacuguucaucaauaaaacuacaaguaguuaaagacgcucaagcauuauuacauggguuagacuuuuccgaagucuccaauguacagagacuaaugagaaaacaaagaagagaugauuccgauuuaaaacgacuaagagauuuaaaccaagcagucaauaaccucguugaacuaaaaaguacacaacaaaaaaguauauuaagaguaggcacacuaacaagcgaugaccuacucacucuagcagcagaccuagaaaaauuaaaaucaaaaguaauaagaacagaaagaccacuaaguucagguguauauaugggaaauuuaucaacacaacaacuagaacaacgaagagcuuuguuaaauaugauagguaugguaggaggagcacagggaacacaaccgggaagagacgguguagugagaguaugggacguaaaaaacccggauuuacuaaacaaccaauucggaacaaugccaagccuaacucuagcaugcuuaacaaaacaaggacaagucgacuuaaacgaugcuguacuagcacuaacagaccuaggauuaauauacacagcaaaauacccaaauagcagugauuuagacagacuaagccaaagucacccuauccuuaauaugguagauacaaaaaaaagcucuuuaaacauauccgguuacaacuucagucucggagcagcagucaaagccggagcauguauguuagauggcggaaacaugcuugaaacaauaaaaguuacaccacaaaccgucgacggcauccuaaaaucaauauuaaagguuaaaagaagucuaggaauguucguaucagacacaccaggugaaagaaauccauacgaaaauauacuguauaaaauaugucuaaguggagauggauggccuuauauagcaucacgaacaucaauagucggacgagcgugggaaaacacuacaguugaucuagaaagugauggaaaaccacaaaaaguuggaacugcgggaucaaauaaaucauuacaaucagcuggauuuccgacaggacuaacauauagccaauuaaugacacuaaaagauagcaugaugcaauuagaucccucagcaaaaacauggauagacaucgaaggaagaccagaagaccccguugaaauagcauuauaucaaccaaugucaggcuguuauauacauuucuuucgcgaaccaacagaccuaaaacaauuuaaacaagaugcaaaauauagucacggaauagacguagcagaucuauucccagcacaaccuggauuaacaucagcaguaaucgaagcccuuccaagaaauauggucuuaacuugucaaggaagcgaugacauaaaaagacuccuugacucacaaggaagaagagacauaaagcucaucgauauugcucuaucuaaagccgauucaagaaaauucgaaaaugccguaugggaccaauguaaagacuuaugccauaugcauacaggaguaguuguagaaaaaaaaaaaagagguggaaaagaagaaauaacaccacacugcgcucucauggauugcauaauguaugacgcagcaguaucaggaggccuaaacaucccaguauuaagagcuguucuaccaagagauaugguauucagaacaaguaguccaaaaguaguacuuuaa

SEQ ID NO: 9420 - RNA, 1710 nt, Artificial Sequence
  derived and/or modified CDS sequence (opt6) from LASV(LASV224-NIG-2010;Clade II)__AIT17627__NP
augucugcuucaaaagaaguuaagagcuuuuuauggacacaaucacuuagaagagagcuaaguggguacugcagcucaauaaaauuacaaguaguaaaagacgcgcaagcacuuuuacauggucuagacuuuucagaaguaucaaauguucaaagacuaaugagaaaacaaaaacgagaugauucagauuuaaaaagacucagagacuuaaaccaagcaguaaauaaccuaguugaacuaaaauccacacaacaaaaaucaauauuaagagucggaacacuaacaagcgacgaccuucuaacacuagcagccgacuuagaaaaacucaaaucaaaaguaauaagaaccgaaagaccuuuaaguucaggaguauauaugggaaauuuaucaagucaacaacuagaacaacgcagagcacuauuaaauaugaucggaaugguagguggagcacaaggaacacaaccgggaagagacgguguaguuagagucugggacgucaaaaacccagaucuacuaaauaaccaauucggaaccaugccaucuuuaacuuuagcuugucucaccaaacaaggacaaguugacuuaaacgaugcaguacuagcucuaacagaccucgguuugauauauacagcaaaauacccaaacucaagugauuuagauagacuaagucaaucucacccaauauuaaacaugguggauacaaagaaaucuagcuuaaacauaucaggauauaauuuuagccugggagcagcaguaaaagcgggugcauguauguuagauggaggcaacauguuagaaacaauaaaaguuacaccacaaacuauggacggaauauuaaaaaguauauuaaaaguaaaaagaagccuuggaauguuuguaagcgauacaccuggagaaagaaauccauaugaaaacauacuauacaaaauaugucugagcggugacggauggccauauauagcaucaagaacaucaaucguagggagagcaugggaaaacacuacgguagauuuagaaagugauggaaaaccccaaaaaguagguagcgcaggaucaaacaaaucacuacaauccgcaggcuuccccacaggacuuacauacucacaacuaaugacauuaaaagacagcaugaugcaacuagauccuagugcaaaaacuuggauugauauagaaggaagaccagaagauccaguagaaauagcauuauaucaaccaaugagcggcugcuauauacauuucuuuagagaaccaacagauuuaaaacaauuuaaacaagaugcaaaauauagucauggaaucgacguugcagacuuauuuccagcucaaccuggauuaacaucagcaguaauagaagcauuaccaagaaauaugguauuaacaugucaaggcagugacgauauaaaacgacuacuagauagccaaggccgaagagacaucaaauuaauugacauagcauuaaguaaagcagauucuagaagauuugaaaacgcaguaugggaucaaugcaaagaucuaugccauaugcacacaggaguaguuguagaaaagaagaaaaggggaggaaaagaagaaauaacaccucauugugcauuaauggauugcauaauguaugacgcagcaguaucuggaggauuaaauaucccaguacuacgagcaguuuuaccccgagauaugguuuuuagaacaucaucaccaaaaguaguacuuuaa

SEQ ID NO: 9421 - RNA, 1710 nt, Artificial Sequence
  derived and/or modified CDS sequence (opt6) from LASV(LASV225-NIG-2010;Clade II)__AIT17631__NP
augucagcaaguaaagaaaucaaaaguuucuuauggacccaaagucuuagaagagaauuaucaggauauuguaguagcauaaaacuucaaguaguuaaagaugcacaagcacuacuacauggacucgauuucucagaaguuagcaauguccaaagauuaaugagaaaacaaaaaagagacgauucagauuuaaaacgacucagagaccuaaaucaagcugucaauaaucucguagaauuaaaaagcacacaacaaaaaucaauauuaaggguagguacuuuaacaagcgaugaucuacucacacuagcagcagaucuagaaaaauuaaaaucaaaaguuauaagaaccgaaagaccccuuaguucaggaguauauaugggaaaucuuagcacucaacaauuagaacaaagacgagcacuauugaauaugauuggaaugguuggcggagcacagggaacacaaccgggacgugacggagucguacgaguaugggauguaaaaaauccagauuuacuaaacaaccaauucggaaccaugccaucacuuacauuagcaugucugacaaaacaaggccaaguagacuuaaaugacgcaguucuagcccucacagacuuaggacuuaucuauacagcuaaauaccccaauucaucagacuuggauagauuaucccaaucacauccuauacuaaauaugguagacaccaaaaaaucaagcuuaaacauaagugguuauaauuucucauuaggagcagcaguaaaagcaggugcaugcauguuagacggcgggaauaugcuagaaacuauaaaaguaacaccgcagacaauggacggaauauuaaaaaguauauuaaaagugaaaagaagucuagguauguucguaucagaugcaccaggagaaagaaacccauaugaaaauauauuauacaaaauaugucuaucaggagacgguuggcccuauaucgcaagucgaacaucaauaguaggacgagcaugggaaaauacaacaguagaucuagaaucagacggaaaaccacaaaaaguaggcacagcaggaaguaauaaaagcuuacaauccgcaggauucccaacuggauuaacauauagucaacuaaugacacuaaaagauucaaugaugcaacuagaucccagugccaaaacauggaucgacauugaagguaggccagaagacccaguagaaauagcacuauaucaaccaaugaguggauguuacauacacuuuuucagagaaccaacugacuuaaaacaauuuaaacaagacgccaaauauagccauggaauagacguagcagauuuauucccagcacaaccagguuuaacauccgccguuauagaagcccuuccacgaaauaugguacuaaccugccaagggucagacgacauaaaaagacuauuggacucacaaggcagacgagacauaaaauuaauugauauagcucuaucaaaagcagacagcagacgauuugaaaacgcaguaugggaccaauguaaagaucuaugccacaugcacacaggaguaguaguugaaaaaaaaaaaagaggaggcaaagaagaaauuacaccacauugcgccuuaauggauuguauaauguaugacgcagcaguaaguggcggacuaaacauuccaguucucagagcugucuuaccaagagacaugguauuuagaacuucauccccaaaaguaguccuauaa

SEQ ID NO: 9422 - RNA, 1710 nt, Artificial Sequence
  derived and/or modified CDS sequence (opt6) from LASV(LASV229-NIG-2010;Clade II)__AIT17635__NP
augagugcuuccaaagaaguaaagagcuucuuauggacacaaucacuaagaagagaauuaaguggcuauuguucaaacauaaaacuccaaguaguaaaagaugcucaagcacucuuacauggccuagacuuuagcgaaguaucaaauguacaaagacuaaugagaaaacaaaaaagagaugacaacgacuuaaaaagacuaagagaucuaaaccaagcaguaaacaacuuaguagaauuaaagucaacacaacaaaaaucaauacuaagaguaggaacuuuaacaagugacgaccuuuuaacacucgcugccgaucuagaaaaacugaaaucuaaaguaauuagaaccgaaagaccucucucaucaggaguuuauaugggaaaccuuaacacacaacaauuagaacaaagaagagcauuauuaaauaugauagguaugguaggaggagcacaaggcacucagccaggacgagauggaguuguuagaguaugggauguaaaaaaccccgacuuauugaacaaucaauuuggaacaaugccgucacuaacauuagcaugucuaacuaaacaaggccaaguagacuuaaacgacgcaguuuuagcacuuacagacuuaggccuaauauacacagcaaaauacccaaacucaucagacuuagaucguuugagucaaucacauccaauauuaaauaugguugacacuaaaaaaucuucacuaaauauaucaggcuacaacuuuagucuaggagcugcagucaaagcuggagcaugcaugcuagauggaggaaauaugcuagaaacuauaaaaguaacaccacaaacaauggacgguauacuaaaaucaauauuaaaaguaaaaaaaucuuuaggaauguucguaagugacacaccaggagaacgcaauccauaugaaaauauuuuauauaaaaucugucucucaggcgacggcuggccauacauagcaucaagaacaaguauagugggaagagcaugggaaaacacaacuguagauuuagaaucagacgguaaaccacaaaaaguaggaaccgcuggaaguaauaaaagucuucaaucagcaggauuuccaacaggacuaacauauucacaauuaaugacacuaaaagacucaaugaugcaauuagacccaucagcaaaaaccuggauugacauagaaggacgaccagaagacccaguagaaauagcauuauaucaaccaaugucaggaugcuacauacacuuuuuuagggaaccuacugaucuaaaacaauucaaacaagaugcaaaauauucucauggaauagacguagcggaccuguuuccagcacaaccaggauuaacuagcgcaguaauagaagcccucccaagaaacaugguauuaaccugccaaggaucagaugacauaaaaagacuacuagacucacaaggaagacgagacauaaaacuaauagauauagcacuaucaaaagcagauaguagaagauuugaaaacgcaguaugggaccaauguaaagaucuaugucacaugcacacagguguaguaguggaaaaaaaaaaacgaggaggaaaagaagaaauaacaccucauugcgcacuaauggauuguauaauguacgaugccgcaguaucaggaggauuaaauauaccaguacuacgagcuguacuaccaagagacauggucuuuagaacaucuuccccaaaaguuguauuauaa

SEQ ID NO: 9423 - RNA, 1710 nt, Artificial Sequence
  derived and/or modified CDS sequence (opt6) from LASV(LASV237-NIG-2010;Clade II)__AIT17639__NP
augucggcuagcaaagaagugaaauccuuucucuggacacaaagucuacgaagagaauuaucuggauauuguaguaauauaaaacuacaaguagucaaagacgcacaagcauuauuacauggauuagacuucagugaagucucuaacguacaaagauuaaugagaaaacagaaaagagacgacucagaccucaaaagacuuagagaccucaaccaagcaguaaauaacuuaguagaacuaaaaucaacgcaacaaaaaucaauauuaagagucggcacacuaacauccgacgauuugcuuaccuuagcagcagaccuagaaaaauuaaaaucuaaaguuauaagaacagaacgaccacuaagcucaggaguuuauaugggaaauuuaaguacgcaacaacuagaacaacguagagcauuacuuaacaugaucgguaugguaggaggagcacaaggaacucaaccaggaagagacgguguuguaagagucugggaugucaaaaacccugaucuucuaaacaaccaguuuggaacaaugccuucuuuaacauuagcauguuuaacuaaacaaggacaaguagacuuaaaugaugcaguacuagcacucacagaccuaggcuuaaucuacacagcuaaauauccuaacucaucagauuuagacagacuaagucaaucacacccuauauuaaacaugguagacauaaagaaaagcucauuaaacauaaguggauauaacuucagccucggagcugcaguuaaagcaggagcauguauguuagauggagguaauaugcuagaaacaauaaaaguaacaccacaaacaauggacggaauacuuaaaaguauauuaaaagucaaaaggagccuaggaauguucguuagugacacaccaggagaaagaaaucccuacgaaaauauacuauacaaaauaugucucucuggagauggauggccauauauagcaaguagaacaucaauaguaggucgagcaugggaaaauacaacugucgaucuugaaucagacggcaaaccccaaaaaguaggaucagcaggaaguaauaaaaguuuacaaucagcaggauuuccaacaggacucacauauagucaacuuaugacauuaaaagauucaaugaugcaacuugauccaucagcaaaaacauggauagauauugaaggacgaccggaagacccaguagaaauagcacuauaucaacccaugucugguuguuauauacacuuuuucagagaaccuacagaucuaaaacaauuuaagcaagacgcgaaauacucacauggcaucgacguugcagauuuauuuccagcacaaccuggauuaacaucagcaguaauagaagcauuaccaagaaacaugguauuaaccugucaaggcucagaugacauaaaaagacuauuagauucccaaggaagaagagacauaaaauuaauagacauagcacucucaaaagcggauucccgaagauucgaaaacgcagucugggaccaauguaaagauuuaugucacaugcacacaggaguaguaguagaaaagaagaaaagaggaggaaaagaagaaauaaccccucacugugcauuaauggacuguauaauguacgaugcagcaguaucagguggacuaaauauaccuguccuccgagccguauuaccaagagauaugguauucagaacaagcucuccaaaaguaguacuauaa

SEQ ID NO: 9424 - RNA, 1710 nt, Artificial Sequence
  derived and/or modified CDS sequence (opt6) from LASV(LASV242-NIG-2010;Clade II)__AIT17651__NP
augucagcaagcaaagaaguaaaaucuuuuuuauggacacaaagucuaagaagagaacuaucaggcuacugcagcaguauuaaauuacaaguaguaaaagaugcacaagccuuauuacauggacuagauuucucagagguaaguaauguacaaagauuaaugagaaaacaaaaaagagacgauucagaucuaaaacggcuaagagaucuaaaccaagcaguuaauaaucuaguugaauuaaaaucgacacaacaaaaaucagucuuacgaguaggaacuuuaacaucagacgacuuacugacauuagcagcugaucucgaaaaauuaaaaucaaaaguaauacgaacagaaagacccuuaaguagcggaguauauaugggaaauuuaucagcacaacaacuagaacaaagaagagcauuacucaacaugauaggaaugguaggaggugcccaaggaacacaaccugguagagauggagucguaagagucugggacguaaaaaaccccgauuuauuaaauaaccaauucggaacaaugccaucauuaacacuagcaugucuaacaaaacaaggacaaguagaccuaaaugauguuguauuagcccucaccgaucuagguuuaauauacaccgcgaaauacccuaauuccucugaucuugauagacuaucccaaucucacccaauacuaaauaugguagauacaaaaaaaucaagcuugaauaucucaggauauaacuucagccugggagcagcagucaaagcaggagcauguauguuagaugguggcaauaugcuagaaacaauaaaagugacaccacaaaccauggauggaauacuaaaaucaauauuaaaaguaaaaaaaagcuuaggaauguuuguaucagauacacccggagaacgaaacccauacgaaaauauacuauacaaaaucugucuauccggcgacggauggccuuauauagcaagcagaacaucuauaguaggcagagcuugggaaaauacaacaguagaucuagaaucagacggaaaaccacaaaagguaggaacagccgguucaaauaaaaguuugcaaucagcaggauuuccaacaggauuaaccuauucccaauuaaugacacuaaaagauucaaugaugcagcuagauccaucagcaaaaacauggauagauauagaaggucgaccugaagacccaguagaaauagcacuauaccaaccaaugucuggaugcuauauacacuuuuuccgagaacccacagauuuaaaacaauuuaaacaagaugcuaaauauucacacggaauagacguaaccgaucucuucucugcacaaccagguuuaacaucggcagucauagaagcguuaccaagaaacaugguauuaaccugucaaggaucagaugacauaaaaagacuucuagacucacaaggaagaagagauauaaagcuuaucgauauagcgcuaucaaaagcagauagcagacgauucgaaaaugcaguaugggaccaauguaaagacuuaugccauaugcauaccggugucgucguagaaaaaaaaaaaaggggaggaaaagaagaaauaacaccccacugugcauuaauggauuguauaauguaugaugcagccguuagcggaggacuuaauauuccaguauuaagagcuguacucccgagagauaugguauuuagaacuucuucaccaaaaguugucuuauaa

SEQ ID NO: 9425 - RNA, 1710 nt, Artificial Sequence
  derived and/or modified CDS sequence (opt6) from LASV(LASV245-NIG-2011;Clade II)__AIT17655__NP
augagcgcaaguaaagaaguaaaaucauuccucuggacucaaagccuaaggcgagaauuaagcggauacugcucaaacaucaaacuacaaguaguaaaagacgcacaagcauuacuacauggcuuagauuucagugaaguaucaaacguacaaagguuaaugagaaaacaaaagagagaugauuccgauuuaaaaagacucagagauuuaaaucaagcagucaauaauuuaguugaauuaaaaucaacacaacaaaaaucaauauuacgcguugguacauuaacaucagacgaccuacuaacuuuggcagcagaucuagaaaaauuaaaaucaaaaguaauaagaacagaaaaaccacucagcucaggaguguauaugggaaacuuaaguacacaacaauuagaacaaagacgagcacuacuaaauaugaucgguaugguaggaggagcucaagggacucaaccaggaagagauggaguaguaagaguaugggaugugaaaaacccagacuuauuaaauaaucaauucggaacaaugccgucauuaacacuagcuuguuuaacaaaacaaggucaaguagacuuaaaugaugcaguauuggcacuaacagauuuagguuuaauauacacagcaaaauucccaaauucaucagaccuagauagauuaagucaaucacacccaaucuugaauauggucgacacuaagaaauccagcuuaaacauaagcggauauaauuuuucgcuaggagcagcuguuaaagcuggugcuuguauguuagauggaggcaauaugcuagaaacaauaaaaguaaccccacaaacaauggacggcauacuaaaaucaauacucaaaguuaaaaagagcuuaggaauguucguaagcgauacaccaggugaaagaaacccauaugaaaacauacuauacaaaaucugccuauccggagacggguggccuuacaucgcuaguagaacuucuauaguaggacgagcaugggaaaauacaacaguagaucuagaaagcgauggaaaaccacaaaaaguaggaacaaccgguucaaauaaaagucuacaaagcgcaggauucccaacaggauuaacauacagccaauuaaugacauuaaaagacagcaugaugcaacucgauccuucugcaaaaacauggauagauauagaaggcagaccagaagauccaguagaaauugcauuauaucaaccuaugaguggaugcuauauacacuucuucagagaaccuacugauuuaaaacaauuuaaacaagacgcaaaauauagucacgguauugauguugcugauuuauuucccgcacaaccaggacuaaccagugcuguaauagaagcauuaccaagaaacaugguauuaacuugucaagguucagaugauauaaaaaggcuacucgacagucaaggaagaagagacauaaaauuaauagauauagcacuaucaaaagcagauagccgacgauucgaaaacgcaguaugggaucaauguaaagaucuuugccauaugcauacaggaguagucgucgaaaagaagaaaagaggagguaaagaagagauaacuccacacugugcacuaauggacugcauaauguaugacgccgcaguaaguggaggacuaaacauaccaguacuccgagcaguacuaccaagagacaugguauuccgaacuucaucaccaaaaguuguacuauaa

SEQ ID NO: 9426 - RNA, 1710 nt, Artificial Sequence
  derived and/or modified CDS sequence (opt6) from LASV(LASV246-NIG-2010;Clade II)__AIT17659__NP
augucagcaucaaaagaaguaaaaagcuucuuauggacacaaucccuacgaagagaacuaaguggauacuguaguaguauaaaauuacaaguagucaaagacgcgcaagcacuauuacacggacuugacuucucagaaguaucuaauguucaaagauuaaugcgaaaacaaaaacgagaugauuccgaucuaaaacgacuacgagaucuaaaucaagcaguuaauaaccuaguagaauuaaaaucaacacaacaaaaaucaguuuuacgagucggaacauuaacgucagaugaccucuuaacauuagccgcagaucuugaaaaauuaaaaucaaaaguaauucgaaccgaaagaccacuaucaagcgguguuuacaugggaaaccuauccacacaacaauuagaacaaagaagagcauuauuaagcaugauaggaaugguaggaggugcacaaggaacacaaccaggccgagacggaguaguuagaguaugggauguaaaaaacccagaucuucucaauaaccaauucggaacaaugccauccuuaacacuagcauguuuaacaaaacaaggacaaguagacuuaaaugacgcaguacuagcacuaaccgacuuaggacuaauauauacagccaaauacccuaacucaagcgacuuagacagacuaagucaaagccacccaauauuaaauaugguagacaccaaaaaaaguagucuaaacauaagcggauauaauuucucacuuggagcugcugucaaagcuggagcaugcauguuagauggaggaaauaugcucgaaacaauaaaaguaacuccccaaacuauggauggaauccuaaaaucaauuuuaaaaguaaaaagaucacuaggcauguucguaagugauacaccaggagaaagaaauccauaugaaaauauauuauacaaaauauguuuaagcggagauggauggccauauauagcaagucguacaagcauaguaggacgagccugggaaaauacaacaguagacuuagaaucugauggaaaaccacaaaaaguuggaacagcaggaucuaacaaaucacuccaauccgcaggauucccaacagguuuaacauacagccaauuaaugaccuuaaaagauucaaugaugcaguuagauccaucagcgaaaacauggauagacaucgaaggaagaccugaagauccagucgaaaucgcauuauaccaaccaauguccggauguuacauacauuuuuuccgugaaccaacagaucuaaaacaauuuaaacaagacgcuaaauacucacacggaauagacguggcagaucuauucccugcccaaccagguuuaacaucagcuguuauagaagcacuaccaagaaacaugguauuaaccugucaaggaucagaugauauaaaaagacuauuagauucacaaggaagacgagacauaaaauuaauagacauagcauuaaauaaagcagacuccagaagauuugaaaaugcuguaugggaucaguguaaagacuugugccauaugcacacaggaguaguaguagaaaaaaagaaaagaggaggaaaagaagaaauaacaccacacugcgcacuaauggauugcauaauguacgacgccgcaguuaguggaggacucaauauuccaguacuuagagcaguuuuaccaagagauaugguuuuuaggacuaguucuccaaaaguuguccuauaa

SEQ ID NO: 9427 - RNA, 1710 nt, Artificial Sequence
  derived and/or modified CDS sequence (opt6) from LASV(LASV251-NIG-2010;Clade II)__AIT17667__NP
augagcgcaagcaaagaaguaaaaucuuuccuauggacacagucacuacguagagaacuaagcggauacuguucaagcauaaaacuucaaguaguaaaagacgcucaagcauuauuacacggauuagauuucagcgaaguaagcaauguucagagauuaaugagaaaacaaaaaagagacgauucagaucuaaaaagauuaagagauuuaaaucaagcaguuaauaaccuaguugaauuaaaaucaacccagcaaaaaaguauuuuaagaguaggaacacuaacaucagaugaucuucuaaccuuagcugccgaucuagaaaaauuaaaauccaaaguaauaagaacagaacgaccauuaaguucaggaguauauaugggaaauuuaagcacacagcaacucgaacaacgaagagcucuacuaaauaugauaggaaugguaggaggcgcccaaggaacacagccaggcagagauggaguuguaaggguaugggacguaaaaaacccagaucuauuaaauaaccaauucgguacaaugccaucacuaacgcuugcuugccucacuaaacaaggccaagucgaccuaaacgaugcaguucuagcacuaacagaccuaggccuaauauauacagcaaaauauccaaauucgucugauuuagacagacuuagucaaagccauccaauacuaaauaugguagacacaaaaaaaucaagcuugaauauaagcggauacaacuucagcuuaggagcugcaguaaaagcaggagcaugcaugcucgacggugguaauauguuagaaacaauaaaaguaacuccucaaacaauagacgguauacuaaaaucaauacuaaaaguaaaaaaaucauuaggaauguucgugagcgacacaccaggagaaagaaauccauacgaaaacauacuauacaaaauaugucuaucaggagauggauggccauauauagcaaguaggacaagcaucguuggaagagcaugggaaaauacaacagucgaucuagaaucagacggaaaaccacaaaaagucgggaccaccggaaguaauaaaucucuacaaucagcagguuuuccaacaggacuaacauacucacaauuaaugacauuaaaagauuccaugaugcaacuagacccaucagcaaaaacauggauagauauugaaggacgaccagaagacccaguagaaauagcacuauaucaaccaaugucaggcugcuacauacauuuuuucagagaaccaacggaucuaaaacaauuuaagcaggaugcaaaauauucacacggaauagauguaacagaccuauuuccagcgcaaccuggucuaacuagugcuguaauagaagcacuucccagaaauaugguacuaacaugucaaggauccgaagauauaaaaagacuauuagacucucaaggaagaagagacauaaaauuaauagauauagcuuugucuaaagcagacucacgcagguucgaaaacgcugucugggaucagugcaaagauuuaugccacaugcauacuggaguaguaguagaaaaaaaaaaaagaggaggaaaagaagaaauaacaccacauugugcacuuauggauuguauaauguacgacgcagcaguaucaggaggguuaaauauaccaguacuccgugcaguacuaccaagagauauggucuuuaggacaucaagcccaaaaguaguacuauaa

SEQ ID NO: 9428 - RNA, 1710 nt, Artificial Sequence
  derived and/or modified CDS sequence (opt6) from LASV(LASV253-NIG-2011;Clade II)__AIT17671__NP
augagcgcaucuaaagaaguaaaaucuuucuuauggacacaaucacuaagaagagaacucucuggauauugcuccaguauuaaacuacaaguaguaaaagaugcgcaagcccucuuacauggacuugacuuuagugaaguaucaaauguucaaagacuuaugcguaaacaaaaaagagaugauucagauuuaaaaagauuacgagaccuaaaucaagcuguaaacaauuuaguagaauuaaaaagcacacaacaaaaaucaguauuaagaguaggaacauuaacaucagacgaccuacuaacacuagcugcagaccuagaaaaacuaaaaucaaaaguaauaagaacugaaagaccgcuaagcucaggaguauauaugggaaauuuaaguacacagcaauuagaacaaagacgagcacuuuuaaacaugauaggaaugguuggaggagcacaaggaacacaaccuggccgagacggaguaguuagaguaugggauguaaaaaauccagauuuauuaaauaaucaauucggaacuaugccaagucuaacacuagcaugucuaacaaaacaaggacaaguagaccuaaacgacgucguucuagcuuuaacagaccucggauuaaucuauacagccaaauauccaaauaguagcgaucuagauagacucucacaaucacaccccauacuaaauauggucgacaccaaaaaaucaucauuaaacauuucaggauacaauuuuucacuaggagcagcaguaaaagcaggagcgugcaugcuugaugggggaaauauguuagaaacaauaaaaguaacaccccaaacaauggacggcauacuaaaaucaauacuaaaaguaaaaaaaucuuuagguauguucguaucagauacaccuggagaacgaaauccguaugaaaauauacuauacaaaauaugucuaucaggagauggauggccauauaucgcaagucgaaccucaauaguuggaagagcaugggaaaauacaacaguagaucuagaaagcgacggaaaaccacaaaaagucggaacagcgggaucaaauaaaaguuuacaaucagcaggcuuuccaacaggacuuacauauucacaacuaaugacauugaaagauagcaugaugcaacuagauccaagugcaaaaacguggauagauauagaaggaaggcccgaagauccaguugaaaucgcacucuaccaaccaaugucaggaugcuacauccauuuuuucagagaaccaacagaucuaaagcaauucaaacaagacgcaaaauacucacacggaauagacgucacagaucuauucccagcacaaccaggucuuacuucugcaguaauagaagcauuaccgcgaaacaugguacuaacuugucaaggaagugacgacauaaaaagauuacuagacagccaaggaagaagagauauaaaauuaauagacauagcguuaucaaaagcagacuccagacgauuugaaaacgcaguaugggaucaaugcaaggauuuaugccauaugcauacaggagucguaguagaaaaaaaaaagcguggcggaaaagaagaaauaacaccccauugugcauuaauggauugcauaauguaugaugcagcaguauccggaggacucaacauaccaguccuaagagcaguccucccaagggauauggucuuuagaacauccucacccaaaguaguauuauaa

SEQ ID NO: 9429 - RNA, 1710 nt, Artificial Sequence
  derived and/or modified CDS sequence (opt6) from LASV(LASV254-NIG-2011;Clade II)__AIT17675__NP
augagugcaucuaaagaaguaaaaucauuuuuauggacccaaucgcucagaagagaauugaguggauauugcaguucaauuaaauugcaaguuguaaaagacgcacaagcacuauuacauggucuagauuuuagcgaaguaucaaauguucaacgcuuaaugcgaaaacaaaaacgagaugacagugacuuaaaaagacuaagagacuuaaaucaagcaguaaacaauuuaguagaacuaaaaaguacacaacaaaaaucuguauuaagaguaggaacauuaacaagcgaugauuuacucacauuagcagcugaucuagaaaaauuaaaaucaaaaguaauaagaacagaaagaccauuauccagcggaguauauaugggaaauuuaucaacacaacaauuagagcaacgacgugcauuauuaaacaugauaggaaugguagguggagcacaaggcacgcaaccaggaagagacggaguaguaagaguaugggaugucaaaaacccugaccuacuaaauaaucaauuuggaacaaugccaucauugacauuagcaugucuuacaaaacaaggacaaguagacuuaaaugacgcgguacuagcacuaacagauuuaggauuaauauauacagcaaaauauccaaauucaucagaccuugauagauuaagucaaagccacccaauacuuaauaugguagauacaaagaaauccagucuaaacauuagcggcuacaauuucagccuaggagcagcaguaaaagcaggagcgugcauguuggacggaggaaauaugcuagaaacaauaaaagugacuccccaaacaauggacggaauauuaaaaucuauacuaaaaguaaagaaaagccuaggaauguucguaagugauacaccaggagaaagaaauccauaugaaaauauauuauauaaaauaugucuaagcggugauggauggcccuauauagcaaguagaacaucgauaguggguagagcaugggaaaauacuaucguagaucuagagagugauggaaaaccucaaaaaguaggaacggcaggaucaaacaaaucauuacaaucagccggauuuccaacaggacuaacauauucacaauuaaugacacuaaaagauaguaugaugcaacuagacccaagugcaaaaaccuggauagauauagaaggaagaccagaagaccccguagaaauagcauuauaucaaccaaugucaggauguuacauacacuuuuucagagaaccaacugauuuaaaacaauuuaaacaagaugcuaaauacagucauggaauagaugucgcagacuuauucccagcacaaccagguuuaacaagugcaguaauagaagcauuaccgagaaauaugguucucacuugucaaggaagugacgauauaaaacgacuacuugauucacaaggaagaagagacauaaaauuaauugauauagcauuaucaaaagcagauaguagaagauucgaaaaugcaguaugggaucaauguaaagaccucugucacaugcauacaggaguaguagucgagaaaaagaaacgaggaggaaaagaagaaauuacaccgcauugugcauuaauggauugcauaauguaugacgcugccguaucaggaggacuuaauauucccguguuaagggcaguauuaccaagagacaugguauucagaacuucaucacccaaaguaguacuauaa

SEQ ID NO: 9430 - RNA, 1710 nt, Artificial Sequence
  derived and/or modified CDS sequence (opt6) from LASV(LASV256-NIG-2010;Clade II)__AIT17679__NP
augagcgcaucaaaagaaguuaaaaguuuccucuggacacaaagcuuaagaagagaacuaagugguuauugcaguagcauaaaacuucaaguaguaaaagacgcccaagcacuacuacacggauuagacuucagcgaaguaucaaauguacaaagauuaaugagaaaacaaaaaagagaugauucagaucuaaaacgacuaagagaucuaaaucaagcaguaaauaauuuaguggaacuuaaaaguacacaacaaaaaucaauauuaagaguagguacauuaacaucagaugaucuacucacacuggcugcagaucuagaaaaguuaaaaucaaaaguaauuagaacagaacgaccacuaucaucagguguauacaugggcaaccuaucaacacagcaacuagaacaaagaagagcauuauuaaacaugauagguaugguaggaggugcccaaucaacgcaaccaggaagagacggaguaguaagaguaugggauguaaaaaaucccgauuuauuaaauaaccaauuuggcacaaugccaucacuuacccuagccuguuuaacaaaacaaggacaaguagacuuaaaugaugcaguauuagcauuaacagaucuaggccuuauauacacagcaaaauacccgaacucaucagauuuagacagguuaagccaaagucacccaauauuaaauaugguagauacuaaaaaaaguucacucaacauaaguggauacaauuucucacuaggugccgcaguaaaagcuggagcauguauguuagacggagguaacaugcucgaaacaauuaaagucacaccucaaacaauggauggaauacuuaaaucaauacuuaaaguuaaacguucauuaggaauguuuguuagugacacaccaggagaaagaaauccauacgaaaauauauuauauaaaauauguuuaucaggagaugguuggcccuauauagcaucaagaacaaguauaguaggcagagccugggaaaauacaacaguagacuuagaaucagauggaaaaccacaaaaaguaggaacagcugguucaaauaaaagcuuacaaagcgcaggauucccgacaggacuuacuuacagucaacucaugaccuuaaaagacucaaugaugcaauuagauccuagugccaaaacauggauagacauagaaggaagaccagaagacccagucgaaaucgcacuauaucaacccaugucaggauguuauauacauuuuuuccgcgaaccaacagaucuaaaacaauuuaaacaagaugcaaaauauucacacggaauagacguagcagacuuauucccagcacaacccggauuaacaagcgcaguaauagaagcacuaccaaggaauaugguacucacaugccaaggaagcgaugauauuaaaagauuacucgauucacaggguaggcgagacauaaaacuaauagauauagcucuaaguaaagcagauucacguagauuugaaaacgcaguaugggaccaauguaaagaccuaugucacaugcacacaggaguaguaguagaaaaaaaaaaaaggggcggaaaagaggaaauaacaccacacugcgcauuaauggacuguauaauguaugaugcagcaguuucaggaggacucaacauaccaguauuaagagccguccucccaagggacaugguauucagaacaaguucaccaaaaguuguacuuuaa

SEQ ID NO: 9431 - RNA, 1710 nt, Artificial Sequence
  derived and/or modified CDS sequence (opt6) from LASV(LASV263-NIG-2011;Clade II)__AIT17683__NP
augagcgcaaguaaagagguuaaaucauucuuauggacacaaagucuaagaagagaauuaaguggauauuguagcaacaucaaauuacaagucguaaaagaugcacaagccuuauuacacggccuagauuucucagaaguaucaaauguacaaaggcuaaugagaaaacaaaaaagagaugauucagauuuaaaaagauuaagagaucucaaucaagcaguaaauaauuuaguagaacuaaaaucaacacaacaaaaaucaauauuaaggguuggaacacucacaucugaugaccuacuaacccuagcagcagaucuagaaaaacuaaaaaguaagguaauuaggacagaaagaccacucucuucaggaguuuacaugggaaacuuaucaacucagcaacuagaacaacgaagagcauuauuaaacaugauaggaaugguaggaggagcacaaggaacacaacccggaagagaugguguaguaagaguaugggaugucaaaaauccggacuuauuaaauaaucaauucggaacaaugccaagucucacacuagcauguuuaacaaaacaaggacaagucgaucuaaacgacgccguauuagcccuaacagaucuaggacucauauacacggcaaaauacccaaauagcucagaccuggacagauuaagucaaucgcacccaauacuaaacaugguagauacaaaaaaaaguucauuaaauauaagcggauuuaacuuuucucuuggagccgcgguaaaagcuggagcauguaugcuagacggaggaaacauguuagaaacaauaaaaguaacaccacagacaauggauggaauacuuaaaucaauacuuaaaguaaaaaaaucacuuggaauguucguaucagauacaccaggagaaagaaacccauacgaaaacauacuauacaaaauaugcuuaucuggagaugguuggccauauauagcaucacgaacuaguauagucggacgcgcaugggaaaacaccacaguagacuuagaaagcgacggcaaaccacaaaaaguagggacagccggaucuaauaaaucauuacaaucagcuggguucccaacugggcuaacauacucacaauuaaugacacuaaaagacucaaugaugcaacuugacccaucugcaaaaacauggauugacaucgaaggcagaccagaagacccaguagaaauagcauuguaucaaccgaugagcggauguuauauacauuucuucagagaaccaacagacuuaaaacaguuuaaacaagacgcuaaauauucacacggaauagacguagcugaccuauucccagcacaaccaggauuaacuucugcuguaauagaagcucuaccaagaaauaugguuuuaacuugucaggguagugaugauauaaaaagauuauuagacucccaagguagaagagacauaaaacuaauagauauagcauuaaguaaagcagauuccagaagauucgaaaaugcuguaugggaucaauguaaagaccuaugucacaugcauacugguguaguaguagaaaaaaaaaaaagagguggaaaggaagagauaacaccacacugugcacuaauggacugcauaauguaugaugcagcaguaucagguggauuaaauauaccaguauuacgagcaguauuaccucgagauaugguauucagaacaucaucuccaaaaguaguacuuuaa

SEQ ID NO: 9432 - RNA, 1710 nt, Artificial Sequence
  derived and/or modified CDS sequence (opt6) from LASV(LASV267-NIG-2010;Clade II)__AIT17687__NP
augucagcaagcaaagaaguaaaaucuuuccuauggacacaaagucuaagaagagaacuaucaggcuauuguaguucaauuaaauuacaaguagugaaagaugcacaagcccuauuacacggccuagauuuuucagaaguaaguaauguacaacguuuaaugagaaaacaaaaaagagaugacucagacuuaaaaagauuaagagaucuaaaccaggcagucaacaaccuaguagaauuaaaaaguacacaacaaaaaucaauauuaagagucggaacgcuaaccucugaugaccuucucacucuugccgcagaucucgaaaaauuaaaauccaaaguuauacgaacagaaagaccacuaagcucaggaguauauaugggaaauuuaagugcacaacaacuagaacaaagaagagcacuacuaaauaugauaggaauggugggaggugcacagggaacacaaccaggacgagacggcguaguacgaguaugggauguuaaaaauccugaccucuuaaauaaucaauucggaacaaugccaagccuaacacuggcaugcuuaacaaaacaaggacaaguagaccuaaaugacgcagucuuagcacuaacagauuuagguuuaauauauacagcaaaauauccaaacucaucagaccuagaccgguuaucacaaucacacccaauccuaaacaugguagacacaaagaaaucaagccuaaauauuucaggauauaacuuuucccuaggagcagcagugaaagcgggagcauguaugcuugacggagguaauauguuagaaacaauaaaaguaacaccacaaacaauggacggaauauuaaaaucuauacuaaaaguaaaaagaucacuaggcauguuuguaucagacacaccaggcgaaagaaaucccuacgaaaauauauuauacaaaauaugcuuaucaggugauggauggcccuauauugcaucaagaacaucaauaguaggacgagcaugggaaaauacaaccguagaucuagaaucugacggaaaaccccaaaaaguaggcacagcaggguccaauaaaucacuccaaucagcaggauuuccuacaggauuaacauauucacaacuuaugacauugaaagauaguaugaugcagcuagauccaucagcaaaaacauggauugauauagaagguagaccagaggacccaguagaaauagcauuauaucaaccuaugagcggcugcuacauacacuuuuuuagagaaccaacagaucuaaaacaauuuaaacaagaugcaaaauauucacauggaauagacguagcagaucuauuuccugcacaacccggauuaaccucagcuguaauagaagcacucccaagaaauauggucuuaacuugccaagguagugacgacauuaaaagacuauuagauucucaagggagaagagauauuaaauuaauagauauagcuuuaucaaaagcagacaguagacgauucgaaaacgcaguaugggaucaauguaaagacuugugccacaugcacacaggaguaguaguagaaaaaaaaaaacgaggagggaaagaagaaauaacaccacacugcgcauuaauggauugcauaauguacgacgccgcgguaucagguggccuaaauauccccguacuaagagcaguacuaccaagagacaugguauuuagaacauccaguccuaaaguaguccuauaa

SEQ ID NO: 9433 - RNA, 1710 nt, Artificial Sequence
  derived and/or modified CDS sequence (opt6) from LASV(LASV274-NIG-2010;Clade II)__AIT17695__NP
auguccgcaaguaaagaaguaaaaucuuuuuuauggacacaaagcuuaagaagagaacuuaguggauauuguucaaauauaaaauuacaaguuguaaaagacgcucaagcauuacuacacggacuagauuucagugaaguauccaacguacaaagacuaaugcgaaaacaaaaaagagacgauagcgauuuaaaaagauuacgagacuuaaaucaagcaguuaauaacuuaguagagcuaaaguccacacaacaaaaaagcauauuaagaguaggcacauuaacaagugaugauuuauuaacccuagcagcagauuuagaaaaauuaaaaucaaaaguuauaagaacagaaagaccacucucaaguggaguauauauggguaauuuaagcacacaacaauuagagcaaagaagagcucuauuaaacuuaauagguaugguaggaggagcacaaggaacccaaccagguagagacggagucguacguguuugggacgucaaaaacccagacuuacuaaauaaccaauucgggacaaugccaucacuaacacucgcuugucuuacaaagcaaggacaaguugauuuaaacgauguaguuuuagcucuaacagaccuuggccuaauauacacagcaaaauacccaaauagcagcgaccuugacagacucucacaaucacacccaauauuaaacauggucgauacaaaaaaaucaagcuuaaacauaucagguuucaauuuuucguuaggagcagcaguaaaagcaggagcauguaugcuugacggcggcaauauguuagaaacaauaaaagucacaccacauacuauggacggaauauuaaaaaguauacuaaaaguaaagaaaagucuaggaauguuuguaagugacaccccaggagaaaggaaucccuaugaaaacauauuauacaaaaucuguuuaucaggagauggcuggccauauaucgcaagcagaacaagcauaguaggaagagcuugggaaaacacaacaguagaucuagaaucggauggaaaaccccacaaaguaggaacggcaggaucaaauaaaucauuacaaagugcuggcuuuccaacuggacuaacauauucacaacuuaugacauuaaaagacucaaugaugcaauuagauccaucagcaaaaaccuggaucgauauagaaggaagaccagaagacccaguagaaaucgcauuauaucaaccaaugucaggaugcuacauucauuuuuucagagaaccuacagauuuaaaacaauucaaacaagacgcaaaauacucacaugggauagacguugccgaccuauuucccgcgcaaccuggcuuaacaucagcaguuauagaagcacuaccaagaaacaugguauuaacaugucaaggcuccgaugacauaaaacgccuauuagauucucaaggucgacgagacauaaaacuaauagauauagcauuaaguaaagccgauaguagaagguucgaaaacgcuguaugggaccaauguaaagaucuaugccauaugcauaccggagucgucguagaaaaaaaaaaaagaggaggaaaagaagaaauaacuccgcacugugcauuaauggauugcauaauguaugacgcagcuguauccggcgguuuaaauauaccagugcucagagcaguacuaccacgugacaugguuuucagaaccucuucacccaaaguaguauuauaa

SEQ ID NO: 9434 - RNA, 1710 nt, Artificial Sequence
  derived and/or modified CDS sequence (opt6) from LASV(LASV719-NIG-2009;Clade II)__AIT17705__NP
augucagcaagcaaagaaguaaaaaguuucuuauggacacagucacuacgaagagaauuaucaggauauuguucaaauauaaaacuucaaguuguaaaagaugcacaagcauuacuacacgguuuagauuuuucagaaguuucaaacguacaaagguuaaugagaaaacaaaaacgagacgacucagaucuaaaaagauuaagagauuuaaaucaagcaguaaauaauuuaguagaacuaaaaagcacucaacagaaaucaauauuaaggguaggaacccuuacuucagacgauuuauuaacauuagcagcagauuuagaaaaacuaaaauccaaaguuauaagaaccgaaagaccucuaagcuccggagucuauaugggaaauuuaaguacucaacaauuagaacaacgaagagcacuauuaaacuuaauaggaauggucggcggcgcacaaggaacacaaccuggacgugauggagucguaagagucugggauguaaaaaauccagaccuauuaaacaaccaauuuggaacaaugccaucccuaacauuggccugccuaacuaaacaaggacaaguagauuuaaaugaugcagucuuagcauuaacugaucuuggacuaauauauacagcaaaauauccaaauaguucagacuuagacagauuaagucaaucacacccaauauuaaacaugguagacaccaaaaaaucguccuuaaauauuucaggauucaacuucagcuuaggagcagcuguaaaagcaggggccugcauguuagacggaggcaacaugcuugaaacaauaaaaguaacaccacagacaauggauggaauauuaaaauccaucuuaaaagucaaaaaaucauuaggaauguuuguaagcgauaccccaggagaaagaaauccguacgaaaacauacuauacaaaauuuguuuaagcggagacggauggccauauauagccucacgaacaucaauaguaggaagagcaugggaaaacacuaccguagaucuagaaagcgacgguaaaccccacaaaguaggaacagcaggaucaaacagaucauuacaaucugcuggguuuccaacaggauugaccuauucacaauuaaugacacuaaaagauucaaugaugcaauuagauccaagugcgaaaacauggauagauaucgaaggucguccagaagauccaguagaaauagcauuauaucaaccuaugagcggcugcuauauacacuuuuuuagagaaccaacagaucugaaacaauucaaacaagacgcaaaauauagccaugguauugacguggcagaccucuuucccgcacaaccaggacuuacaagugcuguaauagaagcguuaccuagaaacaugguauuaacaugccaaggaucagaugauauaaaaagacucuuagacagccaaggucgaagagacauaaaauugauagauauagcauuaucaaaagcagacucaagaagauucgaaaacgcaguaugggaucaaugcaaagauuuaugccacaugcauacaggcguaguagucgaaaaaaaaaaacgcggaggaaaagaagaaauaaccccucauugugcacuaauggauuguauaauguaugacgcagcaguaucaggaggacuaaacauaccaguacuaagagcaguauuaccaagagauaugguauucagaacaaguucacccaaaguaguacucuaa

SEQ ID NO: 9435 - RNA, 1710 nt, Artificial Sequence
  derived and/or modified CDS sequence (opt6) from LASV(LASV737-NIG-2009;Clade II)__AIT17711__NP
augucagcaucaaaagaaguuaaaaguuucuuauggacacaaucauuacgaagagaauuaucuggauauuguucaaacauaaaauuacaaguuguaaaagacgcacaagcacuacuccacggacuugauuucucagaaguaucaaacguacaaagauuaaugagaaaacaaaaaagagacgauucagaucuaaagagauuaagagaccuaaaccaggcaguuaacaacuuaguagaacuaaaaaguacacaacaaaaaucgauauuaagaguuggaacauuaaccucagacgaccuucuaacacucgcagcagacuuagaaaaacuaaaaagcaaagucauaagaacggaaagaccauuaucaucagguguauauaugggaaaucuaucaacacaacaacuggaacagagacgagcacuacuaaaccuaauaggaaugguuggaggugcacaaggaacccaaccuggcagagauggcguagucagaguaugggauguaaaaaacccagaucuacuaaauaaccaauuuggcacaaugccuucacucacauuagcaugcuuaacaaaacaaggacaaguggaccuaaacgaugcaguucuagcucuaacagaucuuggauuaauauacacagcaaaauacccaaacagcucagaucuagacagacuaucacaaagucauccuauuuuaaacaugguagauacuaaaaaaucaucauuaaacauaaguggauuuaacuucucguuaggagcugccgucaaagcaggagcauguaugcuugacggaggaaacauguuagaaacaauaaaaguaacaccacaaacaauggauggcauauuaaaaucaauacuaaaaguaaaaaaaaguuuagguauguucgucagcgauacaccaggugaacgaaauccauaugaaaauaucuuauacaaaauauguuuaucaggagauggauggccauauaucgcuucaagaacaucaauaguuggacgugccugggaaaauacaacaguagacuuagaaagcgauggcaaaccacacaaaguuggaacagcaggaaguuccaaaucacuucaaagcgcaggauuuccgacaggacuaacauauagucaauuaaugacacuuaaagauaguaugaugcaacuagacccgucagcuaaaacauggauagacauagaaggccgacccgaagacccuguugaaauagcauuauaucagccgaugucaggcuguuacauacacuuuuuuagagaaccaacagauuuaaaacaauucaaacaagaugcaaaauacagucauggaauagacguugcagauuuguuuccugcacaaccaggcuuaacaagcgcaguuauagaagcacuuccaagaaauaugguguuaacaugucaaggaucagaugacauuaaaagacuccuagacagucaaggacgaagagacauaaaauuaauagauauagcucuaaguaaagcagacucaagaagauucgaaaacgcagugugggaccaauguaaagacuuaugccacaugcacaccggaguaguaguagaaaaaaaaaaacgaggaggaaaagaagaaaucacaccacacugcgcauuaauggacuguauaauguaugacgcagcaguaaguggaggauuaaacauaccaguacuaagagcaguauuaccgagagacaugguauucagaaccaguagucccaaaguaguacuauaa

SEQ ID NO: 9436 - RNA, 1710 nt, Artificial Sequence
  derived and/or modified CDS sequence (opt6) from LASV(LASV738-NIG-2009;Clade II)__AIT17713__NP
augucugcgucuaaagaaguaaaaucauucuuauggacacaaucacucagaagagaauuaaguggcuauugcucaaacauaaaacuacaaguaguaaaagaugcacaagccuuacuccacggauuagauuucucagaaguaaguaacguucaaagauuaaugagaaaacaaaaaagagacgauuccgaucuuaaaagauuaagagauuuaaaucaagcaguaaauaaccuugucgaacucaaaucaacacaacaaaaaagcauacuaagaguuggaacacucacgucagacgacuuacuuacauuagcagcagacuuagaaaaauugaaauccaaaguaauaagaaccgaacgaccuuuaaguaguggagucuacaugggaaacuuaucaacacaacaacucgaacaacgcagagcacuauuaaauaugauugguaugguuggaggagcccaaggcacacaaccaggaagagacggaguaguaagaguaugggacguaaaaaacccggaccuauuaaauaaccaauucggaacaaugccuagccuaacucuagccugccuaacaaaacaaggacaaguagacuuaaaugaugcaguguuagcacuaacagaccuuggacucauauauacagcaaaauacccaaacaguucagaccuagacagacuaucacaaagccacccaauacuaaacaugguagacauaaaaaaaucaucacuaaacauaaguggauauaacuucucauuaggagcagcaguaaaagcaggagcauguauguuagacggcgguaauauguuagaaacaauuaaaguaacaccacaaacaauggaugguauauuaaaaagcauauuaaaaguaaaaaaaucacuaggaauguuuguaagcgauacaccaggagaaagaaacccauaugaaaauauccuuuacaaaauaugcuuaucgggugacggauggccauauauagcaucuagaaccucaauaguaggaagagcaugggaaaauaccacaguagaucuugaaucugacggaaaaccacaaaaaguaggaacagcagguagcaauaaaucauuacaaagcgcagguuuuccaacaggacuaacauauucacaguuaaugaccuuaaaagauucaaugaugcaauuagauccaagcgcaaaaaccuggaucgauauagaaggcaggcccgaagauccaguagaaauagcauuauaccaaccaaugagcgguugcuacauucauuucuucagggaaccaacagauuuaaaacaauucaaacaagacgcuaaauauagucaugguauugacguagcagauuuauuuccagcgcaaccaggcuuaacaucagcaguaauagaagcauuaccaagaaauaugguauuaacuugccaaggaagugaugauauaaaaagacuacuugauagccaaggacgaagagacauaaaauuaauagauaucgcacuaaauaaagcagauucaagaagauuugaaaacgccguuugggaccaauguaaagacuuaugccauaugcacacagguguaguuguagaaaaaaaaaaacgaggagguaaagaagaaauaacuccacauugugcguuaauggauuguauaauguaugaugcagcuguuucaggaggauuaaauauaccaguacuaagagcaguucuuccuagagacauggucuuuagaacuuccucuccaaaaguaguacuauga

SEQ ID NO: 9437 - RNA, 1710 nt, Artificial Sequence
  derived and/or modified CDS sequence (opt6) from LASV(LASV966-NIG-2009;Clade II)__AIT17719__NP
augucagccucaaaagaagugaaaucauuucuauggacacaaucacuaagaagagaauuaagcggauauuguucaagcaucaaauuacaaguaguaaaagaugcucaagcgcuauugcauggccuggacuucucugaaguaaguaauguccaaagauuaaugcgaaaacaaaaaagagacgauagugaucugaaacguuuaagagacuuaaaccaagccguaaauaauuuaguagaacuaaaaucaacacaacagaaaucaauauuacgaguaggaacacucaccagugaugacuuacuaacacuagcagcagauuuagaaaaacugaaaucaaaaguaauaagaacagaaagaccacucagcucaggaguauauaugggaaaccuuaguacacaacaauuagaacaaagaagagcauuacuaaacaugauuggaaugguaucaggagcccaaggcacccaaccagguagagacggugucguuagagucugggauguaaagaacccagaacuacuaaauaaucaauucggaacaaugcccucauuaacacuagcuugcuuaacaaaacaaggacaaguugaccuaaacgaugcaguauuagcauuaacugaccuaggacuaauauauacagcuaaauauccaaauucaagcgacuuagauagacuaucccaaucacacccaauccuaaauaugguagauacaaaaaaaagcucauuaaauauaaguggcuacaacuucaguuuaggugcagcagugaaagcaggugcauguauguuagacggaggaaacauguuagaaacaauaaaagugacaccacaaaccauggacggaauacucaaaagcauacugaaaguaaaaaagucacucggaauguuuguaucagauacaccaggagaaagaaacccauaugaaaauauacuauacaaaauaugucuaucaggugacggauggccuuauauagcaucaagaacaucaauaguaggacgagcaugggaaaauacaacaguagauuuagaaagugauggcaaaccacaaaaaguaggaacagcuggaaguaauaaaucacuacaaucagcaggauuuccaaccggcuuaacuuauagucaacuaaugacauuaaaagauagcaugaugcaacuugauccgagugcaaaaacguggaucgacauagagggaagaccagaagauccaguagaaaucgcuuuauaccaacccaugagcggaugcuauauucacuucuuuagagaaccaacagaccuaaaacaauuuaaacaagacgcaaaauauucacaugguauagacguugccgaccucuuuccagcacaaccaggauuaacaucagcaguaauagaagcacuaccaagaaauaugguauuaacaugucaaggauccgacgauauaaaaagacuauuagacagccaaggaagaagagacauaaaauuaauagacauaaguuuaaguaaagcagacagucgaagauucgaaaaugcagucugggaucaauguaaagaccugugccauaugcacaccggaguaguaguagaaaaaaaaaaaaggggaggaaaagaagaaauaacaccucacugcgccuuaauggacuguaucauguacgaugcagccguaucgggaggauuaaauaucccaguacuacgcgcaguauuaccaagagauaugguuuuccguacaucaucuccuaaagucguacuauaa

SEQ ID NO: 9438 - RNA, 1710 nt, Artificial Sequence
  derived and/or modified CDS sequence (opt6) from LASV(LASV969-NIG-2009;Clade II)__AIT17725__NP
augagcgcaucaaaagaagugaaaucauuccuguggacacaaagucuuagaagagaauuaucaggauauugcucaaauauuaaacuucaaguaguaaaagaugcacaagcauuauuacauggacucgacuucucagaaguaucaaauguacaaagauuaaugagaaaacaaaaacgagaugacagugaucuuaaaagauuaagagaccuaaaucaagcagucaacaauuuaguagaauuaaaaucgacucaacaaaaaucaauauuaagaguugggaccuuaacaagugaugaucuauuaacauuagcagcagaucuagaaaaauuaaaaaguaaagucauaagaacagaaagaccacuauccagcggagucuauaugggaaacuuauccgcacaacaauuagaacaacguagagcucuauuaaauaugauaggcaugguuggaggugcacaaggaacucaauuaggaagagacggugucguuagaguuugggaugucaaaaaucccgaccuacuuaacaaccaauuugguacaaugccaucacuaacgcuagcuugcuuaacaaaacaaggucaaguagauuuaaaugaugcaguacuagcacugacagauuuaggucuaaucuauacagcuaaauauccaaauagcagcgaccucgacagacucucacaaucucaccccauauuaaacaugguggauaccaagaaaucaucguuaaacauuucaggauacaauuuuucuuuaggugccgccguaaaagcuggagcauguauguuagacggaggaaacaugcuagaaacaauaaaaguuacaccacaaacaauggacggaauacuaaaaaguauauuaaaagucaagaaaucacuaggaauguucguaucagauacaccaggagaaagaaacccauacgaaaauauacuauauaaaauuugucuaucuggagauggauggccauacauagcaaguagaacaaguauaguagggagagcuugggaaaacacaaccguagaucuagaaucagacgggaaaccacaaaaaguaggcacugcaggauccaauaaaucauugcaaagugcaggcuucccaacaggcuuaacauacucacaacuaaugacuuuaaaagacagcaugaugcaacuagacccaagugcaaaaacauggauagauauagaaggaagaccagaagacccaguagaaauagcacucuaucaaccuaugaguggcuguuacauucacuucuucagagaaccaacagacuuaaaacaauuuaaacaagacgcaaaauauucacauggaauagauguagccgauuuauucccagcacaaccaggauuaacgagugcuguaauagaagcauuaccaagaaauaugguauuaacuugccaaggaucagaagauauuaaaagacuauuggacucacaaggaagaagagauauaaaacuaauagauauagcauuaucaaaagcagacaguagaagauuugaaaacgcaguaugggaccaauguaaagaucuaugccauaugcauacaggaguaguaguagaaaagaagaaacgcggaggaaaagaagaaaucacaccacauugugcauuaauggauugcaucauguacgacgcggcaguaaguggaggguuaaauauaccaguauuacgagccguucuaccccgagacaugguauuuagaaccuccaguccaaaaguuguauuauga

SEQ ID NO: 9439 - RNA, 1710 nt, Artificial Sequence
  derived and/or modified CDS sequence (opt6) from LASV(LASV971-NIG-2009;Clade II)__AIT17729__NP
augucagccucaaaagaagucaaaaguuucuuguggacccaaagucuccgaagagaauuaucagguuacuguagcagcauaaaauuacaaguaguaaaagaugcucaagccuuauuacauggacuugauuuuucagaaguauccaacguacaaagauuaaugagaaaacaaagaagagacgauucagaucuaaaacgauuaagagauuuaaaucaagccguaaauaaccuaguagaauuaaaaucaacacaacaaaaaucaauauuaagagucggcacacugacaagcgacgacuuacuuacauuagcagcagaccuagaaaaauuaaaaucaaaaguaauacgaacagaaagaccauugucgucagguguauauaugggaaauuuaaguacacaacaacuagaacaaagacgagcucuacuaaacaugaucggaaugguaggaggaacacaaggaacacaaccuggcagagauggagucguaagaguaugggacguuaaaaacccagaccucuugaacaaccaauucggaacuaugccgucacuaacuuuagcuugucucacaaaacaaggucaaguagaccuaaaugaugcuguacuagcauuaacagacuuagggcuaaucuacacagcuaaauauccaaauagcucugauuuagacagauugucacaaucacacccuauacuaaacaugguagauacaaagaaaaguucuuuaaauauaucaggauauaauuuuagucuuggagcagcaguaaaagccggagcauguauguuagacgguggaaauauguuagaaacaauaaaagucacaccacaaacaauggacggaauacucaaaucgauccuaaaaguaaaacgaagccuaggaauguucguaagugauacaccaggagaacgaaauccauaugaaaauauauuauauaaaauauguuuaucaggagacggauggccauauauagcaucaagaacgucuauaguagguagagcuugggaaaauacuacaguagaccucgaaucagauggaaaaccacaaaaaguuggaacugcaggaucaaauaaaucacuacaaagugcaggauuuccaacaggauuaacauauucacaauuaaugacauuaaaagauucaaugaugcaauuagacccguccgcaaaaacguggauagauauagaaggaaggccagaagauccaguagaaauagcauuauaucaaccuaugagcggaugcuacauacacuucuucagagaaccaacagaucuaaaacaauucaaacaagaugccaaauacucacauggaauagacguagcagaccuauuuccagcucaaccgggauuaacaucggcaguuauagaagcacuuccaagaaacaugguauuaacaugccaaggaagugaugauauaaaaaggcuauuagacagucaaggacgaagagacauaaaauuaauagacauagcauuaucaaaagccgacucgagaaaauucgaaaacgcaguaugggaccaaugcaaagauuuaugucauaugcauacuggaguuguaguagagaaaaagaaaagaggggguaaagaagaaauaacaccacacugugcacuaauggacugcauaauguacgacgcagcaguaucagguggacuaaauauuccaguucuaagagccguacuaccaagagacaugguauucagaacaucaaguccaaaaguaguacuauaa

SEQ ID NO: 9440 - RNA, 1710 nt, Artificial Sequence
  derived and/or modified CDS sequence (opt6) from LASV(LASV975-NIG-2009;Clade II)__AIT17733__NP
augucugcauccaaagaaguaaaaucuuuucuuuggacacaaucucuaaggcgcgaauuaagugguuauugcucaaauaucaaauuacaaguaguaaaagaugcacaagcacuccuccauggauuagauuucagugaaguaaguaauguacaaagauuaaugagaaaacaaaaaagagaugacagcgaccuaaaaagacuaagagaccuaaaccaagcaguaaauaauuuaguagaacuuaaaagcacacaacaaaaaucaauuuuaagaguaggaacucuaacuucagacgaucuacuaaucuuagcagcggaccuagaaaaacuaaaaucaaaaguaauaagaacagaaagaccauuaucaucaggaguauacaugggaaaucuaagcacacaacaacuagaacaaagaagagcauuauuaaauaugauaggaaugguuggcggagcccaaggaacacaaccaggaagggauggagucguacgaguuugggauguuaaaaacccggauuuacuuaacaaccaauucggaacaaugccaaguuuaacauuagcaugucuaaccaaacaaggacaaguagauuuaaacgacgcaguccuagcucuaacagaccuuggacuuauuuauacggcaaaauauccgaauagcucagaucuagacagacuaagucaaagccacccaauacucaauaugguagauacaaaaaaaaguagccuaaauauaucaggauauaacuuuagccuuggagcagcaguaaaagcaggugccugcaugcuagauggaggaaacaugcuagaaacuauaaaaguuacaccacaaacaauggaugguauauuaaaaagcauacuuaaaguaaaaaaaagccuaggaauguucguaucugacacaccuggagaaagaaauccguacgaaaauauauuauacaaaauauguuuaucaggagacggauggccauauauugcaucucgaacaucaauagucggaagagcgugggaaaauacaaccguagaccucgaaagugacggaaaaccucaaaaaguuggcacagcaggaucaaacaaaucauuacaaucggccggauuuccaacaggacuuaccuacucucaauuaaugacauuaaaagacucaaugaugcaacuagacccuucagcuaaaacuuggauagacauagaaggaagaccagaagacccaguugaaauagcacuauaucagccuaugucaggauguuacauacauuuuuucagagaaccaacggaucucaaacaauucaaacaagacgcaaaauauagucauggaauagacguagcggaccuguucccagcucaaccagguuuaacuagugcaguaauagaagcgcuaccaagaaacaugguacuuacuugucaaggaucagaugauauaaaacgccucuuagacagccaaggcagaagagacauaaaauuaauugacauagcacuuucaaaagcagacaguagaagauuugaaaacgccgucugggaucaaugcaaagaccucugccauaugcauacgggaguagucguagaaaaaaaaaaaagagguggaaaagaagaaauaacaccacauugugcauuaauggacuguauaauguaugaugcugcagucucagggggacuaaauauuccaguacuaagagcaguauuaccuagagauaugguauuuagaaccucaucuccuaaaguaguacucuaa

SEQ ID NO: 9441 - RNA, 1710 nt, Artificial Sequence
  derived and/or modified CDS sequence (opt6) from LASV(LASV978-NIG-2009;Clade II)__AIT17745__NP
auguccgcaaguaaagaaauaaaaaguuuccuuuggacgcaaaguuuaagaagagaacuaucaggauauuguucgaguauaaaauuacaaguuguaaaagacgcccaagcauuauugcacggacuagauuucucagaaguaagcaauguacagagauuaaugagaaagcaaaaacgagacgauucagaucuaaaaagacuacgagacuuaaaucaagcaguaaauaacuuaguagaauuaaaaaguacgcaacagaaaucaauucuaagaguaggaacacuaacuucagacgacuuacuaacccuagcagcagaucuggaaaaauuaaagaguaaaguaauaagaacagaaagaccucucagcucaggggucuauaugggaaacuuaaguacccaacaacuagaacaaagaagagcacuauuaaacaugauaggaaugguaggaggagcacaaggcacccaaccaggcagagacgggguggucagaguuugggauguaaaaaacccugaccuauuaaauaaucaauuugguacaaugccaucauuaacuuuagcuugccuaacaaaacaaggacagguagauuuaaacgaugccgugcuagcuuuaaccgauuuaggauuaauauacacagcaaaauauccaaauucaucagacuuagacagauuaucgcaaucacacccaauacuuaacaugguagauaccaaaaaaaguucacuaaacauauccggcuacaauuuuucauuaggagcagcaguaaaagcaggagcuuguaugcuagacggaggaaacaugcuagaaacaauaaaaguaaccccacaaacaauggauggaauauuaaaaucaauacuuaaagucaaacgaucacuaggaauguucguaagcgaugcaccaggagaaaggaacccauaugaaaauaucuuauauaaaauauguuuaucaggugauggcuggccauacaucgcuaguagaacaucaauaguaggaagggcaugggaaaacacaacuguagacuuagaaucagacggaaaaccucaaaaaguuggaacugcagguaguaauaaaagcuuacaaucagcaggauucccaaccggcuuaacauauagucaacuaaugacacuaaaagauuccaugaugcaacuagauccaagcgcaaaaacauggauagauaucgaaggaagaccagaagaucccgucgaaauagcacuauaccaaccaaugucuggcuguuauauucacuuuuuuagagaaccuacagaucucaaacaauuuaaacaagacgcuaaauauucacauggcauagacguagcagauuuauuuccagcacaaccaggccuaacauccgcuguuauugaagcacuaccacguaauaugguauuaaccugucaaggaucugacgacauuaaaagauuauuagacucacaaggacgaagagacauaaaacuaauagauauugcucuaaguaaaguagacucacgaagauucgaaaaugccguaugggaucaaugcaaagacuuaugccacaugcauaccggaguaguuguugaaaaaaaaaaaaggggagguaaagaagaaauaacaccacacugugccuuaauggacugcauaauguaugacgcugcaguaucaggaggauuaaauauaccgguauuaagagcuguacuaccaagagauaugguauuuagaacaucaucaccaaaaguaguguuauaa

SEQ ID NO: 9442 - RNA, 1710 nt, Artificial Sequence
  derived and/or modified CDS sequence (opt6) from LASV(LASV981-NIG-2009;Clade II)__AIT17753__NP
augucagcaaguaaagaaguaaaaucauuccuauggacucaaaguuuaaggcgcgaacuaucuggcuauugcuccucaauaaaauuacaaguaguaaaagaugcacaagcgcuauuacacggacucgauuuuucagaaguaucaaacgugcaaagacuaaugcgaaaacagaaaagagacgacagcgaccuaaaacgauuaagagaucuaaaucaagcaguuaauaaccuaguugaauuaaaaaguacacaacaaaaaucuauauugagaguaggaacauuaacuucagaugauuuacuuaccuuagcagcagaucuugaaaaacuaaaaagcaaaguaauaagaaccgaaagaccccucucuucaggaguauauaugggcaacuuaagcacgcagcaacucgaacaaaggagagcacuacuaaacaugauaggaauggucggaggagcacaaggaacacaaccgggaagagacggaguaguaagagucugggauguuaaaaauccagacuuacuaaauaaccaauucggaacaaugccuucacuaaccuuagcauguuuaacaaagcaaggacaaguagauuuaaaugacgcaguacuugcacuuaccgacuuagguuuaauauauacagcaaaauaccccaauagcagugauuuagauagacuuucacaaucacauccaauauuaaacaugguagauacaaagaaaucaagucuuaauauaucaggauauaacuucucauuaggagcugcagucaaagcaggagcuugcauguuagacggaggaaauaugcuagaaacaauaaaaguaacgccacaaacaauggacggaaucuuaaaaagcauacuaaaaguaaaaagaucauuaggaauguucguuagcgauacaccuggagaaagaaauccauacgaaaauauacucuauaaaauaugccuaucuggagauggcuggccuuauauugcaucaagaacuucaauaguaggacgagcaugggaaaauacaacuguagaucuagaaucagauggaaaaccucaaaaaguaggaaccacagguaguaauaaaucauuacaaucagcaggauuuccaacaggauuaaccuauucacaacuaaugacauuaaaagacucaaugaugcaauuggauccaucagcaaaaacuuggauagauauagaaggacgacccgaagaccccguagaaaucgcuuuauaccaaccaaugucaggcugcuauauacauuucuuuagagaaccuacagauuuaaaacaauuuaaacaagacgccaaauauagccauggaauagacguugcagaccuuuuuccagcacaaccaggauuaacaagugcaguaauagaagcauuaccaagaaacaugguacuaacaugucagggcuccgacgauaucaaacgacuauuagacucacaaggccgaagggauauuaaacuaaucgacauagcucuuucaaaagcagacucacgacgauuugaaaacgcaguaugggaccaauguaaagaccucugccauaugcauacaggagucguaguugaaaagaagaaacgaggagguaaagaagaaauaacaccucauugcgcacuuauggacuguauaauguaugacgcagcuguuucaggaggcuuaaauauaccaguauuaagagcaguauugccaagggauaugguauuucgaacaucaucaccaaaagucguauuauaa

SEQ ID NO: 9443 - RNA, 1710 nt, Artificial Sequence
  derived and/or modified CDS sequence (opt6) from LASV(LASV988-NIG-2009;Clade II)__AIT17759__NP
augucagcaucuaaagaagucaaauccuuucuauggacucaauccuuacgccgagaacucagcggauauugcucaaauauaaaauugcaagucguaaaagacgcacaagcacuacuacauggucucgauuuuagugaaguaucaaauguacaacgacuuaugagaaaacaaaaaagagacgauuccgaccuaaaaaggcuaagagaccuuaaucaagccguaaacaacuuaguagaacuaaaaucaacacaacaaaaaucuauacuaagaguuggcacucuaacuucagaugacuuauuaacacuugcugcagaccucgaaaaacuaaaaucaaaaguaauaagaacagaaagacccuuaaguucaggaguauauaugggcaacuuaaauacacaacaauuagaacaaagaagagcccuauuaaauaugauaggaauggcaggaggagcacaaggcacacaaccaggucgagacggaguaguacgaguaugggauguaaaaaauccagacuuauuaaacaaccaauucggaaccaugccuucacucacauuagcaugucucacaaaacaaggacaaguagaucuaaacgaugcaguauuagccuuaacagacuuagguuuaauuuauacagcaaaauaucccaauucaagcgaucuagauagauuaagccaaagucacccuauacuaaauaugguagacacaaaaaaaagcucacuaaacauaucaggauacaauuuuucacuaggagccgcuguaaaagcaggagcuuguaugcuugacggugguaacauguuagaaacaauaaaaguaacaccacaaacuauggacggaauauuaaaaagcauacuaaaaguaaaaaaaagcuuagguauguuuguaucagauacuccaggagaaagaaacccauaugaaaacauacuuuacaaaauauguuuaucaggagauggauggccauauaucgcuucaagaacaucuauaguaggcagagcaugggaaaacacuacagucgacuuagaaucagauggaaaaccgcaaaaaguuggaacagccggaucaaacaaaaguuuacagucggcaggauuuccaacaggauuaaccuacucacaacuuaugacccucaaagauaguaugaugcaauuagauccgucagcaaaaacuuggauugacauagaaggaagaccagaagauccagucgaaauagcacuauaucaaccaaugaguggauguuacauacauuucuuuagagaaccuacugaucuaaaacaauuuaagcaagaugcuaaauacagucacgguaucgacguagcagacuuauuuccagcacaaccaggacuuacaucugcagucauagaagcauuaccaagaaacauggucuugacaugccaaggaucagacgauauaaaaagauuacuagauagucaaggaaggagagacauaaaacuuauagauauagcccuaucaaaagcagacucaagaagauucgaaaaugcaguaugggaccaaugcaaagacuugugccacaugcauacaggaguaguaguagaaaaaaaaaaaaggggaggaaaagaagaaauaacuccacacugcgcauuaauggacugcauaauguaugacgcugcugucuccgguggccuaaauauuccaguacucagagcaguacuaccaagagauauggucuucagaacaagcagcccuaaaguaguacuauaa

SEQ ID NO: 9444 - RNA, 1710 nt, Artificial Sequence
  derived and/or modified CDS sequence (opt6) from LASV(LASV989-NIG-2009;Clade II)__AIT17763__NP
augagcgcuagcaaagaaguuaaaucauuccuauggacccaaagccuaagaagagaacuuagcggauacugcucaagcauuaaacuacaaguaguaaaagacgcacaagcacucuuacacggacuagauuucucagaaguaagcaacguacaaagacuaaugagaaaacaaaaacgagacgacucagaucugaaaagauuaagagauuuaaaccaagcagucaauaaucuaguagaacuaaaaucaacacaacagaaaaguauauuaagaguaggaacacuaacaucagacgaucuuuuaacacuagcagcagauuuggaaaaacugaaaucaaaaguaauaagaacagaaagaccacuaucuucaggagucuacaugggaaauuuaagcacacaacaauuagaacaaagacgagcccuauuaaauaugauagguaugguaggaggggcucaaggaacccaaccaggacgagacggaguuguaagaguaugggauguuaaaaauccagaucuauuaaacaaccaguuuggaacaaugccuagccucacacuagcauguuuaacaaaacaaggacaaguagacuuaaaugaugcgguauuggcuuuaacagacuuaggauuaauauauacugcaaaauauccaaauagcuccgauuuagauagacuaagccaaagccauccaauacuaaauaugguagacacuaagaaaucaucguuaaauauaucggguuacaauuuuagucuaggagcagcaguaaaagcaggcgcaugcaugcuagacggagguaauaugcuugaaaccauuaaaguaacaccacaaacaguagacggaauuuuaaaaaguauccuaaaaguaaaacgaagucuaggaauguuugucuccgauacaccaggagaacgaaaucccuaugaaaacauacuauacaaaauauguuuaagcggagauggcuggccauauauugccaguagaacaucaauaguaggcagagcaugggagaacacgacaguagaucuagaaucagacgaaaaaccacaaaaaguaggugcagcgggaaguaauaaaagucuacaaagcgcaggauuuccaaccggauuaacauauucacaacuaaugacauugaaagauucaaugaugcaguuagauccaucagcaaaaacauggauugacauagaaggcagaccggaagauccaguagaaauagcacuuuaccaaccaaugagcggauguuauauacacuuuuucagagaaccaacagaccuaaaacaguucaaacaagacgcaaaauauucacaugguauugauguaacggaucuauuuccagcacaaccaggacuaacuucagcaguaauugaggcacuuccaagaaacaugguccuaacaugucaaggaucagaugacauaaaaagauuacucgauucccaaggacgaagagacauuaaacuaauagauauagcucuuucaaaagcagauucaagaagauucgaaaaugcuguaugggaucaauguaaagauuuaugccauaugcauacaggaguaguuguagagaaaaagaaaagaggaggaaaagaagaaauaacaccgcauugcgcauuaauggacuguauaauguacgacgcagcagugaguggaggacuuaacauaccaguauuaagagcaguacuacccagagauaugguuuuucgaacaucauccccaaaaguaguacuauaa

SEQ ID NO: 9445 - RNA, 1710 nt, Artificial Sequence
  derived and/or modified CDS sequence (opt6) from LASV(LASV991-NIG-2009;Clade II)__AIT17771__NP
augucagcaucuaaagaaguaaaaucauucuuauggacucaaucauuaagaagagaguuaucaggauacugcaguaguauaaaauuacaaguagucaaagaugcacaagcacuucuacacggauuagacuucagcgaaguuaguaauguacaaagauuaaugagaaaacagaaacgagacgauucagaucuaaaacgauuaagagaucuaaaucaagcaguaaauaaucuagucgaacuaaaaucaacacaacaaaaaucaauacuaagaguaggaacucucacaucagaugaucuauuaacacucgcagcagaucuagaaaaacuuaaaaguaaaguaauacgaacagagagaccacuaucgagcggagucuacauggguaaucuaaguacacaacaacuagaacaaaggagagcucucuuaaauaugauaggaauggugggcggugcacaaggcacacaacccggaagagacggagucguaagaguaugggauguuaaaaauccagauuuacuuaacaaucaauucggcacuaugccaucauuaacacuagcaugcuuaacaaaacaaggucaaguagacuugaaugacgcaguacuagcauuaacugaccuuggccuaaucuauacagcaaaauaucccaauucaucagaccuagacagacugagucaaucacauccaaucuuaaacaugguagacacaaagaaaagcagcuuaaauauaagcggauacaauuuuucuuuaggagccgcaguaaaagcaggcgcauguaugcuagauggaggaaacauguuagaaacaauuaaagucacaccacaaaccauggauggcauacuaaaaagcauacuaaaaguaaaaagaucacuaggaauguuuguauccgauacaccaggagaacgaaaccccuaugaaaauauauuauacaaaaucugcuuaucaggagauggauggccauacauagcaucaagaacauccauaguagguagagcuugggaaaauacaacaguugaucuggaaucugauggaaaaacccaaaaaguaucgacagcaggaagcaacaaaaguuuacaaagugcuggauucccaacagguuuaacauacucacaauuaaugacacuaaaagauucaaugaugcaacuagauccaucugcaaaaacauggaucgauaucgaaggcagaccagaagauccaguugaaauagcucuauaccaaccuaugucaggaugcuacauucacuucuuuagagaaccaacagaccuaaaacaauucaaacaagaugcuaaauauagccauggcauagauguaacagaucuauuuccagcucaaccaggacuaacaucugcaguaaucgaagcauuaccaaggaacaugguauuaacaugccaaggaagcgacgauauaaaaagguuauuagauucccaaggaagacgagacauaaaauuaauagacauagcacuaucaaaagcagacucaagaagauuugaaaacgcaguaugggaucaauguaaagauuugugccacaugcauacaggagugguuguagaaaagaagaaacgaggaggaaaagaagaaauaacaccacacugugcuuuaauggauugcauaauguaugacgcugcaguaagugguggcuuaaacauaccaguucuaagagcaguacuaccucgagauaugguauuuagaacaucuucaccaaaagucguauuauaa

SEQ ID NO: 9446 - RNA, 1710 nt, Artificial Sequence
  derived and/or modified CDS sequence (opt6) from LASV(LASV993-NIG-2009;Clade II)__AIT17779__NP
augagugcaucaaaagaaguaaaaucauucuuauggacccagagucuaaggagagaauugucaggauauugcaguaacaucaaacuacaagucguaaaagaugcacaagcauuauuacacggauuagauuucagcgaaguaucaaauguucaaagacuaaugcgaaaacagaaaagagaugauggagauuuaaaaagauuacgagaccucaaccaagccguaaauaaucuagucgaacucaaaagcacacaacagaaaaguauacuuagagugggaacauuaacuucagacgaucuauuaacuuuagcggccgaucuagaaaaauuaaaauccaaaguaauccgaacagaacgaccauuauccucaggaguauauaugggaaacuuaagcacgcaacaauuagaacaaagacgagcauuauuaaauaugauaggaaugguaggaggagcacaaggaacacaaccaggaagggauggaguaguaagaguaugggacgucaaaaacccagaucuacuaaauaaucaauuuggaacuaugccaagucuaacacuagcauguuuaacaaaacaaggucaaguagacuuaaaugacgcaguauuagcucuaaccgacuuaggacuuauauauaccgcaaaauacccaaauagcucagaccuagacagauuaagucaaucgcauccaauauuaaacaugguagauacaaagaaaucaagccuaaauauaaguggauacaacuucucauuaggagcggcagucaaagcaggagcauguauguuagacggaggaaauaugcuagaaacuauaaaaguuacaccacaaacaauggauggaauacuaaaaagcauauuaaaaguuaagaaaucacuaggaauguucguaagugacacaccaggagaaagaaaucccuacgaaaauauacuauauaaaauaugccuauccggugauggauggccauauauagcaucaagaacaaguauaguaggucgagcaugggaaaauacaacaguagaucuagaaagcgauggaaaaccacaaaaaguugggaccgcugguucaaauaaaucccuacaaucagcaggauucccuacaggacuaacauauucacaauuaaugacauuaaaagauucaaugaugcaacuagauccaagcgcaaaaacauggauagauauagaaggaagaccagaagacccaguagaaauagcucuauaucaaccaaugaguggauguuauauucacuuuuuccgagaaccaacagauuuaaaacaauuuaaacaagaugcaaaauauagccacggaauugacguaaccgaucuauuuagcgcucaaccaggacuaacaagugcugugauagaggcuuuaccaagaaacaugguacuaacaugccaagguagugacgacauuaaaagauuguuagauagucaagggagaagagauauaaaauuaauagauauagcgcuaucuaaaacagauucaagaagauucgaaaacgcaguaugggaccaaugcaaagaucuaugccacaugcauacugggguuguaguagagaaaaagaaaagaggaggaaaagaagaaauuacaccacacugcgcacuaauggacugcauaauguaugacgcugcggugucaggaggauuaaacauaccaguacucagagcaguacuaccaagagauaugguuuuuagaacaucaaguccaaaaguaguauuauaa

SEQ ID NO: 9447 - RNA, 1710 nt, Artificial Sequence
  derived and/or modified CDS sequence (opt6) from LASV(Nig08-04;Clade II)__ADU56611__NP
augagugcaucaaaagaagucaaaucauuccuuuggacacaaagccuaagacgagaacuaucaggauacugcucuaacauaaaauuacaaguuguaaaagacgcacaagcacuuuuacauggauuggauuucucagaaguaucaaacguucaacgacuaaugcgaaaacagaaaagagacgauggagaucuaaaaagacuaagagauuuaaaccaagccguaaauaaccuaguagaacuaaaaucgacacaacaaaaaucuguuuugagaguaggaaccuuaaccucugacgaccuacuaacacuugcagcagacuuagaaaaauuaaaaucaaaaguaaucagaacagaaagaccucucagcucaggaguauacaugggaaaucuaaguacacaacaacuagaacaaagaaaagcacuacuaagcaugaucgguaugguaggaggagcacaaggcacacaaccaggaagagacggaguaguuagaguaugggauguuaaaaauccagaccuacuuaacaaccaauucggaacaaugcccucauuaacuuuagcaugcuuaacaaaacaaggacaaguagaucuaaaugaugcaguucuagcccuaacagaucucggacuaauauauacagcaaaauacccaaauucaucagaucuagacagauuaucucaaucccauccaauacuaaacaugguagauaccaagaaaucaucacuaaacauuucaggauacaauuuuucacuaggagcagcaguaaaagccggagcaugcaugcuagauggaggcaacaugcucgaaacaauaaaaguaacaccccaaacaauggacgggauauuaaaaaguauacugaaaguuaaaagaucacuaggaauguucguaucagauacaccaggagaaagaaaucccuaugaaaauauucuauacaaaauaugccuaucaggugauggguggccuuacaucgcaaguagaacaaguauaguagggagagcaugggaaaauacaacuguagaucuagaaucugauggaaaaccacaaaaaguaggaacugcaggaaguaauaaaaguuuacaaagcgcaggauuuccuacaggauuaacuuauagucaacuaaugaccuuaaaagauagcaugaugcaauuagauccaagugcaaaaacauggauagacauagaaggucgaccagaagacccagucgaaauagcauuauaucaaccaaugucaggcuguuauauacacuucuuucgagaaccuaccgaucuaaaacaauuuaaacaggaugcaaaauauucacacgguauagacguuacagauuuauuuucagcacaaccagguuuaacuucagcaguaauagaagcguuaccaagaaacaugguccucacaugucaaggaucagaugauauuaagaaauuacuugacagucaaggaagacgagacauaaaacuuauagacaucucauuaaacaaagcagacucaagaagauuugaaaacgcaguaugggaccaauguaaagauuuaugccacaugcauacaggagucguaguagagaaaaagaaacgagguggaaaagaagaaauaacuccacauugcgcauuaauggauugcauaauguuugacgcagcugugaguggaggauuaaauauaccaauauuaagagccguacuaccaagagauaugguauuuagaacaaguucgccaaaagugguacuauaa

SEQ ID NO: 9448 - RNA, 1710 nt, Artificial Sequence
  derived and/or modified CDS sequence (opt6) from LASV(Nig08-A47;Clade II)__ADU56631__NP
augucagcaucaaaggaaguaaaaucauuuuuauggacucaaucauuacgaagagaauuaaguggauauuguaguaauauaaaacuacaaguaguaaaagacgcccaagcccuccuacauggacuugacuucucugaaguaucgaauguucaaagauuaaugaggaaacaaaaaagagacgacucagaucuaaaaagauuacgagaccuaaaucaagcaguaaauaauuuaguugaacuaaaaaguacacaacaaaaaucuauacuacgaguaggaacccuaacaagugaugaccuacucacauuagcagcagaucuggagaaauuaaaaucaaaaguaauaagaacagaaagaccacuauccaguggaguauauaugggaaauuuaagcacacaacaauuagaacaacgccgagcauuauuaaacaugauuggcaugguaggaggagcacagggaacccaaccaggcagagacggaguaguaagagugugggauguaaaaaacccagauuuacuaaauaaccaauucggaacaaugccaucauuaacccuggcauguuuaaccaaacaaggacaaguugacuuaaacgaugcaguauuagcacuuacagaucuaggauuaauauauacagcaaaauauccaaauucaucugaccuugaccgauuaucacaaucucacccaauauuaaacaugguagauaccaaaaaaucaagcuuaaacaucagcggauauaauuucagucuaggagcugcaguaaaagccggagcauguaugcuugauggagguaauaugcucgaaacaauaaaagucacuccacaaacaauggacggaauuuuaaaaagcauauuaaaaguaaaaaaaagcuuaggcauguucguaagcgacacccccggagaaagaaauccauaugaaaauauacuauauaaaauaugccuaucaggagacggauggcccuauauugcaucacgaaccucaauaguaggaagagcaugggaaaauacaacaguagaucuagaaucugauggaaaaccccaaaaaguaggaacggcaggaucaaacaaaucacuucaaagcgcagguuucccuaccggauuaacauauagucaauuaaugacccuaaaagauaguaugaugcaacuagauccaagugcaaaaacuuggauugauauugaaggacgccccgaagacccaguagaaauugcgcuauaucaaccaauguccggauguuacauccauuuuuuuagagaaccaaccgaucucaaacaauucaaacaagaugcaaaauauucacauggaauugacgugacagaucuauucccagcacaaccaggcuuaacuucagcaguaauagaagcacuuccaagaaauaugguccuaacaugucaaggaagugaugacauaaaaagacuacuagauagccaaggucgaagagacauuaaacuuauagacauagcauuaaguaaagcagacucaagaagguuugaaaaugcaguaugggaucaauguaaagacuuaugccauaugcauacaggugucguuguagaaaaaaaaaaacguggaggaaaagaagaaauaacaccucacugugcacuaauggauugcaucauguaugaugcagcuguaucaggaggauuaaauaucccaguacugagagcaguacuacccagagacaugguauuuagaacaucaucuccaaaaguaguacuauaa

SEQ ID NO: 9449 - RNA, 1713 nt, Artificial Sequence
  derived and/or modified CDS sequence (opt6) from LASV(GA391;Clade III)__AAA46284__NP
auguccgcuagcaaagaaguaagauccugcuuauggacacaaucacuaagaagagaacuaucaggauauugcucaaacauaaaauuacaaguaguaaaagacgcccaagcacuauuacacggacuagauuucucagaaguuucaaauguacaaagauuaaugagaaaacaaaaacgagacgacggcgaucuaaaaaggcuaagagaucuuaaucaagcaguaaauaaccuaguagaacuaaaaaguacacaacaaaaaucaguacuacgaguuggcacauuaucuagugaugauuuacuaauacuagcagccgauuuagaaaaacuaaaaucaaaagucacaagaacagaaagaccguuaucaucaggaguauauaugggaaacuuaucaucucaacaauuagaccaaagacgagcucuccuaaacaugauaggaaugacaggaguaagcggaggaggaaaaggagcaucaaacggaaucguaagaguaugggauguuaaaaaugcagaacuacuaaauaaccaauucggaacaaugccuaguuuaacccuagcuugcuuaacaaaacaaggacaaguagaucuaaacgaugccguacaagcacucacagaucuaggauuaauuuacacagcuaaauaccccaauagcucagauuuagaucgauuaagucaaucacacccuauccuaaacaugauagauaccaagaaaaguagccuaaacauuagcggauacaauuuuucauuaggagcagcaguaaaagcaggagcaugcaugcuagaugguggaaacauguuagaaacaaucaaaguaaguccacaaacaauggauggaauacuaaaaucaauacucaaagugaaaaagagcuuaggaauguucguaagugacacaccuggugaaagaaaucccuaugaaaauauauuauauaaaaucugucucucaggagauggcuggagcuauauagcaucaagaacaucaauaguaggcagagcaugggaaaauacaguaguagauuuagaacaagacaacaaaccacagaaaauaggaaacggaggaaguaacaaaucuuuacaaagcgcaggauuugcagcaggccugauauacagucaacuuaugacauuaaaagauuucaaauguuuuaaccuaauaccaaaugccaaaacauggauggauauagaaggcagaccagaagauccagucgaaauagcucuuuaccaaccaaguuccggcugcuauguacauuucuucagagaaccaacagaccuuaaacaauucaaacaagacgcaaaauauucacauggacgagauguaacugaccuauucgcagcacaaccaggauuaacaagugcaguuauagaagcccuaccacgaaauaugguuauaacaugccaaggaagugaagauauacgaaaauuauuagaaagucaaggaaggagagauaucaaacuuauugacauuacacuaucaaaagcugacucaagaaaauuugaaaaugcuguaugggaccaauuuaaagauuuaugccacaugcacacugguguaguaguugagaaaaagaaacgaggaggcaaagaagaaauaacaccacacugugcgcucauggacugcauaauguucgaugcugcaguaucaggaggacucgacgccaaagucuuacgaguagucuuaccaagagacaugguauuccguacaucaacacccaaagucguacuauaa

SEQ ID NO: 9450 - RNA, 1710 nt, Artificial Sequence
  derived and/or modified CDS sequence (opt6) from LASV(ISTH2121-NIG-2012;Clade III)__AIT17541__NP
augagcgcuucaaaagaaguaaaaaguuuccuauggacccaaucuuuaagacgcgaacucagugguuacuguaguaauaucaagcuacaagucguaaaagaugcccaagcacuacuccauggcuuagauuucuccgaagucuccaauguacaaagauuaaugagaaaacaaaaacgugaugauggugaccuaaaaagauuaagagaucuaaaucaagcaguaaauaauuuaguagaacuaaaaucaacacaacaaaaaagcguacuacgcguaggcacacuaucaucagacgaccuccuuacacuagcagcagaucuagaaaaauuaaaaaguaaaguaauaagaacagaaagaccacuaucaucaggaguuuauaugggaaaccuauccucacaacaacuagaccaaagaagagcccuauuaaauaugaucggaaugacaucagauagacaaggugcaucaaccggaagagacggaauaguacgaguaugggacguaaaaaacgcagaacuucuaaacaaucaauuuggaaccguaccaucacucacauuagcaugccuaacaaaacaaggacaaguagauuuaaacgacgcaguacaagccuuaacagacuuagguuuaauauauacagcgaaauacccaaauucuucagaccuagauagacuaucacaaagccacccaauauuaaauaugauagauacuaaaaaaucaagucuuaacauaucaggauacaacuuuucacuaggcgccgcuguaaaagcaggugccugcaugcuagacggaggaaauauguuagaaaccauaaaaguaucuccucaaaccauggacggaauauuaaaaucaauacuaaaaguaaaacgaucacuaggaauguucguuucagauauaccaggcgaaagaaaucccuaugaaaauauauuauauaaaauauguuuauccggagaugguuggccauauauagcaucacgaacaucaauaacaggaagagcaugggaaaauacaauaguagaucucgaaagugacagcaaaccccaaaaaccaggaaacucaggaucuaacagaucacuacaaucagcaggauucccugcagguuuaaccuacagucaauuaaugacauuaaaagacucaaugcuccaauuagaccccaaugcaaaaacuuggauggauauagaaggccgaccugaugauccaguagaaauagcccuauaucaacccucaaguggaugcuacauacacuucuucagagaaccuacagacuuaaaacaauucaaacaagaugcaaaauauucucacggaauugacguaggugaccuauuugcagcacaaccaggauuaacaagugcaguaauagaagcauuaccaagaaacaugguaauaacaugccaaggaucagaagacauaaaaaaauuacuugaaagccaagggagaaaagacauaaaauuaguagauauaagcaugucuaaaccagacagcagaaaauuugaaaacgccguaugggaucaauauaaagaccuaugccauaugcacaccggaauaguaguugaaaaaaaaaaacgaggcggcaaagaagaaauaacaccacacugcgcacuaauggacuguauaauguuugaugcagcagucguaggaggucuagacgcaagaauacuaagagcuguuuuaccacgcgacaugguauuuagaacaucaacuccuaaagucguauuauaa

SEQ ID NO: 9451 - RNA, 1710 nt, Artificial Sequence
  derived and/or modified CDS sequence (opt6) from LASV(Nig08-A18;Clade III)__ADU56615__NP
augucagcaagcaaagaagucaaaucuuucuuauggacccaaucacuaagaagagaacuaucaggauacugcucaaacauaaaauuacaaguaguaaaagaugcacaagcacuauuacacggacuagauuuuucggaaguuagcaauguacaaagacuaaugagaaaacaaaaaagagacgacucagaucuaaaaagacuaagagauuuaaaucaagcaguaaacaaccuaguagaacuaaaaucaacacaacaaaaaaguguauuaagaauaggaacacuaaguucagaugauuuauuaauacuagcagcggauuuagaaaaauuaaaaagcaaaguaguaagaaccgaacgaccacuaucauccggaauauacaugggaaaccuaaguagucaacaacuagaucaaagaaaagcauuacucaauaugauaggcaugacuggaggaaauggaggaagaaaugcaacgagcgacggaauaguaagaguaugggauguaaaaaacgcugaacuacuuaacaaccaauucggaacaaugccaaguuuaacauuagcuugucuaacaaaacaaggacaaguagauuuaaacgacgcaguacaagcauuaacagaucuaggauuaauauauacugccaaguauccaaauaguucagacuuggauagacuagcucaaucacacccaauuuuaaacaugauagacaccaaaaaaucuaguuuaaauauaagcggcuacaacuuuucacucggagccgcagucaaagcaggugccuguaugcuagacggaggaaauauguuagaaacaauaaaagugucaccacaaaccauggacggaaucuugaaaaguauauugaaaguaaaacggaguuuaggaauguucauaucagacacaccaggagaaagaaaccccuacgaaaauauauuguacaaaauaugcuuaagcggagauggauggccauauauagcaucaaggacuagcauaguaggaagagcaugggaaaauacagucguagaucuagaaaccgauaacaaaccacaaaaaacaggaaauggaggaucaaacaaaagccugcaaucagcaggguuugcagcaggauuaacauauucccaacucaugacacuaaaagauucaauguuacaacuagauccaaaugcaaaaacauggauggauauagagggaagaccagaagacccaguagaaauagcacuauaucaaccaguguccggcugcuauauccauuuuuuuagagaacccacagauuuaaaacaauucaaacaagaugcaaaauauucacacggaauagacgucacagaucucuucgccgcacaaccuggacuaacuucagcaguaauagaagcccuuccacgaaauaugguaauuacaugucaaggaagcgaagauauaagaaaacuccuagaaagucaagguagaagagauauaaaauuaauagauaucaguuuaucuaaaguggacucuagaaaauuugaaaacgcagucugggaccaauucaaggacuuaugccauaugcauacgggaauaguaguugaaaaaaaaaaaagaggagguaaagaagaaauaacaccucacugugcacuaauggauugcaucauguucgacgcagcagucucaggugguguagaugcaaaaguacugcgggcagugcugccacgagauaugguauuucgaacaaguaccccaaaaguaguauuauaa

SEQ ID NO: 9452 - RNA, 1710 nt, Artificial Sequence
  derived and/or modified CDS sequence (opt6) from LASV(Nig08-A19;Clade III)__ADU56619__NP
augagcgcaucaaaagaaguaaaaucauucuuauggacacaaucauuaagacgagaacuaucuggauacuguaguaauauaaaauuacaaguaguuaaagaugcacaagcccuauuacauggacuagauuuuucagaagucucuaauguccaaagauuaaugagaaaacaaaaaagagacgacggagaucuaaaaagacuuagagacuuaaaucaggcaguaaacaaucuuguagaacuaaaaagcacucaacaaaaaucugugcuaagaguuggaacauuaaguagcgaugaucuucuuguacucgcagccgacuuagaaaaauuaaaaucuaaaguaguacgaacagaacggccacuaucaucagguauauauaugggaaaccuuucaucucaacaacuggaucaaaggaaagcauuacuaaacaugauaggaaugacaggaggaaauggaggacgaaacacaacaagcgacggaaucguuagaguuugggacguaaaaaacgcagaacuauuaaacaaucaauuugguacaaugccaaguuuaacucucgcuugccuuaccaaacaaggacaaguagaucuaaaugaugcaguacaagcacuaacagaccuagguuuaauauauacagcgaaauauccaaauuccucagacuuagaucgacuagcacaaucacauccaauauuaaauaugauagauacgaaaaaaucaucauuaaacauaagcggauacaauuucucauuaggcgcagcaguuaaagcuggagcauguauguuagacggaggaaauaugcucgaaacaaucaaaguaagcccacaaacaauggacggaauauuaaaaucaauacuaaaaguaaaaaggucacuaggaauguucauuagugauacaccaggcgaaagaaacccauaugaaaauauauuauacaaaauaugcuuaagcggagacggauggcccuauauugccucaagaaccagcauaguaggaagagcaugggaaaacacaguagucgaucuagaaucggauaauaaaccacaaaaaacaggaaacgguggaaguaauaaaucacuacaaucagcagguuuugccgcaggcuuaacauacucacaacucaugacauuaaaagauucaaugcuccaacucgacccaaaugcuaaaacauggauggauauagaaggaagaccagaagacccaguagaaauagcucuauaccaaccguccucaggauguuacauacacuucuuuagagaaccaacagaucuaaaacaguuuaaacaagacgcaaaauacagccauggaauagacguuacagauuuauuugcagcacaaccaggacuaacaagugcaguuauagaagcauuaccaaggaacaugguaauaacaugucaaggcagugaagacauaagaaaacuacucgaaucacaaggaaggcgugacauuaaacuuauagauauuagucuaagcaaaguagacucacgaaaguuugaaaacgcaguaugggaucaauucaaagaucuaugccacaugcauacaggaauaguagucgaaaaaaaaaaaagaggggggaaagaagaaauuacaccacacugcgcuuuaauggacugcauaauguuugaugcagcuguaucaggaggaguugacgcaaaaguucuuagagcaguauuaccaagagauaugguauucagaacuucaacacccaaaguuguccucuaa

SEQ ID NO: 9453 - RNA, 1710 nt, Artificial Sequence
  derived and/or modified CDS sequence (opt6) from LASV(ONM-299;Clade III)__ANH09735__NP
augagugcauccaaagagguaaaaucauuuuuauggacacaaucuuuaaggagagaacuaucaggauauugcucaaacauuaaacuacaaguaguaaaagaugcgcaagcauuauuacacggacuagauuucucagaagugucaaauauacaaagauuaaugcgaaaagaaagacgagacgauucagacuuaaaacgacuuagagacuugaaucaagcaguaaauaaucuuguagaauuaaaaucaacgcaacaaaaaucaguauuaagaguuggaacauuaucaucugaugaucuacucacacuagcugcagacuuagaaaaauugaaaucaaaaguaauaagaacagaacgaccacuaucaagcgguguauacaugggaaacuuaaguacgcaacaauuagaucaaagacgagcuuuacuuaauaugauagguaugacaaaugggggucaaggagcuaaugcaggaagagacggaauaguaaggguaugggaugugaaaaaugccgaauuacuaaacaaccaauucggaacaaugccaaguuuaacauuagcaugucuaacaaagcaaggacaaguagaccuaaaugaugccguacaagcacuaacagaccuuggcuuaauauacacagcaaaauauccaaauucaucagacuuagaccgacuaucacaaaaucacccaauauuaaauaugauagacacuaaaaagucaucauuaaacauaagcggauacaauuuuucacuaggugcagcaguaaaagcaggagccuguauguuagacggaggaaauaugcucgaaacaauaaaaguaucaccacaaacaauggauggaauauuaaaaucaauacuaaaaguaaaaagaagucucggcauguuuguauccgauaccccaggagaaagaaauccauacgaaaauauccuuuauaaaauaugccugagcggagacggauggccauauguagccucaagaaccucaaucauagguagagcaugggagaacacaguagucgacuuagaaucagauagcaaaccacaaagaccuggcagcaaggaaucuaacagaucacuacaaacagcaggauucccagcaggauuaacauauucacaacuaaugacgcuaaaagauucaaugcuacaacuagacccaaaugcaaaaacauggauggauauagaaggaaggccagaugacccaguagaaauagcauuauaucaaccuucuucagguuguuacauacacuuuuucagagaaccaacagaucuaaaacaauuuaagcaagacgcaaaauacucacauggaauagauaucggggaccuauuugcagcccaaccaggacuaacuucagcugucauagaagcucucccaagaaacauggucauaacaugucaaggcucagaagacauaaaaagauuauuagaaucccaaggaagaaaagauauaagacuuguagauauaucacuaucaaaagcagacucaaggaaauucgaaaaugcugucugggaccaauuuaaagaccuauguaauaugcauacaggaguaguagucgaaaagaaaaagaaaggagggaaagaagaaauaacaccacacugcgcauuaauggacugcauaauguuugacgcagcaguaaugggaggauuagaugcaaaaguacuacgcgcaguacuaccaaaagauaugguauucagaaccucaacacccagagucguuuuauaa

SEQ ID NO: 9454 - RNA, 1710 nt, Artificial Sequence
  derived and/or modified CDS sequence (opt6) from LASV(ONM-314;Clade III)__ANH09737__NP
augucagcaaguaaagaaguaaaaaguuuucuauggacacaaucguuaagaagagaacucucuggauacuguucaaacauaaaauuacaaguaguaaaagacgcacaagcacuauuacacggauuagauuuuucugaaguuucgaacauacaaagacuaaugagaaaagaaagaagagacgauagugaucuaaaaagauuaagggauuuaaaccaagcaguaaauaaccucguugaauuaaaaaguacccaacaaaaaucaguacuaagaguuggaacacuaucaucagacgacuuauuaacuuuagcagcagaucuagaaaaacuaaaaucaaaaguaauaagaacagaacguccacuaucuucaggcgucuacauggguaacuuaucuacacaacaacucgaucaacgaagagcacuauuaaacaugauuggaaugacaaauggaggacaaggagcaaacgcaggaagagacggaauaguucgcguaugggauguaaaaaacgcagaauuauuaaauaaucaguucggaacaaugccaucauuaacacuggcauguuuaacaaaacaaggacaagucgaccuaaaugaugcaguacaggcacuaacagauuuaggacuuauauacacugcaaaauauccuaacucaagcgaccucgaucgauuaagccaaaaucauccaauuuuaaacaugauagauacaaaaaaaucaagcuuaaacauaucaggauauaauuuuucacuaggugcagcaguuaaagcaggagcauguauguuagauggaggaaauauguuagaaacuauaaaagucucaccacaaacaauggacgggauauuaaaaucaauauuaaaagucaaaagaagucuaggaauguucgucagugauaccccuggagaaagaaaucccuaugaaaauauacuauauaaaauaugccuuucaggagacggauggccauauguagcaaguagaacaucuauaauaggaagagcaugggaaaacacaguuguagaccuagaaucagauagcaaaccacaacgaccaggaucaaaagaaaguaauagaagcuuacagacagcuggauuuccugcaggacucacauauucacaguuaaugacacuaaaagauucaaugcugcaauuagauccaaaugcaaagacauggauggacauagaaggaagaccugacgauccagucgaaauagcacuuuaucaaccaucaucaggauguuacauucauuuuuucagagaaccaacagaccuaaaacaauuuaaacaagacgcuaaauauagccauggaauagacaugggagacuuauuugcagcucaaccagguuuaacauccgcaguaauagaagcucuaccacgaaacaugguaauaacaugucaaggaucagaagacauuaaacguuuauuagaaagucaaggacgcagagauauaagacuaguagauauaucauugucaaaagcagacagucgaaaauucgaaaacgcaguaugggaccaguuuaaagacuuaugcaauaugcauacagguguaguuguugaaaaaaaaaaaaagggaggaaaagaagaaauaacaccacauugugcccuaauggacuguauuauguuugacgcagccguaaugggaggauuagacgcaaaaguacuaagagcaguauuaccaaaagacaugguguuucgaacaucaacaccaagaguaguucuauaa

SEQ ID NO: 9455 - RNA, 1710 nt, Artificial Sequence
  derived and/or modified CDS sequence (opt6) from LASV(ONM-700;Clade III)__ANH09739__NP
augagcgcaucaaaagaaguuaaaucauuuuuauggacacaaucauuaagacgcgaauuaucaggauauugcucaaauauaaaacuacaagucguaaaagacgcccaagcacuauuacauggauuagacuucucagaaguaaguaauauucaaagauuaaugagaaaagaacguagagacgauucagauuuaaaaagauuaagagauuuaaaccaagcuguaaauaacuugguagaacuaaaaaguacacaacaaaaaucaguucuaagaguaggaacacuaaguagcgaugaucuauuaacacuagcagcagaccuagaaaaauuaaaaucaaaaguaauaagaacagaaagaccauuaucuucaggagucuauaugggcaacuuaaguacacaacaacucgaccaaaggagagcauuacuaaacaugauagguaugacaaguggaggccaaggagcaaacgcuggaagagacggaauaguaagaguaugggaugugaaaaacgcggaauuacuaaacaaccaauucggcacuaugcccucccuaacgcuggcaugccuuacaaaacagggacaaguagacuuaaaugaugccguacaagcacuaaccgacuugggauuaauauauacagcaaaauacccaaauaguagugaccuugauagauuaagccaaaaucauccaauccugaacaugauagacacaaagaaaucauccuuaaacauaaguggauacaauuuuucacuaggagccgcaguaaaagcuggagcaugcaugcuugacggaggcaauaugcuagaaacaauaaaaguaucaccacagacaauggacgguauauuaaaaucaauauuaaaaguaaaacguagccuaggaauguucguaucagauacaccgggugaaagaaauccauacgaaaauauccuuuacaaaauaugucuuucaggagauggauggccauacguagcaagcagaaccucaaucauagguagagcaugggaaaauacaguaguagaucuagaaagcgauucuaaaccacaaagaccuggaucaaaagaaucaaauagaucacuacaaacagcaggauuuccagcaggauuaacuuacagccaauuaaugacccuaaaagacaguaugcuacaacuagaucccaaugcaaaaacauggauggacaucgaaggacguccagaugacccuguagaaauagcacuauaucaaccuucaucaggaugcuauauacauuucuucagagaaccuacagaucuaaaacaauuuaaacaagacgcaaaguauucacauggaauagauaucggagauuuauuugcugcucaacccggauuaacaucagcaguaaucgaagcacuaccaagaaacaugguaauuaccugucaaggaagugaagauauaaaaagauuauuagaaucacaaggaagaagagacauaagacuuguugacauaucacucaguaaagcugacucaagaaaauucgaaaaugcggugugggaccaauucaaagacuuaugcaauaugcauacaggcgucgucgucgaaaagaaaaagaaaggaggaaaagaagaaauaacuccacauugugcauuaauggauugcauaauguucgaugcugcuguaaugggcggcuuagacgcaaaaguacuaagagcuguauuaccaaaagauaugguauuuagaacaaguacaccccgaguaguacuauaa

SEQ ID NO: 9456 - RNA, 1710 nt, Artificial Sequence
  derived and/or modified CDS sequence (opt6) from LASV(Weller;Clade III)__AAT49009__NP
augagcgccagcaaagaaguaaaaagcuuucuauggacucaaucauuaagacgagaauuaucaggcuacugcucaaacauaaaauuacaaguaguaaaagaugcacaagcacuauuacauggauuagauuucucggaaguaucaaacguucaaagauuaaugagaaaacaacgaagagacgacggagaccuaaaacgcuugagagaucuaaaucaagcaguaaacaaccuuguugaauuaaagucaacacaacaaaaaucagucuuacgaguaggaacacuaaauucagaugaucuacuaguacucgcagcagaucuagaaaaauuaaaauccaaaguaauaagaacugaaagaccacucucaucaggaauauauaugggaaaccucucaagucaacaauuagaucaaagaagagcucuuuuaaauaugauaggaaugaccggaggaaacaggggcgguggcacuagcagugauggaaucguaagaguaugggauguaaaaaaugcagaacuauuaaauaaucaauuugguacaaugcccucacuuacucuagcuuguuugacaaaacaaggccaaguagacuugaaugaugcuguccaagcacuaacagacuuaggcuuaauauauacagcaaaauauccaaauucuucagaucuugauagacuugcucaaucucacccaauauuaaauaugaucgacacaaaaaaaucgaguuuaaacauaucaggauauaauuucaguuuaggagcagcgguuaaagccggagcauguauguuagaugguggcaauaugcuagaaacgauaaaaguaucaccacagacaauagacggaauacuaaaaacaauacuaaaaguaaaaaaaucauuaggcauguuuauuagcgacgugccaggagaacgaaacccauacgaaaacauauuauacaaaauuuguuuaucaggcgauggauggccuuauauagcaagcagaaccucaauuguaggcagagcaugggaaaacacagugguugaucuagaauccgauaauaaaccccaaaaaacuggaaaugguggaagcaauaagagucuacaauccgcaggauucgcagcaggucuaaccuauagucaacuaaugacauuaaaagauagcaugcuacaacucgauccaaacucaaagacauggauggacauagaaggaagaccagaagacccagucgaaauagcuuuauaccaaccaaauucaggcuguuacauacacuuuuuccgugaaccaacagaucuaaaacaauuuaaacaagacgcaaaauauagccaugguaucgacguaacagaucuauucgcagcacaaccaggauuaacaucagcaguaauagaagcacuaccaagaaacauggucauaacaugucaaggaagcgaagauauaagaaaauuauuagaaagucaaggaagaagagacauaaaauuaauagauauaucauuaaacaaagccgacucccgaaaauuugaaaacgcuguaugggaucaauucaaagaccuaugccauaugcauaccggugucguaguagaaaaaaaaaaaagaggugguaaagaagaaauaaccccacauugugcucuaauggauugcauuauguucgacgcggcaguuagcggaggauuagaugcuaaaguacuaagagcaguuuuacccagagauaugguuuucagaacaagcaccccaaaaguaguacuauaa

SEQ ID NO: 9457 - RNA, 1710 nt, Artificial Sequence
  derived and/or modified CDS sequence (opt6) from LASV(BA366;Clade IV)__ADI39452__NP
augaguguaucuaaagaaguuaaaucuuuuuuauggacacaaucacuaagaagagaacucucaggauauuguucaaacauaaaacuacaaguaguaaaagacgcacaagcauuauuacauggucucgauuuuucagaagugucaaauguacaacgauuaaugagaaaacaaagaagagaugacaaugaccuaaaaagacuuagagaucuuaaccaagccgucaauaacuuaguagaacuaaaaagcacacaacaaaaaucaguauuaagaguugguacuuuaaccagugacgaccuauuaauacuagcggcagaucuagaaaaauuaaaaacaaaagucacaagaacagaacgacccuuaucagcaggcguauauaugggaaaccucagcucacaacaacuagagcaaagaagagcacuauuaaacaugauaggaaugaacggaggaaaccaaggaguacaagcaggaagagauggaguagugagaguaugggauguaaaaaacgcagagcuacuaaauaaccaauucggaacaaugccaucauuaacacucgcuuguuugacaaaacaaggacaaguugacuuaaaugaugcaguacaagcauuaacagacuuaggacuaauauauacugcaaaauaccccaauacuucugaccuagacagauuagcacaaucccacccaauacucaacaugauagauaccaaaaaaucaucauuaaacauaucagguuacaauuucucauuaggagcagccguaaaagcuggagcuuguaugcuagacgguggaaauauguuagaaacaauaaaaguaucuccacaaacaauggacggaauccuaaaaucaauccuaaaaguaaaaagaacauuaggaauguucguaagcgauacuccuggcgaaagaaacccauaugaaaauauauuauacaaaauauguuuaucaggagacggauggccauauauagccagcagaaccucaauaacuggaagagcaugggaaaauaccauaguagaucuagaaucugacggaaaaccucaaaaaguaggcaauaacggaaguaauaaaucacuucaaagcgcgggauucacagcaggcuuaaccuacucacaacuaaugaccuuaaaagacgccaugcuccagcuagacccaaaugccaaaacauggauggauauugaaggaagaccagaagacccggucgaaguagcacuauaucaaccgucaucagguuguuacauucauuuuuuucgagaaccgacagaccuaaaacaauuuaaacaagacgccaaauacagccauggcauagauguuacagaucuuuucgcugcacaaccaggauuaacaucagcaguaauagaagcacuaccaagaaacaugguaauaacaugucaagguagcgaagacguacgcaaacuccuagaaagucaaggaagaaaagacauaaaacuaauagacauagcacuauccaaagcagacucucgaaaauaugaaaacgcgguaugggaccaauauaaagauuuaugccauaugcauaccggaguaguagucgaaaaaaaaaaaagaggaggaaaagaagaaaugacaccacacugugcacuaauggauugcauaauguuugacgcagccgucagcggaggacuaagcacacaagucuuaagagcaguacuacccagagauaugguauucagaacuucaaccccaaaaguuguacuuuaa

SEQ ID NO: 9458 - RNA, 1710 nt, Artificial Sequence
  derived and/or modified CDS sequence (opt6) from LASV(G1180-SLE-2010;Clade IV)__AIT17169__NP
auguccgcaagcaaagaaauaaaauccuuccuauggacccaaucucucagaagagaauuaaguggauacuguucuaacauuaaacuacaaguagucaaagacgcucaagcacuauuacaugguuuagauuucucagaaguaaguaauguccaaagacuaaugagaaaagaaagaagagacgauaacgacuuaaaaagacuaagagaccuaaaucaggcugucaauaauuuaguagaacuaaaaaguacucaacaaaaaucuauacuaagaguaggaacguuaacuagcgacgaucuacuaauauuagcagccgaucuugaaaaauuaaaaucaaaaguaauuagaacagagagaccauuaagcgcuggaguauauaugggaaacuuaaguucacaacaauuagaccaaagaagagcacucuuaucgaugauaggaaugucaucaggaaaucaaagagcacaagcaggcagagauggugucguacgugucugggacguaaaaaauguagaacuacuaaacaaucaauuuggaaccaugccuucauuaacucucgcuuguuuaacuaaacaaggacaaguagaccuaaacgaugcaguacaagcauuaacugacuuaggacuaauauauacagcaaaauacccuaauacuuccgauuuagacagacuaacacaaucacacccaauacuuaauaugauagauacaaaaaaauccucauuaaacaucucaggauacaauuucucauuaggagcagcagucaaagcaggagccuguauguuagacggaggaaauauguuagaaacuauaaaaguaucuccacaaaccauggacggaauacugaaaaguauucuaaaaguaaaaaaagcauuaggaauguucauuucagauacaccaggcgaaagaaaucccuaugaaaauauauuauacaaaauaugucuaucaggugauggauggccauauaucgcaagccgaacaaguaucacaggaagagcaugggaaaauacaguaguagacuuagaaucagauggaaaaccacaaaaagcaggauccaacaauucaaacaaaucauuacaaagcguaggauuuaccgcaggacuaacauauucacaacuaaugacguuaaaagaugcaaugcuacaguuagauccaaaugcaaaaaccuggauggacauagaaggaagacccgaagacccaguagaaauugcauuauaucaaccaagcaguggaugcuauauucacuuuuuccgugaaccuaccgaccuaaaacaauuuaaacaagacgcaaaauauucacauggaauagacguuacagaucuauuugcagcacaaccuggacuaacaucagcaguaauagacgcccuuccucgaaauaugguuauaaccugucaaggaucagaugauauacgaaaacuucuagaaagccaaggacgaaaagacaucaaauuaauagauauagcauuaucuaaaacggacucaagaaaauaugaaaacgcugucugggaccaauauaaagauuuaugccauaugcauaccggaguaguaguugaaaaaaaaaaacgaggaggaaaagaagaaauaaccccacacugcgcacuaauggauugcauaauguucgacgcagcaguaucagggggucuaaauacauccgucuuaagagcaguacuaccaagagauaugguauucagaacaucaacaccacgaguuguacuauaa

SEQ ID NO: 9459 - RNA, 1710 nt, Artificial Sequence
  derived and/or modified CDS sequence (opt6) from LASV(G1190-SLE-2010;Clade IV)__AIT17173__NP
augucagcuagcaaagaaauaaaaagcuuuuuauggacucaaagucuuagaagagaauuaaguggcuacuguucgaacauaaaauuacaaguaguaaaagaugcucaagcacucuuacauggauuagacuucucagaaguaaguaauguucaaagacuaaugaggaaagaaagaagagacgacaacgaccuaaagagauugagagaucuaaaucaagcaguaaauaaucuaguugaacuaaaaagcacacaacagaaaaguauacuacguguaggaacauugacaucagaugaccuacucauauuagcugcagauuuagaaaaauuaaaaagcaaaguaacaagaacagaaagaccacuaucagccggagucuacaugggaaauuuaagcagucaacaauuagaucaacggcgagcacuucuuaacaugauaggaaugucaggcucaaaccaaggagcgagagcugggagagacggaguaguuagaguuugggauguaaaaaacgcagaacuucuaaauaaccaauuuggaacaaugccaagccuaacauuagcauguuuaacaaaacaaggacaaguagaccuaaaugaugcaguacaagcacuaacagauuuaggacuaauuuacacagcaaaauauccaaauacaucagacuuagacagacucacacaaucacacccaauauuaaauaugauagauacaaaaaaaucaaguuuaaauauaaguggauauaacuuuucacuaggagcagcaguaaaagcuggagcuuguaugcuagauggaggaaauauguuagaaacaauaaaaguaucuccacaaacaauggaugggauacuaaaauccauacuaaaaguaaaaaaagcuuugggaauguucauuucagaugcaccaggagaacgaaaucccuacgaaaauauacuauauaaaauuuguuuaucgggcgauggauggccuuauauagcaucuagaacaucaauaaccggucgagcaugggaaaacacaguagucgaucuagaaagugauggaaaaccacagaaagcaggaaguaacggaaguaauaaaucacuacaaucagcuggauucacagcaggacuaacauacagucaauuaaugaccuuaaaagaugcaaugcuacagcuagauccaaaugccaaaacauggauggauauagaaggaagaccagaagacccaguagaaauagcucuauaucaaccaucaaguggauguuauauacauuucuucagagaaccuacagauuuaaaacaauuuaaacaagacgcaaaauauucacauggaauagaugucacagauuuauucgcagcacaaccaggacuuacaucugccgucauugaugcacuaccaagaaauaugguaauaacaugucagggaucagacgauauaagaaaauuauucgaaagccaaggcaggaaagacauaaaacuaauagacauagcauuauccaagacugacaguagaaaauacgaaaaugcaguaugggaccaauacaaagacuuaugccacaugcauacaggcauaguaguagaaaaaaaaaaaagaggcgguaaagaagaaauaaccccacauugcgcacuaauggauuguauaauguuugacgccgcagucucaggaggauuaaauacaagcguccuaagagccguacuaccacgagauaugguauuccgaacauccacaccaagaguaguauuauaa

SEQ ID NO: 9460 - RNA, 1710 nt, Artificial Sequence
  derived and/or modified CDS sequence (opt6) from LASV(G1200-LIB-2010;Clade IV)__AIT17177__NP
augagcgcaagcaaagaaaucaaaucauuccuauggacacaaucucuuagacgagaacuuucaggauacugcucuaacauaaaacuacaaguaguuaaagacgcacaagcauuacuacauggacuagauuuuucagaagucucaaauguacaaagauuaaugcguaaacaaagacgcgaugacaacgaccuaaaaagacuaagagaucuaaaucaagcaguaaauaacuuaguagaauuaaaauccacucaacaaaaaucuguauuaagaguaggcacauuaacaagcgaugaccuauuaguucuagcggccgaccuagaaaaauuaaaaucaaaaguaaucagaacugaaagaccucuaucugcgggcaucuacaugggaaacuuaucaucucaacaacuagaucaaaggagagcacucuuaaauaugaucggaaugagcggaggaaaccaaggagcuagagcaggaagagacgggguaguuagagucugggaugugaaaaaugcagaucuauuaaauaaucaauuuggaacaaugccaucauuaacuuuagcuugcuuaacaaaacaaggacaaguagauuuaaaugauguaguacaagcauuaacagaucuaggguuaauauacacagccaaauauccaaauacaucugauuuagacagacuaacacaaagucacccuauucuaaaaaugaucgaugcaaauaaaucaagucuaaauauaucagguuauaauuuuucauuaggagcagcaguaaaagcaggagcuugcaugcuagacgguggaaauauguuagaaacaauaaaaguaaguccucaaacaauggauggcauccuaaaaucuauauuaaaaguaaagaaaucacuaggaauguucauaagcgauacaccgggagaaagaaacccuuaugaaaauauacuauacaaaaucuguuuaucaggagauggauggcccuauaucgcaagcagaacaucaaucauaggcagggcaugggaaaacacaguuguagauuuagaaucagauggaaaaccacaaaagacaggaucaaacaacagcucaaaaucccuacaaucugccggauuugccgcaggccuuacauauagccaauuaaugacacuaaaagaugcaauguuacaacuugaccccaaugcaaaaacauggauggauauagaaggaagaccagaagacccaguggaaauagcucuauaucaacccucaucaggauguuacauacacuucuucagagaaccaacagaccuaaaacaauucaaacaagacgcaaaauauagccaugguauagaugucacagacuuauucgcagcgcaacccggauuaacaucagcaguaauagaagcucuaccaagaaacauggucauuacaugccaaggauccgaugacauaaggaaauuacuugaaucacaaggacgaaaagauauaaaacuaauagauauagcauuaucaaaaacggacucaagaaaauacgaaaacgcuguaugggaccaauauaaagauuuaugccauaugcacaccggcauaguaguugaaaagaagaaacgaggaggcaaagaagaaauaacaccacacugugcccuuauggacuguauaauguuugaugcagcaguuucaggaggacuaaacacccugguucuaagagcaguacuaccuagagauauggucuuuagaacaagcacaccaaaaguaguacuauaa

SEQ ID NO: 9461 - RNA, 1710 nt, Artificial Sequence
  derived and/or modified CDS sequence (opt6) from LASV(G1442-SLE-2011;Clade IV)__AIT17181__NP
augucugcuaguaaagaaguaaaaagcuuuuuauggacacaaucauuacgaagagaauuauccggcuauuguagcaauauaaaacuacaaguagucaaagacgcacaagccuuacuacacggacuagauuucucagaaguaucaaauguacaaagacuaaugagaaaacaaagaagagacgacaacgaccugaaaagacuaagagaucuaaaucaagcaguuaacaaucucguagaacucaaaagcacacaacaaaaaucaguauuaagagucggcacucuaacgagcgaugacuuauuagugcucgccgcagacuuagaaaaacuaaaaagcaaaguaauaagaacagaaagaccccucucagccggaguauauaugggaaaucuaucaucacaacaauuagaccaaagacgagcauuauuaaacaugaucggaaugagcggcggcauacaaggaacacgaacaggaagagaugguguagucagaguaugggacgucaaaaacgcagauuuauuaaacaaccaauuuggcacaaugccaucauuaacauuagcaugcuuaacaaaacaaggacaaguagacuuaaaugaugugguacaagcacucacagaccucggcuuaauauacacagccaaauaccccaacgcaucagaccuagacagacuaacucaaucacacccaauacuaaacaugauagauaccaaaaagaguucacuaaacaucucaggauauaacuuuucacuaggcgcugcuguaaaagccggagcauguauguuagacggugguaacaugcuagaaacuauaaaaguaucaccacaaacaauggacggaauauuaaaaucaauccuaaaaguaaaaaaaacauuaggaauguuuauaagugacacaccaggagaaagaaauccguaugaaaauauauuauacaaaaucugccuuucgggagacggcuggcccuacauagccagccgaacuagcauuacaggaagagcaugggaaaacacaguaguagaccucgaaagcgacggaaaaccgcaaaaagcugggucaaauaacuccaauaaaucauuacaaagugcuggauuugcagcaggauuaacauauucacaauuaaugacauuaaaagacgcaaugcuacaauuagauccuaaugcaaaaacauggauggauaucgaaggaagaccagaagaccccguagaaauagcccuauaccaaccguccucaggauguuacauccacuuuuucagagaaccaacagaccuaaaacaauuuaaacaagacgccaaauauucacauggaaucgacgucacugauuuauucgccgcacaaccaggacuaacaagcgcaguaaucgaagccuuaccaagaaacauggugauaacaugccaaggaagugaugacauaaaaaaacuauuagaaucacaaggaagaaaagacauaaaauuaauagacauagcauuaagcaaaacagacucacgcaaauaugaaaacgcaguaugggaucaauacaaagacuuaugccauaugcacacaggaguaguuguagaaaaaaagaaaagaggaggcaaagaagaaauaacaccacauugugcacuuauggacuguauaauguuugacgcagccguaucaggaggauuaaauacacuaguacuaagagcaguccuaccaagagacaugguauucagaacuagcaccccaagaguaguacuauaa

SEQ ID NO: 9462 - RNA, 1710 nt, Artificial Sequence
  derived and/or modified CDS sequence (opt6) from LASV(G1529-SLE-2011;Clade IV)__AIT17185__NP
augagcgcauccaaggaaauuaaaucauucuuauggacacaaucacuaagacgagaauuaaguggguauuguucaaacauaaaauuacaaguaguaaaagaugcccaagcacuauuacauggacucgauuucagugaaguaucaaauguacaaagauuaaugcgaaaacaaagaagagacgauggagaucuaaaaagacuacgagaucucaaccaagcaguaaauaauuuaguagaauuaaaaucaacacaacaaaaaagugugcuacgaguugguacccucacaagugaugaccuacuaauucuagcagcugacuuagaaaaauuaaaaucaaaagucacaagaacagaaagaccauuaagcgcaggaguauauaugggaaauuuaaguucacaacaacuagaccagagaagagcacuacuaaacaugauagguaugaguggaggaaacagaggagcuagaacaggaaaagacggaguaguaagaaucugggacguaaaaaacgcagaccuacuuaacaaucaauuugggacaaugcccucauuaacucuugcaugccuaacaaaacaaggacaaguugaccuaaaugauguuguucaagcccuaacagaccuaggauuaauauacacugcaaaauauccuaacacaagugacuuagauaggcuaacacaaagucauccuauuuuaaacaugauagauacaaauaaaucaagccuaaauauaucaggauacaauuuuucauuaggugcugcaguaaaagcuggggccuguauguuagaugguggaaacauguuagaaacuauuaaaguaucaccacaaacaauggacgguauccuaaaaucuauauuaaaaguuaaaaaaaguuuaggaauguuuauaucagauacacccggagaaaggaacccuuaugaaaacauuuuauacaaaauauguuuaaguggagacggauggccauacauagcaucacgaacaagcauaacaggcagggcaugggaaaacaccguaguagauuuagaaagugaugaaaaaccucaaaaagcaggaucaaacaauucaaacaaaucauuacaaucaacaggauuuacagcaggacuaacauauagucagcuaaugacacuaaaagaugcaauguuacagcuagauccaaaugcaaagaccuggauggacaucgaaggaagacccgaagacccaguagaaauagcucuauaccaaccaaguucaggaugcuauauacacuuuuuuagggaaccaacagauuuaaaacaauuuaaacaagaugcaaaauauagccauggcauagauguaacagaccuauuugcagcucaaccaggauuaacaucagcaguaauagacacuuugccacguaacaugguaauaacaugucaaggcucagaugauauccgaaaauuauuagaaucacaaggaagaaaagauauaaaacuuauagacauagcauugaguaaaacagauuccagaaaauacgaaaacgcagucugggaccaauacaaagaccuaugccacaugcauacaggcgucguaguugaaaaaaaaaaaagagguggaaaagaagaaauaacaccucacugugcacuaauggauugcauaauguucgacgcugcaguaaguggaggauugaacgcaucaguuuugcgagcaguacuuccaagagacaugguauuccguacaucaaccccaagaguaguauuauaa

SEQ ID NO: 9463 - RNA, 1710 nt, Artificial Sequence
  derived and/or modified CDS sequence (opt6) from LASV(G1618-SLE-2011;Clade IV)__AIT17189__NP
augagcgccucaaaagaaauaaaaucauucuuauggacacaaagccuaagaagagaauuaucagguuacuguucgaacauaaaauuacaagugguaaaagaugcacaagcauuauuacauggauuagauuuuucagaaguauccaauguacaaagauuaaugagaaaagaacgaagagacgauaacgaucuaaaaagacuuagagacuuaaaccaagcaguaaacaacuuaguagaauuaaaaucaacacaacaaaaaucuguacuaagaguaggaacauuaacuagugaugacuuacugauacuagcagccgauuuagaaaaauuaaaaucaaaagucacaagaacagaaagaccccuaagugcaggaguauauaugggaaauuuaucaucacaacaacuagaucaaagaagagcacuacuaagcaugauaggaaugaguggaggaaaucaaggagcuagaaccggaagagaugguguuguuagaguaugggauguaaaaaacgcagaacuacuaaauaaucaauuuggaacuaugccuagcuuaacucuugcgugucuaacaaaacaaggacaaguagacuuaaacgauguaguacaagcauuaacagaccuaggguuaauuuacacagcaaaauauccaaauacaagugaucuagacagacuaacacaaagucauccaauauuaaauaugauagauacaaaaaaaaguucacuaaacauauccggauacaauuucagccuaggggcagcaguaaaagccggagcaugcaugcuagacggaggaaauauguuagaaacaauuaaaguaucaccccaaacaaucgauggaauauuaaaaagcauacuaaaagucaaaaaagccuuagggauguuuauauccgacacaccaggagaacgaaacccuuacgaaaauauauuauacaaaauaugcuuaucaggggacggguggccauauauagccaguagaaccucaauaacaggaagagcuugggaaaauacaguaguggacuuggaaucagauggcaaaccucaaaaagcaggaagcaacaauucaaacaaaucucuccaaucagcaggauucacagcuggacuuacuuauagucaacuaaugacacuaaaagacgccauguuacaacuagacccuaaugcaaaaacauggauggacauugaaggaagaccagaagacccagucgaaauagcauuauaucaaccaucuaguggauguuauauacacuuuuuuagagaaccaacagaccuaaaacaauuuaaacaagacgcaaaauacagccauggcauagaugugacagaccuauucgcagcacaaccaggccuaacaucagcaguuauagaugcccuaccacgaaacaugguaaucacgugccaaggaagcgaugacauaaggaagcuauuagaaucucagggacgaaaagacauuaaacuaauagauauagcuuuaucaaaaacagacucaagaaaauacgaaaacgcaguaugggaucaauacaaagaucucugccacaugcauacagguguaguuguagaaaaaaaaaaaagaggaggaaaagaagaaauaaccccacauugugccuuaauggauuguauaauguuugaugcugccguaagcggagguuuaaacaguuuaguccuaagagccguauuaccccgagacaugguauuucgaacuucuacaccaagaguaguccucuaa

SEQ ID NO: 9464 - RNA, 1710 nt, Artificial Sequence
  derived and/or modified CDS sequence (opt6) from LASV(G1646-SLE-2011;Clade IV)__AIT17193__NP
augagcgcaucaaaagaaauaaaaucauuccucuggacacaauccuuaagaagagaacuaucuggauacugcuccaauauaaaacugcaagucguuaaagacgcacaagcucuauuacacggucuagauuuuagcgaagugaguaacguacaaagacuaaugcgaaaagaacgaagagacgauaacgaccuaaaaagguuacgagaucuaaaucaagcagucaacaauuuaguagaacuaaaaagcacacaacaaaaaucaguacuaagaguagguaccuuaacaucugacgauuuauuaauauuagcggccgauuuagaaaaacuuaaaucaaaaguuaccagaacagaaagaccuuuaagugcagggguauacaugggcaacuuaucaucucaacaauuagaucaacggagagcgcuacuaaguaugaucggaaugagcggcggaaaccaaggagcaagaacaggaagagacggugucguaagaguaugggauguuaaaaacgccgaauuacuaaacaaucaguucggaacaaugccaucccuaacacuagcaugcuuaacaaaacaaggucaaguagauuuaaacgaugcaguacaagcacuaacagaccugggauuaauauauaccgcaaaauacccaaacacaucagauuuagaccgauuaacacaaucacauccuauacuaaacaugauagacacaaagaaaagcucauuaaauauaaguggauacaacuucucacuaggagcagcagugaaagcuggagcauguauguuagacggaggaaauaugcuagaaaccauaaaaguuucaccccaaacaauggauggcauauuaaaaucaauacuaaaaguaaagaaagcacuuggcauguucauauccgauacaccaggagaacgaaauccauaugaaaacauauuauacaaaaucugucuaucaggagauggauggccauauauugcaagcagaacaucuaucacgggcagagcaugggaaaauacaguuguagaucuugaaucagacggaaaaccacaaaaagcaggaaauaauaauaguaauaaaucacuacaaucagccggauuuacagcagguuuaacauauagccaacuaaugacauugaaagaugcaauguuacaacuagacccaaaugccaaaaccuggauggauaucgaaggaagaccagaagacccaguagaaauagcauuauaucaaccaucaucaggaugcuauauacacuucuuucgcgaaccaacagauuuaaaacaauuuaaacaagacgcaaaauauucacauggcauagacguaacagaccucuuugcagcacaaccaggauuaacaagcgcaguaauagaugccuuaccaagaaauaugguaauaaccugucaaggaucagacgacauaagaaaauuacuagaaagccaaggcagaaaagauauaaaacuuauugauauagcacuaucaaaaacagauucuagaaaauacgagaacgcaguaugggaccaauacaaagauuuaugccauaugcacacaggcgucguuguagagaaaaagaaacguggaggaaaagaagaaauaacaccacacugugcacuuauggauugcauaauguuugaugcagcaguaagcggagguuuaaacucauuaguacuuagagcuguacuaccaagagauaugguauuuagaaccucaacaccaagaguaguccucuaa

SEQ ID NO: 9465 - RNA, 1710 nt, Artificial Sequence
  derived and/or modified CDS sequence (opt6) from LASV(G1647-SLE-2011;Clade IV)__AIT17197__NP
augagugcaucaaaggaaauuaaaucauuccuauggacacaaucacuacgaagagaacuaucagguuacugcagcaauauaaaauuacaagucguuaaggacgcacaagcucuucuacacggacuagacuucagugaaguaucaaauguacaaagauuaaugcguaaagaaaggcgagacgauaacgaccuaaaaagacuaagagaucuaaaucaagcaguaaauaaccuaguagaauuaaaaucaacacaacaaaaaaguauacuaagaguaggaacccuaaccucagaugaucuacuaauacucgcagccgaucuagaaaaacuaaaaucgaaaguaauacgaacggaaagaccucuuucagcaggaguauauaugggaaaccuaucacuacaacaacuugaucaaagacgagcucuauuaaauaugauaggaaugucaggaucaaaccaaggaguaagagcuggaagagauggaguuguucguguuugggauguaaaaaaugcugaauuacuuaauaaccaauucggaacuaugccaucuuuaacucuagcuuguuuaacuaaacaaggacaaguagauuuaaaugaugcaguacaagcacuaacugaucucgguuuaauauauaccgcaaaauacccaaauacaagcgaccuagauagacuaacacaaucucacccuauccuaaauaugauagacacaaagaaaucaucguuaaauauaucaggauacaacuucucucuaggagcagcagucaaagccggagcaugcauguuagauggaggaaacauguuagaaacaauuaaaguauccccacaaacuauggacggcauacuaaaaagcauauuaaaaguaaaaaaagcauuaggaauguuuauuagcgauacaccaggagaaagaaauccauacgaaaauauuuuauacaaaauaugccuuaguggcgacggauggccauacauagcaucaagaacaucaauaacagggcgagcgugggaaaauacugucguagaucuagaaucagacggaaaaccccaaaaagcaggaaguaacggaaguaauaaaucauuacaaucagcaggauuuacagcaggacuaacauauucccaauuaaugaccuuaaaagaugccaugcuacaacuugauccaaacgcaaaaacuuggauggauauugaaggacgcccagaagacccaguagaaauagcauuauaucaaccaucaucaggaugcuacauacacuucuuuagagaaccaacagaccuaaaacaauuuaaacaggaugccaaauacagccauggcauugacguuaccgaccuauuugcugcacaaccagguuuaacaucagcaguaauagacgccuuaccacgaaauaugguaaucaccugccaaggaagugacgauauacgaaaauuauuagaaagucaaggaagaaaagacauuaaauuaauagauauagccuuaucaaaaacagacucaagaaaauaugaaaaugcuguaugggaccaauacaaagacuuaugccauaugcacacagggauagugguugaaaaaaaaaaaagagguggaaaagaagaaauaacaccucacugcgcacuuauggauugcauaauguuugaugcagccguuagcggcggauuaaauacgagcgucuuaagagccguacucccacgagacaugguuuucagaacaucaacaccaagaguugucuuauaa

SEQ ID NO: 9466 - RNA, 1710 nt, Artificial Sequence
  derived and/or modified CDS sequence (opt6) from LASV(G1727-SLE-2011;Clade IV)__AIT17201__NP
augagcgcaucaaaagaaaucaaaucauuuuuauggacacaaagcuuaagaagagaauuaucaggauauugcucuaacauuaaauuacaagucguaaaagacgcacaagcauuauuacacgguuuagauuuuagugaaguaucaaacguacaaagauuaaugagaaaagaacgaagagacgauaacgaccuaaaacgacuuagagaucuaaaucaagcaguaaauaaccuaguagaacucaaaaguacucaacaaaaaucaauucuaagagugggaacauuaacaucagaugaucuacuaauauuagcagcagaccuagaaaaacuaaaaucaaaaguaacacguacagaaagaccacuaagcgcaggaguauauaugggaaaccuuaguagucaacaauuagaccaaagacgugcauuacuuaauaugauagggauguccggaaguaaucaaggagcucgagcaggaagagacggaguaguuagaguaugggacguaaaaaaugcagaacuacuaaauaaccaauucgggaccaugccaucacuaacacuagcaugccuuacaaaacaaggacaaguagaucuaaacgaugccguacaagcccuaacagacuuaggauuaauauauacugcaaaauacccuaauaccagugaccuagauagauuaacucaaucccauccaauauuaaacaugauagauacaaaaaaaucaaguuuaaacauaaguggauacaauuucucauuaggugcagcaguaaaagccggagcuuguaugcuagacggaggaaacauguuagaaacaauaaagguaagcccacaaaccauggauggaauacuaaaaucaauacuaaaaguaaaaaaagcuuuaggaauguuuauuucagacgcaccuggagaacgaaacccuuacgaaaauauacuauacaaaauauguuuaucaggagacggcuggccauauauagcuucaagaacaucaauaacaggaagagcaugggaaaauacaguuguagaucuugaaagugacgguaagccacaaaaagcaggaaguaauggaagcaauaaaucauugcaaucagccggguuuacagcagguuuaacauacucgcaacuaaugacacuaaaggaugcaauguuacaauuagacccaaacgcaaaaacauggauggacauagaaggacguccagaagacccagucgaaauagcacuauaucaaccaaguucaggaugcuauauacacuuuuuuagagaaccuacagauuuaaaacaauucaaacaagaugccaaauacucacaugguauagacguaacagaucucuuugccgcucaaccaggcuuaacaucagcaguuauagaugcacuuccacgcaacaugguaauuacaugucaagggucagacgacauaaaaaaacucuucgaaagccaaggaaggaaagauauaaaacuaauagauauagcccuaucaaaaacagauucuagaaaauaugagaaugcaguaugggaucaauauaaagauuuaugucacaugcauacuggaauaguagucgaaaaaaaaaaaaggggagguaaagaagaaauaacaccacauugugcccuaauggacuguauaauguucgacgccgcagugucaggaggcuuaaacaccaguguacuacgagcaguucuaccucgagauaugguuuucaggacaucaacuccaagaguaguacuauaa

SEQ ID NO: 9467 - RNA, 1710 nt, Artificial Sequence
  derived and/or modified CDS sequence (opt6) from LASV(G1774-SLE-2011;Clade IV)__AIT17205__NP
augagugcaucaaaggaaauaaaaagcuucuuauggacacaaucacuacgaagagaauuaucaggauacuguucaaacaucaaacuacaaguaguaaaagacgcacaagcauuacuacacggauuagacuuuagugaaguaucaaauguacaaagacuaaugaggaaagaacggcgugacgauaaugaccuaaaaagacuuagagauuuaaaucaagcaguaaauaaccuuguagaacuaaaaagcacucaacaaaagucaauauuaagaguaggaacauuaacaagugacgacuuacuuauacuagcagcagaccuagaaaaacuaaaaucuaaaguuacaagaacagaaagaccguuaucugcaggaguauacaugggaaacuuaagcucacaacaacuagaccaaagaaaagcauuauuaaauaugauaggaaugucaggaaguaaucaaggagcaagaauuggaagagacggaguaguuagaguaugggauguaaaaaacgcugaauuacuuaauaaccaauuuggaacaaugcccucccuuacucuagcaugcuuaaccaaacaaggucaagucgaucuuaacgaugcaguacaagcacucacagauuuaggccuaauauacacagcuaaauauccaaauacaucagauuuagacagacuaacacaaagucauccuauauuaaacaugauagauacaaaaaaaagcucacucaauauaucaggauauaauuuuucacuaggugcagcaguaaaagccggagcaugcauguuagacggaggcaauauguuagaaacaauaaaagucucaccacaaacaauggauggaauauuaaaaaguauauuaaaaguaaaaaaagccuuagguauguucauaagcgacaccccaggagaacgaaacccauacgaaaauauccuuuacaaaauaugucuaucaggcgauggcuggccauauauagcaaguagaacaagcauaacaggaagagcaugggagaauaccguagucgacuuagaguccgauggaaaaccccaaaaagcaggaucaaacucaagcaauaaaagucuacaaagugcaggauuaacagcaggacugacauauucacaauuaaugacauuaaaagaugcaaugcugcaauuagacccaaaugcaaaaacauggauggacauagaaggaagaccagaagauccuguagaaauugcacuauaucaaccaagcucgggauguuauauucacuucuuucgagaaccaacagauuuaaaacaauuuaaacaagacgcaaaauauucacauggaauagacguaacagaucuauuugcggcacaaccaggauuaacuucagcuguaauagaugcucuuccuagaaacuuaguaauaacaugucaaggaagcgaugauauacguaaauuauuagaaucacaaggacguaaagacaucaaauuaauagacauagccuuauccaaaacugauucacgaaaauacgaaaacgcagucugggaccaauacaaagauuuaugucauaugcauacagguauuguaguugaaaaaaaaaaacgaggaggaaaagaagaaauaacaccacacugcgcauuaauggacugcauaauguuugaugcagcaguaucuggaggauugaacgccagcguacuaagagcaguacuaccaagagacaugguauucagaacauccaccccaagaguaguacuuuaa

SEQ ID NO: 9468 - RNA, 1710 nt, Artificial Sequence
  derived and/or modified CDS sequence (opt6) from LASV(G1792-SLE-2011;Clade IV)__AIT17209__NP
augagcgcaucaaaagaaauuaaaucauuuuuauggacacaaagucuaagaagagaacuaagugguuacuguaguaauauuaaauuacaaguaguaaaagacgcacaagcuuuauuacacggucuagacuucuccgaaguaucaaacguacaacgacuaaugcgaaaagaaagaagagacgauaacgauuuaaaacgacuuagagaucuaaaucaagcaguaaacaauuuaguagaacuaaaaaguacacaacaaaaaucaauacuacgaguuggaacacuaacaagcgacgacuuacuaauacuagcagcagauuuagagaaauuaaaaucuaaaguuacaagaacugaacgaccacuuucagcaggaguauauauggggaacuuaucaagucaacaacuagaucaaagacgagcacuacuaucaaugaucggaaugaguggaggaaaucaaggcgcacgggcaggcagagacggaguaguaaggguaugggacguaaaaaaugcugaacuauuaaauaaccaauuugguacaaugccaucucuaacgcuagcaugccucacaaaacaagggcaagucgaccuaaaugauguagugcaagcucuaacagauuuaggacuaauauacacagcuaaauacccaaauacaucagaucucgauagacuaacacaaucacaucccauacuaaauaugauagauacaaaaaaaucaucauuaaacauuucgggcuacaauuuuucauuaggugcagcagucaaagcaggagcauguauguuagacggagguaacauguuagaaacaauaaaaguaucaccacaaacaauggacgguauacuaaaaucaauacuaaaaguaaaaaaagcacuagguauguuuauuucagauacuccaggagaaagaaacccuuaugaaaauauauuauauaaaauaugucugucgggagauggauggccauacauagcaaguagaacaaguauaaccggaagagcaugggaaaauaccguaguagaucuagaaucagacggaaaacuccaaaaaacagguucuaacaauaguaauaaaucacuacaaagcgcaggcuuuacugcuggacuuacauauagccaauuaaugacacuaaaagaugccaugcuccaacuagaucccaacgcaaaaauauggauggauauagaaggaagaccagaagacccaguagaaauagcacucuaucaaccaucaucaggauguuauauucacuucuuuagagaacccaccgauuuaaaacaauuuaaacaagacgcuaaauauagccauggaauagauguuacagaucuauuugcagcacaaccaggucuaacaagugcaguaauagaugccuuaccaagaaacaugguaaucacaugucaaggauccgaugacauaagaaaacuauuagaaagucaaggaagaaaggacauaaaauuaauagauauagcacuaaauaaaacagacucgagaaaauacgaaaacgcaguaugggaucaauacaaagauuuaugccauaugcacacaggcguagucguagaaaaaaaaaaaaaaggaggaaaagaagaaauaaccccacauugugcauuaauggauuguauaauguucgacgcggccguaagcggaggauuaaacacuuccguauuacgugcuguauugccacgagacaugguauucagaacauccacaccaagaguaguauuauaa

SEQ ID NO: 9469 - RNA, 1710 nt, Artificial Sequence
  derived and/or modified CDS sequence (opt6) from LASV(G1897-SLE-2011;Clade IV)__AIT17211__NP
augagcgccaguaaagaaauaaaaucauuuuuauggacucaaaguuuaagacgagaacucagcggauacugcagcaauauaaaacuccaaguaguaaaagacgcacaagcauuauuacauggucuagauuuuagugaaguaaguaauguacaaagauuaaugagaaaagaaagaagagacgauaaugaucucaaaagacuacgagacuuaaaucaagcaguaaauaaucuuguagaacucaaaucaacacaacaaaaaucaauauuaagaguaggaacguuaacaucagaugacuuacuaauucuagcugccgaucuugaaaaacuaaaaaguaaaguaacacgaacagaaaggccuuuaagcgcaggaguauauauggguaaucuaagcagccaacaacuagaccaaagacgagcucuauuaaacaugauaggaaugaguggaggcaaucaaggagcacaagcuggaagagacggaguaguaagaguaugggauguaaaaaaugcugaauuacuaaauaaucaauucgggacaaugcccaguuuaacauuagccugccuaacaaaacaaggucaaguagacuuaaaugaugcaguacaagcacuaacagaucuaggauuaauuuauacagcuaaauauccaaauacaucagacuuagacaggcuuacccaaagccauccaauauuaaauaugauagauaccaaaaaaagcucacuaaauauuagcggcuauaauuucaguuuaggagcagcuguuaaagcaggagcaugcauguuagacggaggaaacaugcuagaaacgauaaaaguaucaccacaaacuauggacggaauacugaaaaguauauuaaaaguuaaaaaagcacuaggaauguuuauaagcgacacaccuggagaaagaaaucccuaugaaaauauauuauacaaaauauguuuaaguggagacggauggcccuauauagcaagcagaacgagcaucacaggaagagcaugggaaaauacaguagucgaucuagaaagugaugguaaaccacaaaaagcaaauaguaacucuaguaauaaauccuuacaaucugccgguuucacagcaggauuaacauauucacaacuuaugacacucaaagacgcaaugcuucaauuggauccaaacgcaaaaacauggauggacauagaaggacgacccgaagacccuguugaaauagcacuauaucaacccagcagcggauguuacauacauuuuuuuagagaaccuacagaccuaaaacaauucaaacaagaugcaaaauauagccaugguauagauguaacagaucuauuugcagcccaaccuggauuaacaagcgcaguaauagacgcauuaccacguaacaugguaauaacaugucaaggaucagaugauauaagaaaacuacuagaaucucaaggucgaaaagacauaaaacuaauugacauagcacuaaguaaaaccgacucaagaaaauacgaaaacgccguaugggaccaauacaaggaccuuugucauaugcauacuggaauaguaguagaaaaaaaaaaaagaggaggcaaagaagaaauaaccccucacugugcacuaauggacuguauaauguuugacgcagcaguaucaggaggauuaaacacaucaguacuaagagcagugcuuccaagagauaugguauucagaaccucaaccccaagaguaguauuauaa

SEQ ID NO: 9470 - RNA, 1710 nt, Artificial Sequence
  derived and/or modified CDS sequence (opt6) from LASV(G1932-SLE-2011;Clade IV)__AIT17213__NP
augucagcaagcaaagaaauaaaaucauuucuauggacucaaucuuuaagaagagaauuagcaggauauugcaguaacauaaaauuacaaguagucaaagacgcacaagcacucuuacauggacuagacuuuagugaaguaucaaauguacaaagguuaaugcgaaaagaaagaagagacgacaaugaucucaaacgucuaagagaucuaaaccaagcuguuaauaacuuaguagaauuaaaaucuacacaacaaaagaguguacuaagaguaggaacacuaacaagugacgauuuauuaauauuagcugcagauuuagaaaaacuaaaaucuaaaguaauuaggacagaaagaccacucucagcaggaguauauaugggaaauuuaagcagccaacaacuagaucaaaggagagcauuacuaaauaugauaggaaugaguggauccaaccaaggaguaagagcaggaagagacggcgucguaagaguuugggauguuaaaaacgccgaauuauuaaauaaucaauucggaacaaugccaucucuaacauuagcaugucuaacaaaacaaggacaaguagauuuaaacgaugcaguacaagcauuaacggaccuuggcuuaaucuauacagcuaaauacccaaauacaucugauuuagaccgucucacucaaucucacccaauauuaaacaugauagauacgaaaaagagcagcuuaaauauuucaggauauaauuucucauuaggagcagcaguaaaagccggugcuuguauguuggauggaggaaauaugcuagaaacuaucaaagucagcccacaaacaauggacggaaucuuaaaaaguauacuaaaaguuaagaaagcccuaggaauguuuauaagcgauacaccaggagaaagaaauccauaugaaaauauacuauauaaaauuuguuuaagcggugaugguuggccauacauagccucaagaacaucaauuacaggcagagcaugggaaaauacugucguagauuuagaaucagauggaaaaccacaaaaagcaggaucuaacggaagcaauaaaaguuugcaaagcgcaggauucacagcaggucuaacauauagccaacucaugacauuaaaagaugcgauguuacaauuagauccaaacgcaaaaacauggauggauauagaaggucgaccagaagacccaguugaaauagcacucuaccaaccuucaaguggcugcuacauacacuuuuucagagaaccaaccgacuuaaaacaauuuaaacaagacgcaaaauauucacauggcauagacguaacugauuuguuugccgcccaaccaggucuaacaagugccguaauagaugcuuuaccaaggaauaugguaauaacaugucaaggaucagaugauauaagaaaacuccuagaaagccaagggagaaaagauauuaaauuaauagauauagcauuaucaaaaacagacucuagaaaauaugaaaacgcaguaugggaucaauacaaagacuugugccacaugcacaccggaauaguaguagagaaaaagaaaagaggcggaaaagaagaaauaaccccacacugcgcauuaauggauugcauuauguucgacgcagcaguaagcgguggacuaaacacaaguguauuaagagcaguacuaccaagagauaugguauucagaacuucaacaccuagagucgucuuauaa

SEQ ID NO: 9471 - RNA, 1710 nt, Artificial Sequence
  derived and/or modified CDS sequence (opt6) from LASV(G1959-SLE-2011;Clade IV)__AIT17217__NP
augucagcaucaaaagaaauaaaaaguuuucuauggacacaaucauuacgacgagaauuaucaggauauugcaguaauauaaaauuacaagucguuaaagacgcccaagcccuacugcacggauuagauuuuucagaaguaaguaacguacaacgacugaugcgaaaagaaagaagagacgauaacgaucuaaaaagauuaagagaucuaaaucaagcuguaaacaaucuaguagaauuaaaaagcacacaacaaaaaucaauauuaagaguagggacacuaacaagcgacgaucuucuaauccuagcagcagaccuagaaaaauugaaaucaaaaguaacaagaaccgaaagaccacuaucagcaggaguauacaugggaaaccuaagcagucaacaacuagaucaaagaagagcauuauuaucaaugauagggaugucaaguggaguucaaggagcaagagcuggaagagacggagucguaagaguaugggauguaaaaaaugccgaauuacuaaacaaucaauucgguacaaugcccagucuaaccuuagcaugcuuaacaaaacaaggucaagucgaucuaaacgacgucguacaagcgcuaacagaucuaggcuuaaucuauacagcaaaauacccaaauaccagugaucuagaucgauuaacacaaucucacccaauucuaaacaugaucgauacaaaaaaaucauccuuaaauauaagcgguuacaacuucucacuuggagcagcgguuaaagcaggagcguguauguuagauggaggaaauauguuagagacaauaaaaguaagcccacaaacgauggacggaauacucaaaaguauacuaaaaguuaaaaaagcguuaggaauguucauaagcgaaacacccggagaaagaaacccauacgagaauauauuauauaaaauauguuuauccggagauggauggccauauauagcaucacgaacaucaauaacaggaagagcaugggaaaacacgguaguagauuuagaaucagauggaaaaccccaaaaagcaggaucaaacaacaguaauaaaucauuacaaagcacaggauucgcagcuggauuaacauauucacaauuaaugacauuaaaagacgcaauguuacaacucgaccccaaugcaaaaacauggauggauaucgaaggaagaccagaagauccaguagaaguagcccuguaccaaccuaguaguggauguuauauacauuuuuucagagaaccaacagaucuaaaacaguuuaaacaagacgcaaaauauucucaugggauagacguaacagauuuauuugcagcacagccaggacuaacaucagcaguaauagaugcucuucccagaaacaugguaauaacaugccaagguucagaugacauaaaaaaacuacucgaaagucaagguagaaaagauauaaaauugauagacauagcacuaucaaaaacagauucacgaaaauaugaaaacgcuguuugggaccaauauaaagaccuaugucauaugcauacaggaguuguaguugaaaaaaaaaaaagaggaggaaaggaagaaauaacaccacacugcgcauuaauggauugcauaauguucgaugcagcaguuaguggcggucuaaauacuucaguuuuacgagccguacuaccuagagauaugguauucaggacaucaacaccuagaguaguacuauaa

SEQ ID NO: 9472 - RNA, 1710 nt, Artificial Sequence
  derived and/or modified CDS sequence (opt6) from LASV(G2141-SLE-2011;Clade IV)__AIT17225__NP
augucagcaagcaaagaaaucaaaucauuccuauggacccaaucuuuaagaagagaauuaucaggcuacugcucaaacaucaaauuacaaguaguaaaagaugcacaagcacucuuacacggcuuagauuucucugaaguuucaaauguacaaagauuaaugcguaaacaaagaagagacgacaacgauuuaaaacgauuaagggaucuaaaucaagcagucaauaaccuaguagaauuaaaaucaacacaacaaaaaucaguauuaaggguaggaaccuuaacgagcgaugauuugcucguacucgcugcagauuuagaaaaauuaaaaucuaaaguaaccagaacggaaagaccacuaagugcaggcguauacaugggaaaccuaaguagccaacaacuagaucaacgacgagcacuacuaaacaugaucggcaugucaggcggaaaccaaggagcaagagcaggcaaugauggaguaguaagaguaugggauguaaagaaugcagaucuacugaauaaccaauuuggaacuaugccaaguuuaacauuagcaugcuuaacaaaacaaggacaaguagaccugaacgauguaguacaagcacuaacagacuuaggguuaauuuauaccgcuaaguauccaaauacaucugacuuagacagacuaacucaaucucauccaauauuaaacaugauagacaccaaaaaaucaucauuaaacauauccggguacaauuucucacucggugcagcaguaaaagcaggagcauguaugcuagauggaggaaauauguuagaaacaaucaaaguaaguccgcaaaccauggauggaauacuaaaaaguauuuuaaaaguaaaaaaagccuuaggcauguuuauaagugauacacccggagaacgaaauccauacgaaaauauauuauacaaaauaugcuuaucaggagauggauggccauauauagcaagcagaacauccauaaccggaagagcaugggaaaacaccguaguagauuuagaaucagauggaaaaccacaaaaaacaggaaacaacucaagcaauaaaucgcuacaauccgcaggauuuacagcaggacugacauauucacaauuaaugacucuaaaggaugcaaugcuacaacuagacccaaaugcaaaaacauggauggacauagaaggaagaccagaagauccaguagaaguagcacuauaucaacccaguucaggaugcuacauucauuuuuucagagaaccaaccgacuuaaaacaauuuaaacaagaugcuaaauacagccauggaauagacguaacagaucuauuugcugcccaaccaggacuaacuucagcaguaauagaagcacuacccagaaauaugguaauaacaugucaagguagugacgacauucgaaaauuauuagaaucucaaggaagaaaagacauaaaauuaauagauauagcacucaguaaaauagacucacgcaaauaugaaaacgcuguaugggaccaauauaaagaucucugucauaugcauacaggagucguagucgaaaaaaaaaaaagaggaggaaaagaagaaauuacaccccacugcgcauuaauggauugcauaauguuugacgcagcaguaucaggagguuuaaauacucuuguauuaagagcaguauuaccacgagauaugguuuucagaacuuccacaccuaaaguaguucuauaa

SEQ ID NO: 9473 - RNA, 1710 nt, Artificial Sequence
  derived and/or modified CDS sequence (opt6) from LASV(G2147-SLE-2011;Clade IV)__AIT17229__NP
augagcgcaagcaaagaaauuaaaaguuuuuuauggacccaaagccuacgaagagaacucagcggauacuguaguaauauaaaacuacaaguaguaaaagacgcacaagcguuauuacauggacuagacuuuucagaaguauccaauguccaaagguuaaugaggaaagaaagaagagacgacaacgaccuaaaaagauuaagagaucuaaaucaagcaguaaauaacuuaguagaacuaaaaucaacacaacaaaaaucaguauugagaguaggaacuuuaacuucagaugaccuacuaauuuuagcagcagaccucgaaaaauuaaaaucaaagguaauaagaaccgaaagaccacuaucagcaggaguauauaugggaaaccuuucaucgcaacaacuagaucaacgacgagcguuacuaagcaugauaggcaugaguggaggcaaccaaggaacacgugcuggucgagauggcgucguacgaguaugggacguaaaaaacgcagaauuauuaaacaaccaauucggcacaaugccaagucucacacuagcaugccuaaccaaacaaggacaaguagauuuaaacgaugcaguacaagcccuaacagaccuaggccuaauauauacagcaaaauauccgaauacuucagaucuagaucgacuaacacaaagucaccccauauuaaacaugauagacacaaaaaaaucuagccuuaauauaucaggauacaauuucucauuaggagcagccgucaaagcuggagcaugcaugcuagacggagguaauauguuagaaacaauaaaagucucaccacaaacaauggacggaauuuuaaaaaguauauuaaaaguaaaaaaagccuuaggaauguucauaagugauacaccaggagaaagaaauccauaugaaaauauucuuuauaaaauaugucuaucaggugacgguuggccauauauagcaaguagaacaaguaucacaggaagagcaugggaaaauaccgucguugauuuagaaucagaugggaaaccacaaaaagcaggaucaaauaacucaaauaaaaguuuacaaagcgcaggauuuacagcaggauuaaccuauagccaacuaaugacauuaaaggaugccaugcuacagcuagacccaaaugcaaaaacauggauggacauugaaggaagaccagaagacccuguagaaaucgcacuauaucaaccaucaagugguuguuauauacauuuuuuccgugaaccaaccgaucuaaaacaauucaaacaggacgcaaaauacucacauggaauagacgucacugauuuauuugcagcucaaccagguuuaaccucagccguaauagaugcacuaccaagaaauauggucauaaccugucaaggaucagaugacauuagaaaacuuuuagaaucgcaaggcagaaaagacaucaaauuaauagauaucgcccuaucaaaagccgacaguagaaaauaugaaaacgcaguaugggaccaauacaaagauuugugccauaugcauacagguguaguuguagaaaaaaaaaaacgaggaggaaaagaagaaauaaccccacacugugcauuaauggauuguauaauguuugaugcagccguuagcggcggauuaaacaccucaguacuaagagcaguacuaccaagagauaugguuuuccguacaaguacaccaagagucguacuauaa

SEQ ID NO: 9474 - RNA, 1710 nt, Artificial Sequence
  derived and/or modified CDS sequence (opt6) from LASV(G2165-SLE-2011;Clade IV)__AIT17233__NP
augagcgcauccaaagaaguaaaaucauucuuauggacacaaucucuaagaagagaacuaucaggauauuguucaaacauaaaauuacaaguaguaaaagacgcacaagcacucuuacacggguuagauuucucagaaguaucaaacguacaaagauuaaugaggaaagaacgaagagacgauaaugaccuaaaaaggcuaagagaccuaaaccaagccguaaauaauuuaguagaauuaaaaagcacacaacaaaaaucaauacucaggguaggaacauuaacuuccgaugacuuauuaguauuagcagcagacuuagaaaaacuaaaaucaaaaguaacaagaacagaaagaccauuaucagcaggaguauauauggguaaccucagcucccaacaauuagaucaacgacgcgcacuauuaaguaugauaggaaugucaggaggaaaucaaggagcucaagcaggucgagauggaguaguaaggguuugggauguuaaaaacgcagaauuacuaaauaaccaauuuggaacuaugccuaguuuaacucucgcaugcuuaacaaaacaaggacaaguagaccuuaacgaugccguccaggcuuuaacagaccuaggacuaaucuacaccgcaaaauauccaaacacuucagauuuagacagacuaacgcaaucacauccaaucuugaacaugauagauacaaagaaaaguucauuaaacauaagcggauauaauuuuucucuuggagccgcaguaaaagccggagcaugcauguuggacggaggaaauaugcuagaaacaauaaaagucagcccacaaacaauggacgggauuuugaaaucuauauuaaaaguuaaaaaggcacuagguauguucauaucagauacgccaggagaacgaaacccauaugaaaacauauuauacaaaauauguuuaaguggagauggauggccauacauagcaucaagaacaucuauaacaggaagggcaugggaaaauacaguaguagaccuagaaucagauggaaaaccacaaaaagccggaucaaacaacuccaauaaaagucuacaaucagcaggguuuacagcagggcuuacauauagucaacuaaugacacuuaaagacgcaaugcuccaacuagacccgaaugccaaaacauggauggauauagaagguagaccagaagauccaguagaaguagcacuauaucaaccaucaagcggaugcuauauacacuucuucagagaaccgacugaucuaaaacaauuuaaacaagacgcaaaauacucacauggaauugaugugacagauuuauuugcagcacaacccggccucacaucugcaguaauagaugcauuaccgagaaacaugguaauaacaugccaaggaagugaugauaucagaaaacuauuagaaucacaagguagaaaagauauaaaacuaauagacauagcacuaucaaaaacagauucuagaaaauaugaaaacgcaguaugggaccaauacaaagacuuaugccauaugcacacagggguaguagucgagaaaaagaaaaggggaggaaaagaagaaauuacaccacauugugcuuuaauggauuguauaauguuugacgcagcagucagcggaggauuaaacacaucaguccucagggcaguucuacccagagacaugguuuuuaggacaucaacaccacgaguaguauuauaa

SEQ ID NO: 9475 - RNA, 1710 nt, Artificial Sequence
  derived and/or modified CDS sequence (opt6) from LASV(G2184-SLE-2011;Clade IV)__AIT17237__NP
augucagcaagcaaagaaauaaaaucauuccuauggacacaaucacuacgaagagaauuaagcggauacuguucaaacauaaaauuacaaguuguaaaagacgcccaagcauuauuacauggauuagacuucucagaagucucaaauguucaaagauuaaugcgaaaagagcgaagagacgauaacgacuuaaaaagacuccgagacuuaaaucaagcagucaauaacuuaguagaacuaaaaucaacacaacaaaaaucaauauuaagagucgguacuuuaacaucagaugaucuauuaauauuagcagcagaccuagaaaaauugaaaaguaaaguaacacgaacagaaagacccuuaagugcaggaguauauauggguaacuuaucaucucaacaauuagaccaaagacgagcauuauuaucaaugauaggaaugaguggaggaaaucaaggagcaagagcuggaagagauggugucguaagaguaugggaugucaaaaacgccgaauuauuaaacaaucaauucggaacaaugcccucauuaacauuagcuugccuaacaaaacaaggccaaguagaccuuaacgacgccguacaagcucuaacugauuuaggcuugauauauacagccaaauauccaaauacaucugauuuagauagacuaacacaaucacacccuauacuaaauaugauugacaccaagaaaaguagucuaaacauuagcgguuacaacuucucauuaggagcagccguaaaagcaggagcauguauguuagacggaggaaauauguuagaaaccauuaaaguaaguccacaaacaauggacggaauauuaaaaucaauauuaaaaguuaagaaagcauuaggaauguuuaucucagauaccccaggagaacgaaauccuuacgaaaauauauuauacaaaauaugccucucaggagauggguggccuuauauagcaucaagaacuucaauaacaggacgagcaugggaaaacacaguaguugaucuagagagugacggcaaaccacaaaaagcaggaucaaauaauagcaacaaaucacuacaaucagcaggauuuacagcaggacuaacauacucacaacuaaugacgcuaaaagaugcaaugcuucaauuggacccaaaugcaaaaacauggauggauauagaaggcagaccagaggauccaguagaaguagcacuauaucaaccuagcucuggaugcuacauacacuucuuuagagaaccaacagauuuaaaacaauuuaaacaagacgcaaaauauagucauggaauugauguaaccgacuuauuugcugcacaaccgggacuaacaagcgcaguaauagaugcauuaccaagaaacaugguaauaacaugucaaggaagugaugacauaagaaaacuccuagaaagccaaggaagaaaagacauaaaauuaauagacauagcauuauccaaaacagacucaagaaaauaugaaaaugcaguaugggaucaauauaaagacuuaugucauaugcacacaggaguuguaguagagaaaaagaaaagaggagguaaagaagaaauuaccccacauugugcucugauggacuguauaauguuugacgcagcaguauccggaggguuaaauacuucaguauuacgagcaguguuaccuagagauaugguauuucgaacaucaaccccacgaguaguauuauaa

SEQ ID NO: 9476 - RNA, 1710 nt, Artificial Sequence
  derived and/or modified CDS sequence (opt6) from LASV(G2197-SLE-2011;Clade IV)__AIT17241__NP
augagugcaucuaaagaaaucaaaucauuuuuauggacacaaucauuaaggagagaacuaaguggauauugcucaaacauaaaauuacaaguagugaaagacgcacaagccuuacugcacggacucgauuuuucagagguuagcaauguacaaagacuaaugagaaaagaaagaagagacgauaacgauuuaaaaagacuaagagaucuuaaccaagcaguaaacaaccuaguagaacuaaaaaguacacaacagaaaaguaucuuaagaguaggaacacucacaucagaugaucuucuaauacucgcggcagacuuagaaaaauuaaaaagcaaaguaacuagaaccgaacgaccauuaagcgcaggaguauauaugggaaacuuaucaucacagcaauuagaucaaagaagagcacuccuuucaaugaucggaaugagcggagguaaccagggagcgagagcaggaagagacggaguaguacguguaugggauguuaaaaaugcagaauuauuaaacaaccaauuuggaacgaugccaucguuaacacuagcaugccuaaccaaacaaggacaaguugaccuaaacgaugcaguacaagcauuaacagauuuagggcuaauauacacagcaaaauacccaaauacaagugaucuagauagauuaacccaaagucacccaauauuaaauaugauagauacaaaaaaaucuagcuuaaacauaucgggauacaacuucucauuaggagcagcuguaaaagcuggagcauguauguuagacggcggaaauauguuggaaacaauuaaaguuaguccacagaccauggaugggauauuaaaaaguauacuaaaaguaaaaaaagcccuaggaauguuuauaucagauacaccaggagaaagaaacccauaugaaaauauauuauacaaaauaugucuaucgggagacggauggccauacauagcaaguagaacaaguauaacuggacgagccugggaaaauacaguaguagaucuagaaagugauggaaaaccacaaaaagcaggcucaaacaacagcaauaaaagcuuacaaucagcaggauucacagcaggucuaacauacagccaacuuaugacacuaaaagaugccaugcuacaauuagacccaaaugcuaaaacauggauggauauagaaggcagacccgaagauccagucgaaauagcucuauaccaaccuucaucuggaugcuacauccacuucuucagagaaccaacagacuuaaaacaauuuaaacaagaugcaaaauauagucauggaauagacguaacagaucuauucgcagcccaaccaggauuaacaucagcaguaauagaugcacuaccaagaaacaugguuauuacaugccaaggaagugaugacauaagaaaacucuuugaaagucaaggaagaaaagacauuaaacuaauagauauagcacuaagcaaaacagacucccgaaaauacgaaaaugcagucugggaucaauacaaggaccuaugucacaugcacacaggagucguaguugaaaaaaaaaaaagaggaggaaaagaagaaauaacaccgcacugugcacuaauggacugcauaauguuugaugcagccguauccggaggauuaaauacgagcguauuaagagcgguguuaccaagagauaugguauucagaacaucaacaccuagaguaguacucuaa

SEQ ID NO: 9477 - RNA, 1710 nt, Artificial Sequence
  derived and/or modified CDS sequence (opt6) from LASV(G2222-SLE-2011;Clade IV)__AIT17245__NP
augagcgcuucaaaagaaauaaaauccuuccuauggacacaaaguuuaagaagagaacuaucaggauacugcaguaacauuaaacuacaggucguaaaagacgcacaagcauuauuacacgguuuagauuuuucugaaguaucaaauguacaaagauuaaugcgaaaagaaagacgagacgauaacgaccuaaaacgauuaagagaucuaaaccaagcaguaaacaaccuaguagaauuaaaaucaacacaacaaaaaucaauuuuacgaguugguacucuaacaucagaugaccuauuaauccuagcagcagaccuugaaaaauugaaaucaaagguaacaagaacagaaagaccacuaagugcuggggucuacaugggaaaccuaucaagucaacaacuagaccaaagacgugcccuauuaaacaugaucggaauguccggaucuaaucaaggcgcaagaacaggaagggacggaguaguaagaguaugggauguaaaaaaugccgaacuauugaacaaucaauucggaacuaugccaucacuaacauuagcauguuuaaccaaacaaggucaaguagauuuaaacgaugcaguccaagcacuaacagauuuaggauuaauauacacagcaaaauauccaaauaccagugaucuugacagacuaacucaaucacacccgauacuuaacaugauagauaccaaaaaaucaucauuaaacauaucaggauacaauuucucucuaggugcagcaguaaaagcuggcgcaugcauguuagacggaggaaauaugcuugaaacaauaaaaguaagcccacaaacaauggacggaauacugaaauccauacuaaaaguaaaaaaagcccuaggcauguucauaucagauacaccuggagaaagaaauccauaugaaaauauauuauauaaaauaugccuaucaggagaugguuggccauauauagcaaguagaacaaguauaaccggcagggcaugggaaaauacugucguugaucuagaaucagacggaaaaccccaaaaagcaggaucaaacaauagcaauaaaagucuccaaagugcaggacuuacagcaggauuaacauauucucaauuaaugacgcuaaaagaugcaaugcuacaacuagauccaaacgcaaaaacauggauggauauagaagguagaccagaagauccagucgagauagcucuauaucaaccuucaagugguugcuacauacacuuuuucagggaacccacugaccuaaaacaauucaaacaagacgcaaaauacagucaugggauagacgucgccgaucuauuugcagcacaaccaggauuaaccucagcaguaauagaugcccuacccagaaacuuaguaauaacaugccaaggcucagacgauauucgaaaacuccuggaaucacaaggcaggaaagauauaaaacuaaucgauauagcauuaucuaaaacagauagcagaaaauaugaaaacgcggugugggaucaauacaaagaucuaugccacaugcauacaggaauaguaguagaaaaaaaaaaaagaggaggcaaggaagagauuaccccacacugcgcuuuaauggacugcauaauguuugacgcagcagucagcgguggacuaaaugcaucagugcugagagcaguauuaccacgagacaugguuuucagaacaucaacuccaagaguaguauuauaa

SEQ ID NO: 9478 - RNA, 1710 nt, Artificial Sequence
  derived and/or modified CDS sequence (opt6) from LASV(G2230-SLE-2012;Clade IV)__AIT17247__NP
augagugcaucaaaagaaauuaaauccuuuuuauggacacaaagucuaaggagagaauuaucaggauacuguagcaauauaaaauuacaaguaguaaaagacgcacaagcacuauuacauggauuagacuuuucugaaguauccaauguacaaagauuaaugaggaaacaaagacgcgaugacagcgauuuaaaacgauuacgagacuuaaaccaagcaguaaauaauuuaguagaacuaaaaucaacacaacaaaaaucaguauuaagagucggcacuuuaacaucugacgacuuauuaauccucgcagcagaucuagaaaaacuaaaaagcaaaguuauaagaacagaaagaccacugucaucaggaguauauaugggaaacuuaucuucacaacaacuagaccaacguagagcacuauuaaacaugauaggaaugucaggaggaaaccaaggagcacaaguaggcagagacggagucguaagaguaugggauguuaaaaaugcugaccuacuaaauaaccaauucggaacaaugcccagccuaacucuagcuugccuaaccaaacaaggacaaguagaucuuaacgacguaguacaagcauuaacugaucuaggauuaauauauacagccaaauacccaaauaccucugauuuagacagacuagcacaaucacaucccauacucaacaugauagauacaaagaaaaguagccuaaacauuucaggauauaacuuuucacuaggugcagcaguaaaagccggcgcauguauguuagauggaggaaacaugcuugaaacaauaaaaguaucaccacaaacaauggacggaauauuaaaaagcauauuaaaaguaaagaaagcauuaggaauguuuauaucagaaacaccgggagaaagaaacccauacgaaaauauacuauauaaaauaugcuuaucuggcgacggauggcccuacauagcuucccgaacaucuaucacaggccgagcuugggaaaauacaauaguagaccuagaaucagacggaaaaccacaaaaagcaggaucgaauaauagcaacaaaagccuccaaucugcuggauuuacagcaggacucacauauucacaacuaaugaccuuaaaagauucaaugcuacaacuagauccuaacgcaaaaacauggauggacaucgaaggaagaccagaagacccaguagaaguagcauuauaucaacccucaucaggauguuauauacacuucuuccgagaaccaacagaucuaaaacaauuuaaacaagacgcuaaauauucacacgguauagauguaacagaccuauuugcagcucaaccaggauuaacaagcgcagugauagaagccuugccacgaaacauggugauuacaugccaaggaucagaugacauaaggaaacuacucgaaucccaaggaagaaaagacauaaaacuaauagauauagcacucaauaaaacagacucaagaaaauacgaaaacgccgugugggaccaauacaaagaucugugucacaugcacacaggcgugguaguagagaaaaagaaacgaggaggaaaagaagaaauaacaccacauugcgcauuaauggauuguauuauguuugaugcagcagucucaggugguuuaaaaacuuuaguauuaagagcgguucuaccaagagauauggucuuuagaaccaguacaccaaaaguaguccuauaa

SEQ ID NO: 9479 - RNA, 1710 nt, Artificial Sequence
  derived and/or modified CDS sequence (opt6) from LASV(G2259-SLE-2012;Clade IV)__AIT17251__NP
augucagccagcaaagaaauaaaaucauuuuuauggacacaaucccuaaggagagaacuuaguggauauugcaguaacauuaaacuacaaguaguaaaagacgcacaggcuuuacugcacggauuagauuucuccgaaguauccaauguacaaagauuaaugagaaaacaaagaagagacgacucagacuuaaaacgacuaagagaccuaaaucaagcaguaaauaacuuaguagaauuaaaaucaacacaacaaaaaucuguauuaagaguaggaacacucacuagcgaugaccuuuuaauauuagcagcagauuuagaaaaauuaaaaagcaaaguaauaagaaccgaaagaccucuaaguucaggaguauacaugggaaaccuaucaucucaacaauuggaucaaagacgagcacuauuaaacaugauuggaauguccggugguaaucaaggugcacaaguagguagagacggcguaguccgagucugggacguuaaaaacgcagaccucuuaaauaaucaauuuggaaccaugcccuccuuaacacuagcaugcuuaaccaaacaaggacaaguagacuuaaacgacguaguacaagcauuaacagauuuaggcuuaauauauacggcaaaauauccaaacacaagugaucuugacagauuagcccaaagccauccaauuuuaaacaugauagauacaaagaaauccagcuuaaacauaaguggauauaauuucucacuaggagccgcaguuaaagcuggagcuugcauguuagacggaggaaacaugcuagaaacuauaaaaguaagcccacaaaccauggacggaauccuaaaauccauauuaaaaguuaaaaaggcauuggguauguucauuucagaaacaccaggagaacgaaacccauaugaaaacauacuauauaaaauauguuuaucaggcgauggguggccauauaucgcaucaagaacgucaaucacaggcagagcuugggaaaacacaauaguagaucuugaaucagacggaaaaccacaaaagacaggaagcaacaauucaaacaaaucucuacaaucagcaggauuuacagcaggauuaacauauagucaacucaugacauuaaaagauaguaugcuucaacucgacccaaaugcaaaaacauggauggauauagaagguagacccgaagauccaguagaaguagcacuauaccaaccaucauccggaugcuacauucacuuuuucagagagccuacagacuuaaaacaauucaaacaagacgccaaauauucucauggaauagauguuaccgauuuauucgcagcacaaccaggacuaacgucagcaguaauagaagcauuaccacgaaauaugguaauaacaugucaaggaucagaugauauaagaaaauuacuugaaucacaaggaagaaaagauauaaaacuaauagauaucgcauuaaauaaaacagacucuagaaaauaugaaaacgcaguuugggaccaauacaaagacuuaugccauaugcauacaggaguuguaguugagaaaaagaaaagaggagguaaagaagaaauuacaccucauugcgcauuaauggacugcauuauguucgaugcagcagucucaggagguuuaaaaacauuaguacuaagagcaguauuaccuagagacaugguauucagaacaaguacuccaaaagucguauuauaa

SEQ ID NO: 9480 - RNA, 1710 nt, Artificial Sequence
  derived and/or modified CDS sequence (opt6) from LASV(G2263-SLE-2012;Clade IV)__AIT17255__NP
augagugcaucaaaagaaauuaaaucauuccuauggacccaaucacuacgaagagaacucagcgguuauuguucuaacauaaaauuacaaguaguaaaagacgcucaagcauuacuacauggacuagauuuuucugaaguaagcaauguccaaagacuaaugagaaaagaacgaagagaugacaaugacuuaaaacgacuaagagauuuaaaccaagcgguaaauaacuuaguggaauuaaaaagcacacaacaaaaaucggucuuaagaguaggaacacuaacaagcgaugaccuauuaguacuagcagcagauuuagaaaaacuuaaaucaaaaguaacaagaacagaaagaccacuuucagcaggaguauauaugggaaacuuaucaucacaacaauuagaucaaaggagagcauuacuaucaaugauaggaauguccggcggaaaccagagagcucaagccggaagagacggaguuguaagaguaugggauguuaagaacgcagaauuacuaaauaaccaauuugguacaaugccaucauuaacacuagcaugccuuacuaaacaaggacaaguugaccuaaaugaugcuguacaagccuuaacggaucuagguuuaauauauaccguaaaauaccccaaugcaagugacuuagauagacucacacaaucacauccaauacuaaauaugauagauacuaaaaagaguucacuaaacauaagcggauauaacuucucucuaggagcagcuguaaaagcaggggcauguauguuagauggagggaacaugcuagaaacaauaaaaguaucaccacaaaccauggacggaauauuaaaaaguauacuaaaaguuaaaaagacucuaggaauguucauaagugauacaccaggagaaagaaauccauacgaaaacauacuauacaaaauauguuuaucaggugacggauggcccuauauagcuucacgaacauccauaacaggcagagcaugggaaaauacaguagucgauuuagaaaguaauggaaaaccucaaaaagcagacucaaacucaaguaauaaaucacuacaaucagcaggauuuacagcuggauuaacauauucacaacuaaugacacuaaaagaugcaaugcuacaauuagacccuaacgcaaaaacauggauggauauagaaggaagaccagaagauccgguagaaauagcguuuuaucaaccuucaucagguugcuauauacauuucuuucgagaaccaacagaccuaaaacaguuuaaacaagaugccaaauacagccauggaauugacguuacagacuuauucgcagcucaaccaggauugacuucagcaguaauagaugcauuacccaggaauauggucauaaccugucaagguagcgaugacauaagaaaacuguuagaaucacaaggaagaaaagauauaaaauuaauagacauagcguuaucaaaaacugacucaagaaaauacgaaaaugccguaugggaucaguauaaggauuuaugccauaugcauacaggaguaguuguagaaaagaagaaaagaggaggaaaagaagaaauaacaccacauugcgcccuaauggauugcauaauguuugacgcagcaguaagcggaggauuaaacacacucguuuuaagagcaguauuaccaagagauaugguuuucagaacaagcacuccacgaguuguacuguaa

SEQ ID NO: 9481 - RNA, 1710 nt, Artificial Sequence
  derived and/or modified CDS sequence (opt6) from LASV(G2280-SLE-2012;Clade IV)__AIT17259__NP
augagugcuucuaaagaaauaaaaucauuucuauggacacaaucgcuaaggagagaacuuucuucauauuguucuaauauuaaacuccaaguagucaaagaugcgcaagcacuacuacacggauuagauuuuucagaaguauccaacguacaaagacuaaugagaaaagaaagaagggacgacaaugaucucaaaagauuacgugaucuaaaccaagcaguaaacaauuuaguagaacuaaaaucaacacaacaaaaaucaauacuaagaguaggaacacucacauccgaugacuuacucauacuugcagcagauuuagaaaaacucaaaucaaaaguaacaagaacagaaagaccacuaucagcaggaguauauauggguaauuuaucaucacaacaauuagaucaaagaagagcacuccuaaacaugcuaggaaugaguggaucaaaccaaggagcaagagcaggaagagauggaguaguacgaguaugggauguaaaaaacgcagaacuacucaauaaccaauucgguacaaugccuucacuaacacuagcuugcuuaaccaaacaaggucaaguagacuuaaacgaugcugugcaagcucuaaccgaucuuggacuaaucuauacagcaaaauauccuaauacaucagauuuagacagacucacacaaucacauccgaucuuaaacaugauagacacaaaaaaaucaagcuuaaacauaucaggauacaauuuuagccuaggagcagcaguaaaagcaggagccuguauguuggacggagguaauauguuagaaacuauaaaaguuucaccacaaacaauggauggaauccugaaaucaauccuuaaaguaaaaaaagcauuaggaauguucauaucagacacaccaggagaaagaaacccauaugaaaacauacuuuacaaaauaugcuuaagcggagauggcuggccauauauagcaagucguacaucaauaacuggaagagcaugggaaaacacaguaguagacuuagaaagcgauggaaaaccacaaaaagcaggaucaaauagcucaaauaaaucacuccaaucggcaggauuuacagcuggauuaaccuacagucagcuuaugacacuaaaagaugcuauguuacaauuagauccaaaugcaaaaacauggauggauauagaaggaagaccagaagacccaguagaaauagcucucuaucaaccgucaucaggauguuauauacauuuuuucagagaaccaacagauuuaaaacaauuuaaacaagacgcuaaauauucacauggaauagacguaacagaccuuuucgcagcacaaccaggacucacauccgcaguuauagaugcacuaccaagaaauaugguaauuacaugccaaggaucagaugacauaagaaaauuauuggagucacaaggcagaaaagauauaaaauugauugauauagcucuaucuaaaacagauucaagaaaauacgaaaaugcaguaugggaccaauauaaagacuuaugccauaugcacacaggaauagucguagagaaaaaaaaaagaggcggcaaagaagaaauaacaccacauugugcacuaauggauuguauaauguuugaugcagcagucaguggaggauuaaaugcaagcguacuaagggcaguacugccaagagacaugguuuuuagaacuucaacaccaagaguuguauuauaa

SEQ ID NO: 9482 - RNA, 1710 nt, Artificial Sequence
  derived and/or modified CDS sequence (opt6) from LASV(G2295-SLE-2012;Clade IV)__AIT17263__NP
augucagccaguaaagaaauuaagagcuuccuauggacacaaagucuaagaagagaauuaucugguuacuguucaaacauaaaacuacaaguagucaaagaugcacaagcccuauuacauggguuagauuuuucagaaguaucuaauguacaaagauuaaugagaaaagaaagacgcgacgacaacgaucuaaaaagacuaagagaucuaaaccaagccguuaauaauuuaguagaacugaaaucuacacaacaaaaaucaguauuaagaguagggacacuuacaucagacgacuuacuaauccucgcagcagauuuggaaaaauuaaaaaguaagguaauaagaacagaaagaccuuuaucugcaggagucuauaugggaaaucuaaguucacaacaauuagaucaaaggagagcacucuuaaacaugauaggaauggguggaagcaaucaaggagcacgugcaggacgagacggaguaguaagaguaugggauguaaaaaaugcagaauuacuaaacaaucaauuuggaacaaugccaucuuuaacacuagcaugucuuacaaaacaaggucaagucgacuuaaacgaugccguacaagcauuaacagaccucggauuaauauauacagcuaaauaucccaacacaucagaccuugacagacuaacacaaagucacccuauccuaaacaugauagauacaaaaaaaucuucgcuaaacauaaguggauauaauuucucccuaggcgcagccguaaaagcuggcgcauguaugcuugacgggggaaauauguuggaaacuauaaaaguuaguccacaaacaauggacggaauacuaaaaucaauauuaaaaguaaaaaaagcacuaggaauguuuaucagcgauacaccaggagaaagaaacccauaugaaaacauacuauacaaaauauguuuaagcggagauggcuggccauauauagcaucaagaacaagcauaacaggacgagcaugggaaaauacagucguagacuuagaaucagacggaaaaccacaaaaagcaggaaguaacggaucaaacaaaucacuacaaucugccggauuuaccgcaggccuaacauauagccagcuaaugacguuaaaagacgcaaugcuacaacucgacccaaauacuaaaacauggauggauauugaagguagaccagaagaccccguagaaguagcauuauaucaaccaucaagugguuguuacauacacuucuucagagagccaacagaccuaaaacaauucaaacaagacgcaaaauacagucauggaauagauguaacagaucuauuugcagcucaaccagguuuaacaucagccguaauagacgcacuacccagaaacaugguaauaacuugucaaggaucagacgauauaagaaaauugcuugaaagucaagguagaaaagauauaaaacuuauugacauagcucuaucaaaaacagacaguagaaaauacgaaaaugcaguaugggaccaauauaaagacuuaugccauaugcauaccggaauagucguagaaaaaaaaaaaagaggagguaaagaagaaauaacaccucauugugcacuaauggacuguauaauguuugaugcugcuguaucgggaggccuaaacacaucaguucucagagcaguacuaccuagagauaugguauuuagaacaucaacgccaagaguaguacuuuga

SEQ ID NO: 9483 - RNA, 1710 nt, Artificial Sequence
  derived and/or modified CDS sequence (opt6) from LASV(G2315-SLE-2012;Clade IV)__AIT17267__NP
augagcgccaguaaagaaauaaaaucauuucuauggacacaaucacuucguagagaauuaagugguuacugcucuaacaucaaauuacaaguaguuaaagaugcacaagcucuguuacacgguuuagacuuuucagaaguaucaaauguacaaagauuaaugcgaaaagaaagaagagaugacaaugaccuaaaaagauuaagagauuuaaaucaagcgguaaauaaccuaguagaacuaaaaaguacucaacagaaaagcguauuaagaguaggaacacugacaagugacgaucuacuaauacuagcagccgaccuagaaaaauuaaaaucuaaaguuacaagaacagaaagaccacuaagcgcaggaguuuacaugggaaacuugaguucacaacaacuagaucaaagacgagcauuauuaaacaugauaggaaugagugguggaaaucaaggugcaagagcuggaagagacgggguuguaagaguaugggauguuaaaaaugccgaacugcuaaauaaccaauuuggaacaaugccaucacuaacccuggcgugucuaacaaaacaaggacaaguagauuuaaaugacgcaguacaagcucuaacagauuugggauuaauauauacagcaaaauauccaaacacaucagaccuagacagauuaacacaaucccauccaauauuaaacaugauagauacuaagaaaucaucacuaaacauaagcgguuauaauuucaguuuaggagccgccguuaaagcaggagcauguaugcuagacggaggaaauaugcuagaaacaauaaaaguaucuccacaaacaauggauucuaucuuaaaaucaauauuaaaaguaaagaaagcacuaggaauguuuauauccgauaccccaggagaaagaaacccauaugaaaauauauuauacaaaaucugcuuaaguggagauggauggccuuauauugcaucacgaacgucaauaacaggacgagcaugggaaaauacgguaguugacuuagaaucagacggaaaaccacaaaaagcaggaucaaauaacucaaauaaaucacuccaaucagcaggauucgcagcaggccuaacauauucacaauuaaugacauuaaaagaugcuaugcuacaacucgauccaaacgcuaaaacauggauggacauagaaggaaggccagaagacccaguugaaauagcgcuauaucaaccaagcucaggaugcuauauacacuucuuucgagaaccuaccgacuuaaaacaauuuaaacaagaugccaaauauucacacggaaucgacguuacugaucuauuugcagcucaaccaggauuaacuucagcaguaauagaugcacuacccagaaauaugguaauaacaugucaaggaucagacgacauaagaaaacuauuagaaucacaaggacgaaaagacauaaaauuaauagacauagcucuuaguaaaacagacaguagaaaauaugaaaacgcugucugggaucaguacaaagaccucugccauaugcauacagguguaguagucgaaaagaagaaaagaggaggcaaagaagaaauaacaccacauugcgcauuaauggauugcaucauguuugacgcagcaguuucgggaggacuaaacacaucgguacuuagagcaguucuacccagagauaugguguuuagaacgacaacaccuagaguaguuuuauaa

SEQ ID NO: 9484 - RNA, 1710 nt, Artificial Sequence
  derived and/or modified CDS sequence (opt6) from LASV(G2318-SLE-2012;Clade IV)__AIT17271__NP
augucugcaagcaaagaaauaaaaaguuucuuauggacccaaucauuaagacgugagcucucaggauauuguaguaacaucaaacuucaaguuguaaaagacgcacaagcucuucuacauggauuagauuucuccgaaguaaguaacguccaacgacuaaugagaaaagaaagacgagaugauaacgaucuaaaacgauuaagagaucugaaucaagcagucaauaauuuaguagaauuaaaaucaacucaacaaaaaucaauauuacgaguuggaacacuaacaucagacgaucuacuaauauuagcagcagaucuagaaaaauuaaaaucaaaagucacacgaaccgaaagaccacuaucugcaggaguauauaugggaaaccuaaguucacaacaacucgaucaaagaagagcauuauuaaauaugauagguaugucaggaggaaaccaaggagcaagagcaggaagagacggaguaguaagaguaugggauguaaaaaacgcagaacuuuuaaacaaucaauuuggaacaaugccaucacuuacuuuagcaugcuuaacaaaacaaggccaaguugacuuaaacgaugcaguucaagcucuaacugaccuaggcuugauauauacagccaaauauccaaauacaagugaccuggacagauuaacacaaucacacccaauacuuaacaugauagauacaaaaaaaucaucauugaauauaaguggauauaacuucucacuaggagcagcuguaaaagccggagcauguaugcuagacggcggaaauauguuagaaacuauaaaaguuaguccccaaaccauggaugguaucuuaaaaacaauauuaaaaguaaaaaaagcauuaggcauguucauuucagauacacccggagaacgaaaccccuaugaaaauauacuguauaaaauaugccuaucaggugauggauggccauacauagccucaagaacaucaauaacaggaagagcaugggaaaauacaguaguagacuuagaaucagauggaaaaccacaaaaaacuggcucaaacaacagcaauaaaucacuacaaucggcaggauuugccgccggauuaacauauagccaacuaaugaccuuaaaagaugcaaugcuccaguuagacccaaaugcuaaaacauggauggauauagaaggaagaccagaggacccaguagaaauagcauuauaucaaccaaguaguggauguuacauacacuuuuucagagaaccuacagauuuaaaacaauuuaaacaggacgcaaaauauucacauggcauagauguaacagaucuauuugcagcacaaccagguuuaacaucugcugucauugaugcccuacccagaaacaugguaauuacuugucaaggaagugacgauauaagaaaauuauuagaaucacaagggagaaaagauauaaaauuaauagauauugcauuaucuaaagcugacucacgaaaauacgaaaacgcuguaugggaucaauacaaagacuuaugccauaugcacacaggaguaguuguagaaaaaaaaaaaagaggaggaaaagaagaaauaacaccacacugugcacuuauggauugcauaauguaugaugccgcaguaucaggaggauuaucaacuagcguccuaagagcaguucucccaagagauaugguauuccgaacaaguacaccuagagucguacuuuaa

SEQ ID NO: 9485 - RNA, 1710 nt, Artificial Sequence
  derived and/or modified CDS sequence (opt6) from LASV(G2363-SLE-2012;Clade IV)__AIT17275__NP
augagugcaucaaaagaaauaaaaucuuuucucuggacacaaucucuaagaagagaauuaaguggcuauugcaguaacauaaaauuacaagugguaaaagacgcacaagcauuacuccaugggcuagauuuuucugaaguaucaaauguacaaagacuuaugagaaaacaaagaagagaugauggcgauuuaaaacgauuaagagacuuaaaucaagcggucaauaauuugguagaacuaaaaaguacacaacaaaagagugucuuacgagucggcacacuaacaagugacgacuuauuaacacuagcagcagaucuagaaaaauuaaaaucuaaaguaacacgaacagaaagaccauuaucagccggaguuuacauggguaaccuaucgucacaacaauuagaccaacggcgggcacuauuaaauaugauaggaaugaguggcggcaaccaaggcgcuagaacaggaaaagacgguguagucagaauaugggacguuaaaaacgccgaucuuuuaaauaaucaauucggaaccaugccaucguuaacacuugcaugucuuacaaaacaaggccaaguagauuuaaacgauguuguacaagcacuaacagaucuaggauuaauauacacagcaaaauacccaaacauaagcgacuuagauagauuagcacaaucacacccaauuuuaaaaaugauagauacaucuaaaucaucauuaaacauaagcggcuauaauuucagucuaggagccgcaguaaaagcaggagcauguauguuagacggaggaaauauguuagaaacuguaaaaguauccccacaaacaauggacggaauauuaaaaucaauauuaaaaguaaaaaaaucacuagguauguuuauauccgauacaccaggagaaagaaacccauaugaaaacauacuuuauaaaauaugccuaaguggagaugguuggccuuauauugcaagcagaacaucaaucacaggacgagcaugggaaaauacaguaguagaccuagaaucugaugguaaaccacaaaaaguaggaaguaacaauucaaauaaaucgcuccaaucaacaggguucaccgcaggauuaacauauucacaacuaaugacauuaaaagaugcaaugcuccaauuagacccaaaugcaaaaacauggauggauauugaaggaagacccgaagacccuguugaaauagcacuauaccaaccuagcucaggcugcuacauacauuuuuucagagaaccaacagauuuaaaacaauuuaaacaagacgcuaaauauucucauggaauagacguaacagaccuauuugccgcacaacccggauuaaccucagcaguaauagacaccuuaccaaggaauauggucauaacuugucaaggauccgacgacauagguaaauuacuagaaucacaaggacgcaaagacauaaaauuaaucgacauagcauuaaguaaaacugacaguagaaaguacgaaaacgcuguaugggaccaauauaaagaucucugccauaugcacacaggaguaguaguagaaaaaaaaaaacgcggaggcaaagaagaaauuacaccacacugugccuugauggacugcauaauguucgacgcagcaguuucugguggacuaaaugcaucaguauuaagagcaguauuaccccgggacaugguauuuagaacaaguacuccaagaguuguauuauaa

SEQ ID NO: 9486 - RNA, 1710 nt, Artificial Sequence
  derived and/or modified CDS sequence (opt6) from LASV(G2384-SLE-2012;Clade IV)__AIT17277__NP
augucagcaagcaaagaaauaaaaucauuuuuauggacacagucacuaagaagagaauuaucaucauacuguaguaacauuaaauuacaaguaguaaaagaugcccaggcuuuauuacacggacuagacuuuagcgaaguaagcaauguacaaagauuaaugcgaaaagaacgaagggacgacaaugaccuaaaaagauuaagagauuuaaaucaagcaguuaauaaucuaguugaauuaaaaucaacucaacaaaaaucaauauuacgaguaggaacacuaacaagugacgacuuguuaauucuagcagcagauuuagaaaaacuaaaaucaaaaguaacccgaacagaacgaccauuaucagcaggaguauauaugggaaaccuuucaagccaacaacuagaucaaagacgagcacuauuaucaaugauagguaugagcggcagcaaccaaggagcuagagcuggaagagacgguguaguaagaguaugggauguuaaaaacgcagaauuacuaaauaaccaauucggaacaaugcccucacuaacacuagcaugcuuaacaaaacaaggacaaguagaccuaaacgacgcaguacaagcacuuacagaucuaggacucauauauacagcaaaauauccaaauacaagugaccuagaccgacuaacucaaucacacccaauuuuaaacaugauagauacaaagaaaaguucucuaaacauaaguggauauaacuucuccuuaggagcagcagugaaagcaggagcauguauguuggacggaggaaauaugcuagaaacaauaaaaguaaguccucaaacuauggacggaauauugaaauccauccucaaaguuaaaaaggcuuuaggaauguuuauaucagauacuccaggagaaagaaacccauaugaaaauauauuauacaaaauaugccuaaguggagauggauggccuuauauagcuaguagaacaucaauaacuggccgagcaugggaaaacacaguaguagaucuagagucggauggaaaaccccaaaaagcgggaucaaauaacucaaauaaaucacuucaaagugcaggauucacagcgggacuaacuuauagucaacuaaugacauuaaaagacgcaauguuacaacuugauccaaaugcaaaaacauggauggauauagaaggaaggccagaagacccugucgaaguagcauuauaccaaccaagcucuggauguuauauacacuucuuuagagaaccaacagaucuaaagcaauuuaaacaagaugccaaauauagccacggaauagacguaacagaucuauuugcagcacaaccaggauuaacauccgcaguaauagaugcacuacccagaaauaugguaauaacaugucaagguucagaugacauaagaaaacuacuagaaagucaaggaagaaaagauauaaaacuaauagauauagcauuaucgaaaacagacucaagaaaauaugaaaacgcaguaugggaccaauacaaagacuuaugccauaugcacaccggaguugucguagaaaagaagaaacgagguggaaaagaagaaauaaccccgcacugugcauuaauggacugcaucauguuugacgcagcaguaagcggaggauuaaacacuagcguacucagagcaguuuuaccacgagauaugguauuucgaacaucaacgccuagaguaguacuauaa

SEQ ID NO: 9487 - RNA, 1710 nt, Artificial Sequence
  derived and/or modified CDS sequence (opt6) from LASV(G2392-SLE-2012;Clade IV)__AIT17281__NP
augagcgcuagcaaagaaauaaaaucuuuccuauggacacaaagccuaagaagagaguuaucaggguauugcucuaacauuaaacuacaaguaguaaaagacgcacaagcacuacuacacggacuagacuucucagaaguaagcaacguccaaagacuaaugcgaaaagaaagaagagacgauucagaccuaaaaagacuaagagacuuaaaucaagcaguuaauaaucuaguagaacuaaaaucaacucaacaaaaaaguguauuacgaguagggacacuaacaagcgaugauuuacuuguacucgcugcggaccuagaaaaacuaaagaguaaaguaaccagaacagaaagaccauuaucagccggaguauauaugggaaacuuaucaucacaacagcuugaccaaagaagagcauuauuaaguaugauaggaaugagcggaggaaaucaaggggcaagagcaggaagagacggaguugugagaauaugggauguuaaaaacgcugaacuacuuaauaaccaauuuggaacaaugcccagccuaacgcuugcaugcuuaacaaaacaaggacaaguagacuuaaacgaugucguacaagcauuaacugaccucggauuaauauauaccgcuaaauaucccaauacaucagauuuagaccgacuaacacaaucacacccaaucuugaauaugauagauacaaaaaaaaguagccuaaacauuagcgguuacaauuucucuuuaggagcagcagugaaagcaggagcauguauguuagauggggguaacaugcuagaaacuaucaaaguaaguccccaaacaauggacggaauauuaaaaaguauauuaaaaguaaaaaaagcauugggaauguucauaagcgacacaccaggugaaagaaauccauaugaaaauauccuauauaaaauaugucuaaguggagacggauggccauauauagcuucaagaacaucaauaacuggcagggcaugggaaaauacaauaguagauuuagaauccgaugggaaaccccaaaaaaccagcacaacaaacagcaauaaaucacuacagagugcuggauuugcagcuggcuuaacauacucacaacuaaugacuuuaaaagaugcaaugcugcaauuagacccaaacgcaaaaacuuggauggacauagaaggcagaccagaagauccaguagaaauagcauuauaucaaccaagcucaggauguuacauacauuucuucagagaaccaacagaucuaaaacaauuuaaacaagaugcaaaauauagucauggaauagacguaacagaucucuuugcagcacaaccaggauuaaccucagcaguaauagauacucuaccuagaaacaugguaaucacaugccaagguagugaagacauuagaagauuacuagaaucacaaggaagaaaagacauaaaauuaauagauaucgcucuaagcaaaacagacagucgaaaauaugaaaacgcuguuugggaccaauacaaagaccuaugucauaugcauacaggaguaguaguugaaaaaaaaaaaaaaggaggaaaagaagaaauaacaccacauugugcacucauggacugcauaauguucgacgcagccguaucaggaggacuuaacaccucaguacuaagagcuguauuaccuagagacaugguauuuagaacaucaaccccaagaguaguuuuauaa

SEQ ID NO: 9488 - RNA, 1710 nt, Artificial Sequence
  derived and/or modified CDS sequence (opt6) from LASV(G2405-SLE-2012;Clade IV)__AIT17285__NP
augucagcuucaaaagaaauaaagagcuuucuauggacacaaucccuaagaagagaacuaagcggauacugcaguaacauaaaacuccaaguaguuaaagacgcacaagcacuacuacauggacuagauuucucggaaguuucaaacguacaaagaucaaugagaaaagaaagaagagacgauaacgaucuaaaaagacuaagagauuuaaaccaagcuguaaacaaccuaguagaacucaaaucgacacaacaaaaaucuauauuaagaguuggaacguuaacaagcgaugaccuuuuaaucuuagcagcagaccucgaaaaacuaaaaucaaaagucacaagaacagaaagaccauuaagugcuggaguauauaugggcaaucuaagcucccaacaacuagaccaaagaagagcacuacuuaauaugauaggcaugucuggcucuaaccaaggagcaagagcuggcagagacggcguaguacgaguaugggauguaaaaaaugcagaacuauuaaauaaucaauucggaacaaugccaucacucacauuagcaugucugacaaaacaaggacaaguagaccuaaaugauguaguacaagcauuaacugaucuaggacuaauauauaccgcaaaauaucccaaugccucagauuuagauagacuaacacaaucucacccaauacuaaauaugauagacacaaaaaaaucuaguuugaacaucaguggcuauaacuuuagcuuaggagcagcaguuaaagcaggugcauguauguuagauggaggaaacauguuagaaacaauaaaaguauccccacagacaauggacggaauacuuaaaaguauauuaaaaguuaaaaaagcacuaggaauguucauaagugauacaccaggagaacgaaaucccuacgaaaauaucuuauacaaaauaugcuuaucaggagauggauggccauauauagcaucaagaacaucuauaacaggaagagcuugggaaaauaccaucgucgaucuagaaucagauggaaaaccacagaaagcuggaaacaaugguucaaacaaaagccuacaaagugcaggauuuaccgcaggacuaaccuauucacaacucaugacgcuaaaagacgcaauguuacaauuagauccaaacgcuaaaacuuggauggauauagaaggacgaccagaagauccaguugaaauagcuuuauaucaaccaucuuccgguuguuauauacacuuuuucagagaaccaacagauuuaaaacaauuuaaacaagacgcgaaauauucacacggaauagacguuacagaucucuucgcagcacaaccaggauuaacaucagccguaauagaugccuuaccacgaaacuuaguaauaacaugccagggaucugaugacauacgaaaauugcucgaaucacaaggaaggaaagacaucaaacucauagauauagcauuaagcaaaacugacuccagaaaauacgaaaacgcgguaugggaccaauacaaagacuuaugccacaugcacacagggaucguaguagaaaaaaaaaaaagaggaggaaaagaagaaauaacaccacauugugcauuaauggacugcauaauguucgacgcugcaguaagcggaggcuuaaauacaucaguacuacgagcaguacuaccccgagauaugguauucagaacaucuacaccacgaguaguacuauaa

SEQ ID NO: 9489 - RNA, 1710 nt, Artificial Sequence
  derived and/or modified CDS sequence (opt6) from LASV(G2427-SLE-2012;Clade IV)__AIT17289__NP
augucagcaaguaaagaaauaaaaaguuuccuuuggacccaaaguuuaagaagagaauugucaggcuacugcagcaacaucaaacuacaaguaguaaaagaugcacaagcucuauuacacggauuagacuucucagaaguaucaaacguacagcgauuaaugcguaaagaaagacgagaugauucagauuuaaaaagacuaagagaucuaaaucaagcaguaaauaacuuaguagaauuaaaaucaacucaacaaaaaucaguauuacgaguagguacacuaacuucagaugaccuacuaguccucgccgcagaucuugaaaaacuaaaaagcaaaguaacaagaacagagagaccauuaucagcaggagucuauaugggaaaccuaaguucacaacaguuagaucaaagaagagcacuccucucaaugauaggaaugucaggaggaaaccaaggcgugcgagcaggaagggacggaguaguacgaauaugggacguaaaaaaugcagaacuucucaacaaucaauucggaacaaugccaucauuaacacucgccugccucacaaaacaaggacaagucgaccuaaacgacguuguacaagccuuaacagaucuaggucuaauauauacagcuaaauauccaaauacauccgacuuagacagacuaacacaaagucauccaaucuuaaauaugauagauacaaaaaaaaguucauuaaacauauccggauacaauuucaguuuaggagcagcaguaaaagcaggagcaugcauguuggacggaggaaauauguuagaaacaauaaaaguaaguccacaaacaauggauggaauacuaaaaaguaucuuaaaaguuaaaaaagcacucggaauguucauaucagauacaccaggagaaagaaauccauacgaaaauauauuauauaaaauauguuuaagcggagacggauggccauacaucgcaaguagaacaaguauaacagguagggcaugggaaaauacaauaguagacuuagaaagugauggaaaaccccaaaaaacuggaagcaucaauucaaauaaaucauuacaaucaacaggauucgccgcaggauuaacauauagucaguuaaugacauuaaaagaugccaugcuacaacucgauccaaacgcaaaaacauggauggacauagagggcagaccugaagaucccguugaaauagcucucuaccaaccaucaucaggaugcuacauacacuuuuucagagaaccaacagaccuaaaacaauuuaaacaagaugcuaaauauagccauggaauugauguuacugaucuauuugccgcccaaccaggauuaaccagugccguaauagaugcccuaccacgaaacaugguaauaaccugucaaggcucagaugacauaagaaaacuucuagaaucacagggaagaaaagacauaaaacuaauagacauagcccuaucaaaaacugacucaagaaaauacgaaaacgcaguaugggaucaguacaaagauuuaugccauaugcauaccggaauaguaguagaaaaaaaaaaaagaggaggaaaagaagaaauaaccccucacugcgcacuaauggauugcauaauguuugaugccgcaguuagcgguggauuaaacacauccguauuaagagcaguacuuccaagagauaugguuuuucguacaaguaccccaagaguaguauuauaa

SEQ ID NO: 9490 - RNA, 1710 nt, Artificial Sequence
  derived and/or modified CDS sequence (opt6) from LASV(G2431-SLE-2012;Clade IV)__AIT17293__NP
augagcgcuagcaaagaaauaaaaucauucuuauggacacaaucauuacgaagagaacuaucaggauacuguucuaacauaaaauuacaaguagucaaagacgcacaagcacuauuacacggauuagauuuuagcgagguaucaaacguacaaagauuaaugcggaaacaacguagggacgauaaugacuuaaaaagauuaagagaucucaaucaagcaguaaauaacuuaguagagcugaaaucaacacaacagaaaaguguauuaagaguuggaacauuaacaucugaugaccuucuaguauuagcagcagauuuagaaaaacugaaaucgaaaguuacaagaacagaaagaccacucucagcaggaguuuacaugggaaacuuaagcacacaacaauuagaucaaagacgagcauuauuaaacaugauugggaugucaggaggaaaccaaggagcaagagcaggacgagacgguguaguaagaguaugggaugugaaaaacgcagaucugcuuaauaaccaauucggaacaaugccaucacuaacauuagccugucuaacaaaacaaggacaaguggaucuaaacgauguuguacaagcccucacagauuuaggacuaauuuauacagcaaaauauccaaauaccagugaccuagacagauuaacacaaucacauccgauauuaaacaugauagauacaaauaaaucaucacuaaacauaagcggguacaauuucagcuuaggugcagcaguaaaagccggagcauguauguuggacggaggaaauaugcuagaaacaauuaaaguuucaccucaaacaauggauggaauacugaaaagcauccuaaaaguaaagaaagcacuuggaauguuuauaagugacaccccaggagaaagaaauccauaugaaaacauauuauauaaaauaugucucucaggagauggauggccauauauagcaagcagaacaucaauaacuggacgagcaugggaaaauacaguuguugauuuagaaucugauggaaaaccacaaaaagcaggaggaaauaauucaaauaaaucacuacaaagugcagguuuuacagcaggauuaacguauagucaacuaaugacauuaaaagacgcaauguuacaacuagacccaaacgcaaaaacuuggauggacaucgaaggcagaccggaagacccaguagaaauagcacucuaucaaccaucaagcggaugcuauauccacuuuuucagagaacccacagauuuaaaacaauuuaaacaagacgcaaaauauucacauggaauagauguaacagaucuuuuugccgcgcaaccaggauuaacaucugcaguaauagacgcgcuuccaagaaauauggucauaaccugucaaggaagugaugauauaagaaaacuauuagaaucgcaaggcagaaaggacauuaaacuuaucgacaucgcacuaucaaaaacugacaguagaaaauacgaaaaugccguuugggaccaauauaaagauuuauguaauaugcauacaggaauaguaguagaaaagaagaaaagaggaggaaaagaagaaauaacaccacauugcgcacuaauggauuguauaauguuugaugcagcaguaaguggaggaaugaauacuagcguacuaagagcaguacuaccaagggacaugguuuuccgaacaagcacaccaagaguaguacucuaa

SEQ ID NO: 9491 - RNA, 1710 nt, Artificial Sequence
  derived and/or modified CDS sequence (opt6) from LASV(G2511-SLE-2012;Clade IV)__AIT17295__NP
augagugcaucaaaagaaauaaaaucauuuuuauggacacaaagccucagaagagagcucucaggauauuguucaaauaucaaacuacaaguuguaaaagaugcacaagcucuauuacauggccuagauuucucagaaguuucaaauguacaaagacuaaugagaaaagaaagacgagaugacaaugaucuaaagagacuaagagaccuaaaccaagcaguuaacaaccugguagaauuaaaaucaacacaacaaaaaucaguuuuacgaguaggaaccuuaacaucagaugauuuacuaauauuagcagcagaccuagaaaaacuuaaaucaaaaguaauacgaacagaaagaccauuaucagcaggaguauacaugggaaacuuaucaucacaacaauuagaccagcguagagcacugcuaaacaugauagguaugggaggaagcaaccaaggagcaagagcuggaagagauggcguaguaagagucugggacgucaaaaaugcugaauuauuaaauaaccaauucggaacaaugccuucacuaacacuagcaugcuuaaccaaacaaggccaaguagaucuaaacgaugcaguacaagcucucacagaccucggacuaauuuauaccgcaaaauacccaaauacaagcgauuuagacagacuaacucaaagucaccccauacuuaacaugauagauacaaaaaaauccucguuaaauauaaguggauacaacuucagucuaggugcagcuguaaaagcaggugcaugcaugcucgauggaggaaauaugcuugaaacaauaaaaguaucaccacaaacaauggacggaauacuuaaaucaauauuaaaaguaaaaaaagccuuaggcauguuuauaucagauacaccaggagaaagaaauccauaugaaaacauauuauacaaaaucuguuuaucaggagauggcuggcccuauauagcaucaagaacaucuauaacuggaagagcaugggaaaacacaauaguagaccuagaaucagacggaaaaccacagaaagcaggaucaaauggaucaaauaaaucacuacaaagugcaggauuuacagcagggcuaacauauucacaacuuaugacauuaaaagaugcaaugcuacaacuagauccaaacgcuaaaacauggauggauauagaaggacgaccagaagauccaguagaaauagcgcucuaucaaccaaguucaggaugcuauauccacuuuuucagagaaccaacagaucuaaaacaauuuaaacaagacgcaaaauauagucacgguaucgacguaacagaucucuuugcagcacaaccaggauuaacaucagcaauaauugaugcucuaccccgaaacauggucauaacuugucaagggucagaugacauuagaaaacuauuagaaagucaaggacgaaaagauauaaaauuaauagauauagcacuaaguaaaaccgacaguagaaaauaugaaaaugcuguaugggaccaauacaaagauuuaugccacaugcauaccggaauuguaguagaaaaaaaaaaacgcgguggaaaagaagaaaucacuccccacugugcucuaauggauugcauuauguuugacgcagccguaucaggaggacuaaacacuagcgugcucagagcaguacuaccucgagacaugguauuuagaaccucaacaccaagaguaguacuuuaa

SEQ ID NO: 9492 - RNA, 1710 nt, Artificial Sequence
  derived and/or modified CDS sequence (opt6) from LASV(G2554-SLE-2012;Clade IV)__AIT17299__NP
augucagcaucaaaagaaauaaaaaguuucuuauggacacaaucauuacgaagagaacucucaggauauugcucaaacauuaaacuacaaguaguaaaagacgcacaagcacuauuacacggacuagauuuuucagaaguauccaacguacaacgacuuaugagaaaagaacgaagagaugauaacgauuuaaaaaggcuaagagacuuaaaccaagcaguuaacaauuuaguagaguuaaaaucaacacaacaaaaaucagucuuaagaguaggaacacuaacuucagaugaccuauuaguccuagcugcagauuuagaaaaauuaaaaucaaaaguuaccagaacagaacgaccccuaucagcaggaguuuacaugggaaacuuaagcucacaacaacucgaccaaagacgagcauuauuaucaaugauugguaugaguggcggaaaucaaggcgcuagaaccggaagagauggugucguaagaguaugggauguuaaaaaugcagaacuauuaaacaaccaauucggaacaaugccaagccuaacauuagcaugccuaacuaaacagggacaaguagacuuaaacgauguaguacaagcauuaaccgauuuaggacuaauauauacagccaaauacccaaauacaagugaccuagauaggcuaacucaaagccauccaauacuaaacaugauagauacuaaaaagagcagucuaaacauaucuggauacaacuucucacuaggagcagcuguaaaagcaggagcuuguaugcuagacggaggaaauaugcuagaaacaauaaagguaucuccacagacaauggacgggauucugaaaaguaucuuaaaaguaaagaaagcucuaggaauguuuauuucagacacaccaggagaaagaaauccuuaugaaaauauauuauacaaaaucuguuuaagcggagaugguuggccauauauagcuuccagaacuucuauaacagguagagcaugggaaaauacaguagucgauuuagaaagugauggaaaaccacaaaaagcaggaucaaauaacagcaacaaaucauuacaaagcgccgguuucacagcaggacuaacuuauucacaacuaaugacccuaaaagaugcaaugcuacaauuagauccaaaugcuaaaacuuggauggauauagaagguagaccagaagacccaguagaaauagcauuauaccaaccaucaucgggauguuauauacauuucuuucgagaaccuagcgaccuaaaacaauuuaaacaagaugcaaaauauagccaugguauagauguaacagauuuauuugcagcacaaccaggacuaacgucagcgguaauugacgcacuuccuaggaacaugguaauuaccugucaaggaucagacgauauaagaaaauuauuugaaucccaaggaagaaaagauauaaaacuaauagacauagcuuuaucuaaaacugauaguagaaaauacgaaaacgcaguaugggaccaguacaaagaccuaugccauaugcauacggguguaguaguagaaaagaagaaacgaggaggaaaagaagaaauaacaccacacugcgcacuaauggauuguauaauguuugacgcagccguaagcgguggacuuaauucauuaguacuaagggcuguucuaccaagagacaugguauuccgcacauccacaccaagaguuguacuauaa

SEQ ID NO: 9493 - RNA, 1710 nt, Artificial Sequence
  derived and/or modified CDS sequence (opt6) from LASV(G2557-SLE-2012;Clade IV)__AIT17303__NP
augucagcaucaaaagaaauaaaaucauuucuauggacccaaucauuaagaagagaacuauccggauauuguuccaacauaaaauuacaaguaguaaaagacgcacaagcuuuacuacacggacuagacuuuuccgaaguuucaaauguacaaagacuaaugcgaaaacaacgcagagacgacagcgaucuaaaaagacugagagacuuaaaucaagcaguaaacaaucuaguagaacuaaaguccacacaacaaaaaucaguuuuaagaguuggaacuuuaacaagugaugaccuauuaguacuagcugccgaccuagaaaaauuaaaaucaaaaguaauacgaacagaaagacccuuaucaagcggaguauauauggguaacuuaucaucacaacaauuagaccaaagaagagccuuacuaaacaugauaggcaugucaggagguaaucaaggagcacaaguaggcagggauggaguaguaagaguaugggaugucaaaaacgcagaccuauuaaauaaccaauucgggacaaugccgaguuuaacauuagcaugccuaaccaaacaaggccaaguagauuuaaaugauguaguccaagcacuaacagaucuaggauuaauauauacagcaaaauauccaaauacaagugacuuagauagacuaguacaaucucauccaauauuaaacaugauagauacaaaaaaaaguucauuaaacauaucaggauacaauuucucacucggagccgcaguaaaagcaggagcguguauguuagauggaggcaacauguuagaaacaaucaaaguaucuccacaaacaauggacggaauccuaaaaaguauacuaaaaguuaaaaaagcauuaggaauguuuauaagugaaacaccaggagaaagaaacccauaugaaaauauauuauauaaaauaugccuaucaggagacggauggcccuauauagccagccguacgucaaucacggguagagccugggaaaauaccauaguagaccuagaaagugauggcaaaccccaaaaagcaggaucaaacaauucaaauaaaagucuacaaagugcaggauuuacggccggccuaacauauucacaauuaaugaccuuaaaagacucaaugcuacaacuagauccuaaugcaaaaacauggauggacauugaaggaagaccugaagacccuguggaaguugcacucuaucaaccaucaaguggcugcuacauacacuuuuuuagagaaccaacugauuuaaaacaauuuaagcaagacgcaaaauacagucaugguauagacguuacagaucuuuuugcagcacaaccuggacuuacgucagcaguaauagaagcuuuaccaagaaacaugguaauaaccugucaaggcagcgaugauauaagaaaacuacuugagagucaaggacgaaaagacauaaaacuuauagauauagcacucaacaaaacagacucaagaaaauaugaaaaugcaguaugggaucaauacaaagaccuaugccacaugcauacaggaguaguaguagaaaaaaaaaaaagaggaggaaaagaagaaauuaccccacauugugcguuaauggacugcauaauguucgacgcagcuguaaguggcgguuuaaaaacauuaguacuacgugcaguauuaccaagagacaugguauuuagaaccucaacaccaaaaguaguccucuaa

SEQ ID NO: 9494 - RNA, 1710 nt, Artificial Sequence
  derived and/or modified CDS sequence (opt6) from LASV(G2565-SLE-2012;Clade IV)__AIT17307__NP
augucagcauccaaagaaauaaaaucuuuccuauggacucaaucauuaagacgagaacuuucgggauauuguuccaacauaaaauuacaagugguuaaagaugcacaagcacuacuacacggacuagauuucucagaaguaucaaauguccaaagauuaaugagaaaagaacgaagagaugauaacgauuuaaaacgcuuaagggacuuaaaucaagcagucaauaaucuugucgagcuuaaaagcacacaacaaaaaucaguacuacgugucggaacacuaacaucagacgaucuauuaauacuagcagcagaucuagaaaaacuaaaaagcaaaguaacacgcacagaacgaccucuaucagcaggaguauauaugggcaaccuuaguagucaacaacuagaccaaagaagagcgcuauuaucuaugauaggaaugucaggaggaaaccaaggugcacgaacaggcagagauggaguaguacgcguaugggauguuaaaaacgcagaacuauuaaacaaccaguuuggaacgaugccuucacuaacacuagcauguuuaacaaaacaaggucaaguagauuuaaaugauguuguucaagcauuaacugauuuagggcucauuuauacagcaaaguacccaaauacaucagaucuagauagauuaacucaaucacacccaauacuaaacaugauagauacuaaaaaaucaucauuaaacaucucaggauacaauuuuucacuuggagcagcaguaaaagcaggagcuuguauguuagacggagguaauaugcuagaaacaauaaaaguaucaccacaaacaauggacggaauacuaaaauccauauuaaaaguaaaaaaagcauuaggaauguucauaagcgacaccccaggcgagcgaaauccauaugaaaauauauuauacaaaauauguuuaucuggugauggcuggccauauauagcuagcagaacaucaauaacugguagagccugggaaaauacaguaguugaccuagaaucugacggaaaauuacaaaaaacaggaaguaacaauucaaacaaaucauuacaaucagcaggauuuacugcaggauuaaccuauucacaacucaugacacuaaaggaugcaaugcuccaacuagacccaaacgcuaaaauuuggauggauauugaaggaagacccgaagacccaguugaaauagcacuauaucaaccaagcagcgguuguuauauacacuuuuuuagagaaccaacagaucuaaaacaauuuaaacaagaugcgaaauacagucauggcauagacgucacagauuuauucgcagcacaaccaggauuaacaucagcaguaauagaugccuuaccaagaaauaugguaauaacaugucaaggaucagaugacauaagaaaacuauuagaaagucaaggacgcaaagacauaaaacuaauagacaucgcccucaauaaaacggacucacgaaaauacgaaaacgcaguaugggaccaauauaaagauuuaugccauaugcauacaggaguaguuguugaaaaaaaaaaaaaagguggaaaagaagagauaacuccacacugcgcacucauggauuguauuauguucgaugcugccguaagcggaggccuaaacacaagcguacucagagcaguacuaccgagagacaugguauuccgaaccucaacaccacgcguaguucuuuaa

SEQ ID NO: 9495 - RNA, 1710 nt, Artificial Sequence
  derived and/or modified CDS sequence (opt6) from LASV(G2587-SLE-2012;Clade IV)__AIT17311__NP
auguccgcaucaaaagaaaucaaaucauuucuauggacacaaucacuuagaagagaauuaaguggauauuguucaaauauaaaacuacaaguaguaaaagacgcacaagcucuucuucauggauuagauuucucagaaguaucaaacguacaaagacuaaugcgaaaagaaaggcgagaugacaacgaucuaaaaagacuaagggaucuaaaucaagcaguaaauaaucuaguagaauuaaaaagcacacaacaaaaaaguguacuaagaguaggaacacucacauccgacgauuuauuaauacuagcugcagauuuagaaaaacuaaaaucaaaaguaauacgaacagaaagaccuuuaucagcagggguauacaugggaaacuuaagcagccaacaauuagaucaaagaagagcacuauuaaauaugauaggaaugggaggaucaaaccaaggagcaagggcaggaagagacggcgucguaagaguaugggaugucaaaaaugcagaauuacuaaacaaucaauuuggaaccaugccaagccuaacauuagcuugcuuaacaaaacaagggcaaguagaccuaaacgaugcaguacaagcgcuaacagaucuaggacuuauauacaccgcuaaauacccaaauacaucagacuuagauagacuaacacaaagucauccaauacuaaacaugauugauacaaaaaaaaguucacuaaauauaucaggauacaauuucucacuaggagcagcaguaaaagcaggagccugcauguuggacgggggcaauauguuagaaacaauaaaagucaguccacaaacaauggauggaauccuaaaaucaauacugaaaguaaaaaaagcccuaggaauguucauaucagauacaccaggagaaagaaaucccuaugaaaauauauuauacaaaauauguuuaagcggcgacggauggccauacauagcaaguagaacuucaauuacaggacgagcaugggaaaauaccgugguagaucuagaaagugaugguaaaccacaaaaagcaggcucaaacggaagcaauaaaucacuccaauccgccggauuuacagcaggauuaaccuauagccaacuuaugaccuuaaaagaugcuaugcuacaacuagacccaaacgcaaaaacuuggauggacauagaaggaagaccagaagauccaguugaaguagcauuauaucaaccauccucaggaugcuacauacacuuuuucagggaaccaacagacuuaaaacaauuuaaacaagaugcuaaauauucccauggcauagacguaacagacuuauucgcugcacaaccaggacuaaccucugcaguaauagaugcacuuccaagaaacaugguaauaacgugccaaggaagcgaugauauuagaaaauugcuagaaucacaaggcagaaaagacaucaaacuaauagacauagcauuaaguaaaacugauaguagaaaauacgaaaacgcaguaugggaccaauacaaagaccucugucacaugcacacggguaucguaguagaaaaaaaaaaacguggaggaaaagaagaaauaacaccucacugugcauuaauggauugcauaauguuugacgcagcaguuucaggaggauuaaauacaucaguacuaagggccguacuacccagagauaugguauucagaaccucaacaccacgaguagucuuauaa

SEQ ID NO: 9496 - RNA, 1710 nt, Artificial Sequence
  derived and/or modified CDS sequence (opt6) from LASV(G2612-SLE-2012;Clade IV)__AIT17315__NP
augagcgcuaguaaagaaauuaaaucuuuuuuauggacucaaucacuacgaagagaacuaucaggauauuguuccaacaucaaacuacaaguuguaaaagaugcacaagcccuauuacacggacuagauuucagugaaguaagcaacguacagagacuaaugagaaaagaaagaagagaugauaaugaucuaaaaagacuuagagaucuuaaccaagcaguuaauaauuuaguagaacuaaaaucaacucaacaaaaaucuguguuaagaguaggcacacucacaucagacgauuuacuaauacuagcagcugauuuagaaaaacuaaaaucaaaaguaacaagaacagaaagaccuuuaagcgccgggguauauaugggaaaccuaucaucgcaacaauuagaucaacgacgagcucuauuaaacaugauaggaauguccggaucaaaucaaggagcaagagcgggaagagacggaguaguaagaguaugggacguaaaaaacguagaauuauuaaauaaccaauucggaacaaugccaagcuuaacauuagcuugcuuaaccaaacaaggacaaguagaucuuaacgaugccguacaagcuuuaaccgaucuggggcuaauauacaccgccaaauauccuaauacaucagauuuagacagacuaacacaaagccauccaauauuaaacaugauagauaccaaaaaaucaucuuuaaauaucagcggauauaauuucucauuaggagccgcagucaaagcaggagcuuguauguuagauggaggaaacauguuagaaacaauuaaagugucaccacaaacaauggacggaauacuaaaaucuauauuaaagguaaaaaaagcauuaggcauguuuauaucagacacaccaggagaaagaaauccuuaugaaaacauacuuuacaaaauaugucuaucaggcgauggcuggccauauauagccaguagaacaucaauaacggggagagccugggaaaauacaguaguagacuuagaaucagauggaaaaccucaaaaagcuggaucaaauaguucaaauaaaucacuacaaucagcaggcuuuacagcaggccuaaccuauagccaauuaaugacauuaaaagaugcuaugcuacaacuagaccccaacgcaaaaacauggauggacaucgaaggcagaccagaggacccaguagaaauagcauuauaccaaccaucauccggauguuacauacauuucuuuagagaaccaacagacuuaaaacaauuuaaacaagaugcaaaauacagccaugguauugaugucacagauuuauuugcagcacaaccaggacuaacaagugcaguaauugaugcacuaccaagaaacauggucauuacaugucaaggaucagaugauaucagaaaacucuuagaaagucaaggaagaaaagacauaaaacuaauagacauagccuuaucaaaaacagacucaagaaaauacgaaaaugcaguaugggaucaauauaaagacuuaugucacaugcauacaggaauaguagucgaaaaaaagaaaaaaggaucaaaagaagaaauaacaccacauugcgcacucauggacugcauuauguuugacgcagcaguaucgggaggauuaaaugcaucaguucuaagagccguacuaccuagagauaugguuuucagaacuagcacaccaagaguaguacuauaa

SEQ ID NO: 9497 - RNA, 1710 nt, Artificial Sequence
  derived and/or modified CDS sequence (opt6) from LASV(G2615-SLE-2012;Clade IV)__AIT17319__NP
augagcgcaucaaaagaaauaaaaucuuucuuauggacucaaucacuaagaagagaauuaagcgguuauuguaguaacauaaaauuacaaguagugaaagacgcacaagcacuccuacauggauuagauuuuagugaaguuucaaauguacaaagacucaugcgaaaacaaagaagagacgauagcgaucuaaaaagacucagagaucuaaaccaagcaguaaacaacuuaguagaacuuaaaaguacucaacaaaaaucgguauugaggguaggaacauuaacaagcgaugauuuacuaguccucgcugcagacuuagaaaaacuaaaaaguaaaguaauaagaacagaaagaccauuaucgagugguguauauauggggaauuugucaucacaacaacuggaccaaagaagagcacuauuaaacaugauaggaaugucaggaggaaaucaaggagcccaaguaggaagggauggaguagucagagucugggacguaaaaaacgcagacaugcuaaauaaccaauucggaacaaugccaucucuaacacuagcaugccuaacaaaacaaggacaagucgauuuaaacgauguaguacaagcuuuaacugauuuaggucuaauauauacagcaaaauauccuaauacuagcgauuuagacagacuagcacaaucacacccaauacuuaauaugauagauacaaaaaaaucaaguuuaaacauaaguggauacaauuucucacuaggagcagcuguuaaagcaggcgcauguaugcuagacggaggaaauauguuagaaacaauuaaaguaagcccacaaacaauggauggcauuuuaaaaucaauacuuaaaguaaaaaaagcacuagggauguucauaucagaaacuccuggagaaagaaauccauacgaaaauauccucuacaaaauaugcuuaaguggagacggcuggcccuacauagcaucaagaaccucaauaacaggccgagccugggaaaauacaaucguagacuuagaaucagauggaaaaccucaaaaagcagguaguaacaacucaaauaaaaguuuacaaucagcaggauuuacagcgggauuaaccuacagccaacuaaugacacuaaaagacagcauguuacaacuugauccaaaugcaaaaacauggauggacauagaaggccgacccgaagaccccguagaaguagcgcuauaccaaccaaguucaggauguuacauucauuuuuucagagaaccuaccgaucuaaaacaauuuaaacaagacgcaaaauacagccaugguauagacguuacugauuuauucgcugcacaacccggauuaacaucugcagucauagaagcuuuaccaagaaauauggucauaacaugucaggggagcgaugacauaagaaaacuacuagaaucacaaggaagaaaagacauaaaauuaauagacauaguacuaaauaaaacagacucacgaaaauaugaaaacgcaguaugggaccaauacaaagaccuaugucauaugcacacaggagugguaguagaaaaaaaaaaaagaggaggaaaagaagaaauuacgccacauugcgcacuuauggauuguauaauguuugacgccgcuguaaguggaggacuuaaaacgaugguauuaagagcaguauuaccaagagacaugguauuuagaacaucaacuccaaagguaguauuauaa

SEQ ID NO: 9498 - RNA, 1710 nt, Artificial Sequence
  derived and/or modified CDS sequence (opt6) from LASV(G2723-SLE-2012;Clade IV)__AIT17323__NP
augagugcaaguaaagaaauuaaaucauuccuauggacccaaucgcuaagaagagaacuaaguggauacugcagcaacauaaaacuccaaguaguaaaagaugcacaagccuuauuacauggacuagacuuuuccgaaguaagcaacguccaaagauuaaugagaaaacaaagacgagacgauucagacuuaaaaagauuaagagacuuaaaccaagcaguaaauaauuuaguagaacuaaaaaguacucaacaaaaaucaguacuaagagugggaacacucacuucagacgacuuauuaguacucgcagcagaucucgaaaaacuaaaaucaaaagucauuagaacagaaagaccauuaucaaguggcguuuacaugggaaauuuaucaucacaacaauuagaccaaagaagagcuuuauugaacaugauaggcaugucaggaggaaaccaaggcgcacaaguuggaagagacggcguagucaggguaugggauguaaaaaaugcagaccuauuaaauaaccaauucggcacaaugccaucacuaacauuagcuugcuuaacaaaacaaggacaaguagaucuaaacgauguaguacaagcucucaccgaccuuggcuuaauauauaccgcuaaauauccaaauacaucagauuuagaucgacuagcacaaucacaccccauauuaaacaugaucgacacgaaaaaaucaucauuaaauauaucaggauacaacuuuucacugggugcagccguaaaagcaggagcuugcaugcuggacggaggaaauaugcuugaaacaauaaaaguaaguccacaaacaauggacggaaucuuaaaaucaauauuaaaaguuaaaaaagcacuaggcauguuuauuagcgaaacaccaggagaaagaaaucccuaugaaaacauacuauacaaaauaugccuauccggagaugguuggccauauauugcaucaagaacaagcauaacgggacgagcaugggaaaacacaauaguagaucuagaaucagacggaaaaccacaaaaagcaggaaguaacaauaguaacaaaucuuuacaaucagcaggguucacagcaggacucacauauucacaacuaaugacauuaaaagacagcaugcuacaauuagauccaaaugcaaaaacguggauggauauagaaggaagaccagaagacccuguagaaguagcacuauaccaaccuagcaguggauguuauauacauuuuuuucgagaaccaacagaucuuaaacaauucaaacaagacgcuaaauauagccauggaauagacgucacagacuuauuugccgcgcaaccagggcuaaccucagcaguaauagaagcuuuaccaagaaacaugguaauaacaugccaaggaucagacgauauacgaaaacuacuagaaucacaaggacgaaaagacauaaaauuaauagauauugcauuaaauaaaacagacaguagaaaauacgaaaaugcaguaugggaucaauacaaggaccuaugccauaugcacacaggagucguaguagaaaaaaaaaaacgaggaggaaaggaagaaaucacaccacauugcgcauuaauggacuguauaauguuugaugcagcaguaucaggaggacucaaaacacuaguacuuagagcuguccuaccuagagacaugguauuuagaacuagcaccccaaaaguaguauuauaa

SEQ ID NO: 9499 - RNA, 1710 nt, Artificial Sequence
  derived and/or modified CDS sequence (opt6) from LASV(G2789-SLE-2012;Clade IV)__AIT17325__NP
augucagcaucaaaagaaauaaaaucauucuuauggacacaaagucuaagaagagaguuaagcggcuauuguucaaauauaaaacuccaaguagugaaagaugcucaagcacuacuacauggacuugacuuuucagaaguauccaauguacagagauuaaugagaaaacagagaagagaugacaaugacuuaaaaagacugagagaucuaaaucaagcaguaaacaauuuaguugaacucaaaagcacacaacaaaaaaguguauugagaguaggaacacuaacaucagaugaccuauuaguucuagcagccgaucuagaaaaauuaaaaaguaaaguaacaagaacagaacguccucuaucagcaggaguauacaugggcaaucuuaguucacaacaguuagaccaaaggagagcacuucuaaauaugaucggaaugacuggaggaucuagaggagcacaagcaggaggcgauggagucguaagaguaugggauguaaaaaacgcagaucuauuaaacaaccaauucggaacaaugcccucauuaacccuugcaugccuaacaaaacaaggacaaguugaucuaaacgauguaguccaagcacuaacugacuuaggcuuaauauacacagcuaaauauccaaauacaucugaccuagacagacuuacacaaucacacccaauacuaaauaugauagacacuaaaaaaaguagcuuaaacauaucaggauacaacuucagucuaggagccgcuguaaaagcuggagcauguauguuagacgguggaaauaugcuagaaaccaucaaagucucaccacaaacaauggauggaauacuaaaaucaauacuuaaaguaaaaaaaagcuuaggaauguucauaucagacacaccaggagaaagaaacccuuaugaaaauauacuauacaaaauauguuuaaguggagauggauggcccuauauagcaaguagaacaaguauaacaggaagagcaugggaaaauacaguuguagaucuagaaucugauggaaaaccacaaaaagcgggaggaaauaacagcaacaaaucauuacaaagcgcagguuuuacugcaggucuuacauauucacaacuaaugaccuuaaaagauacaauguuacaauuagaucccaaugccaaaacauggauggauauagaagggagaccagaagauccaguagaaguugccuuauaccaaccgucaucaggauguuacauacauuucuuccgugaaccaacagaccucaaacaauuuaaacaagacgcaaaauauagccacggaaucgacguaacagaccucuuugcggcacaaccaggauuaacaagcgcaguaaucgaggcauuaccaagaaauaugguaauaacaugucaaggaagcgaugacaucagaaaauuacuugaaagucaaggacgaaaagacauuaaacuaaucgacaucgcacuaaguaaaguagacucacgaaaauacgaaaaugcaguaugggaccaauacaaagacuuaugucauaugcacaccggaguagucguagaaaaaaaaaaaagaggaggaaaagaagaaauuacaccacacugcgccuuaauggauugcaucauguuugacgcagcaguaucaggaggauuaaacacauuaguacuaagagcaguacuaccaagagacaugguauuucgaacaagcacaccaaaagucgucuuauga

SEQ ID NO: 9500 - RNA, 1710 nt, Artificial Sequence
  derived and/or modified CDS sequence (opt6) from LASV(G2868-SLE-2012;Clade IV)__AIT17329__NP
augagugcaucaaaagaaaucaaaucauuucuauggacacaaagccuaagaagggaacuuucuggauauugcucaaauauaaaacuacaaguuguaaaagacgcacaagcuuuacuacauggacuagauuuuucagaaguaagcaauguacagagauuaaugagaaaagaaagaagagaugacagcgacuuaaaaagauuaagagaucuaaaucaaacuguaaauaaccuaguagaacucaaaagcacacaacaaaaaucuauauuaagaguaggaacauuaacaagugaugaucuuuuaauccuagccgcagaucuagaaaaacuuaaaucuaaaguaauaagaacagaaagaccacuuucagcaggaguuuauaugggaaaucuaucaucacaacaacuagaucaaagaagagcacuuuuaaacaugaucggaaugaguucgggaaaccaaggagcacaagcagguagagauggaguaguaagaguaugggacguaaaaaacgccgaacuauuaaauaaccaauucggaacaaugccaagucuaacucucgcuuguuuaacaaaacaaggacaaguagaccuaaacgaugcaguacaagcucuaacagaccuaggauuaauauauacagcaaaauaucccaauacaucagaucucgaccgacuaacacaaucccauccaaucuuaaauaugauagacacaaaaaagagcucacuaaacaucucugguuacaauuuuagcuuaggagcagcaguaaaagcaggagcaugcauguuagacggugguaauauguuagaaacaauaaaaguaaguccacaaacaauggacggaauacuaaaaucaauacuaaaaguaaaaaaagcacuuggaauguuuauaucggauacaccaggagaaagaaauccuuacgaaaauauacuuuauaaaauauguuuaagcggagauggauggccauauauagcgucaagaacaucaauuaccggaagggcaugggaaaacacuguaguagaccuagaaagcgauggaaugccacaaaaagcaggaucaagcucuagcaauaaaucacuucaaagcgcggguuuuguagcaggacuaaccuauucccaauuaaugaccuuaaaagacgcaaugcuacaauuagauccaaaugcaaaaacauggauggacauagaaggucgaccagaagauccaguagaaauagcauuauaccaaccaucaagcggauguuacauacacuuuuuuagagaaccuacggauuuaaaacaauuuaaacaagacgcaaaauauucccauggcauugauguaacagacuuauuugccgcucaaccaggauuaacaucagcuguaaucgaugcacucccccgaaacaugguaauuacaugucaagguagcgaugauauaagaaaacuacuagaaagccaaggaagaaaagauauaaaacuaauagauaucgcacucagcaaagcugacaguagaaaauacgaaaacgcuguaugggaccaauacaaagacuuaugucauaugcauacuggaguaguaguagaaaaaaaaaaaagaggaggaaaagaagaaauaacaccacacugcgcacuaauggauuguauaauguaugacgcagcaguauccggaggauuaaacacaucuguacuaagagcaguacuaccaagagacaugguauuuagaacaucuacaccaagaguuguauuauaa

SEQ ID NO: 9501 - RNA, 1710 nt, Artificial Sequence
  derived and/or modified CDS sequence (opt6) from LASV(G2903-SLE-2012;Clade IV)__AIT17333__NP
augucagcaucaaaagaaauaaaaucauucuuauggacucaaagucuuagacgagaauuaagcgguuauugcaguaauauaaaacuacaagucguaaaagaugcacaagcacucuuacauggauuagauuucucagaagucucaaauguacaacgacuaaugagaaaagaaaggagagaugauaacgaccugaaaaggcuuagggacuuaaaucaagcuguaaauaaucuaguagaacucaaaucaacacaacaaaaaucuguccuaagaguaggaacacuaacaagugaugacuuguuaauucuagcagccgaccuagaaaaauuaaaaagcaaaguaacacgaacagaaagaccacuuucagcaggaguauacaugggcaaucuaucaagccaacaacuagaucaaagaagagcauuauuaaacaugauaggaaugucaggaggaaaucaaggagcccgugcagguagagacgguguaguaagaguuugggacgucaaaaacgcugaacuacuaaauaaucaauuuggaaccaugccaagcuuaacauuagccugucuaacaaaacaaggacaaguagacuuaaacgacgcaguacaagcacuaacagauuugggauuaauuuauaccgcuaaauauccaaauacaucugacuuagacagauuaacacaaucccacccuauucuuaauaugauagauaccaaaaaaaguucacuaaauauaaguggauacaacuucucauuaggugcugcaguaaaagcaggagcaugcaugcuagacggcggaaauauguuagaaacaauaaaaguaaguccacaaacaauggacucaauccuaaaaucaauacuaaaaguaaaaaaggcauuaggaauguucauuucagauaccccaggagaaagaaacccauacgaaaacaucuuauauaaaauaugucuaucaggagauggcuggccauacauagcaucaagaacaucaauuacaggaagagcaugggaaaauacaguaguagauuuagaaagugaugguaaaccacaaaaagcaggaucuaacaacucaaauaaaucuuuacaauccgcaggauuugcagcuggacuaacauauucgcaacuaaugacacuuaaagaugcuauguuacaauuagauccaaaugcaaaaacauggauggauauagaaggaagaccagaagacccaguggaaauagcgcuauaucaaccaagcucaggauguuauauacauuuuuuuagagaaccaacagaucuaaaacaauucaaacaagacgcaaaauauucacauggaaucgacguaacagaucuuuuugccgcacagcccggauuaacuucagcaguaauagacgcgcucccacgaaacaugguaauaacgugccaaggaucagaugauauuagaaaauuauuagaaagucaaggaagaaaagacauaaaauuaauagauauagcacuaucaaaaaccgauagucgaaaauacgaaaacgcaguaugggaucaguauaaagacuuaugucauaugcacacaggaauaguaguagaaaaaaaaaaaaggggcgguaaagaagaaauaacaccacauugugcgcuaauggauugcauaauguuugaugcagccguuucagguggacuaaauacuaguguccuacgagcaguacuuccuagagauaugguuuuccgaacaaguacacccaggguuguauuauag

SEQ ID NO: 9502 - RNA, 1710 nt, Artificial Sequence
  derived and/or modified CDS sequence (opt6) from LASV(G2906-SLE-2012;Clade IV)__AIT17335__NP
augucagcuagcaaagaaauuaaaagcuuccuuuggacacaaucauuaagacgagaauuaucaggauauuguucaaauauaaaauuacaaguagucaaagaugcucaagcauuauuacacggacuagauuucagugaaguuucuaauguacaacgacuaaugagaaaagaaagaagggacgauucagaccuuaaaagacuaagggauuuaaaucaagcuguaaauaaucuagucgaacuaaaaagcacccaacaaaaaucaauauuaagagucggaacucuaacaagcgacgaccuguugauauuagcagcagaucuagaaaaauuaaaaaguaagguaacaagaacagaacgaccacucagcgcaggaguuuauaugggaaauuugucaucacaacaauuagaucaaagaagagcgcuacuaagcaugauagguaugagcucaggcguacaaggagcaagagcuggaagagauggaguaguuagaguaugggauguaaaaaaugcagaauuacuaaauaaccaauucggaacaaugcccucucucacacuagcauguuuaacaaaacaaggccaaguugaccugaaugacguagugcaagcacuaacugacuuaggcuuaauauauacagcaaaauauccaaacacaucugauuuagacagacuaacccaaagucacccaauauuaaacaugauagauacaaaaaaaucaucauuaaacauaucagguuauaauuucucacuuggugcagcaguaaaagcaggugcauguaugcuugacggaggaaacauguuggaaacaauaaaaguguccccacaaacaauggacggaauuuuaaaaucaauacuaaaaguaaaaaaagcauuaggaauguucauaagugaaacaccaggagaacgcaauccauaugaaaacauauuauauaaaauaugcuuaucuggugacgguuggccuuauaucgcuagcagaacaucaauaacaggucgggcuugggaaaauacuguaguagaucuagaaucagacgggaaaccacaaaaagcaggaucuaacaauagcaauaaaucacuacaaaguacaggauuugcagcaggacuaacauauagccaacucaugacucuuaaagacgcaaugcuucaacucgauccgaaugcaaaaacauggauggauaucgaagguagacccgaagacccaguagaaguagcgcuauaccaaccaucaaguggauguuacauccacuucuucagagaaccaacugaucuaaaacaauucaaacaagacgcaaaauauucccacggaauagacguaaccgaccuuuuugcugcgcaaccaggacuaacaucagcaguuauagacgcuuuaccaagaaacaugguaauaacaugucaaggaagugaugauauuaaaaaacuauuagaaagucaagguagaaaagacauaaaauuaauagauauagcauuaagcaaaacagacucgagaaaauaugaaaaugcaguaugggaucaauauaaagacuuaugucauaugcauacaggaguaguuguagaaaaaaaaaaaagaggaggcaaagaagaaauuacaccacacugcgcccuaauggauugcauaauguuugacgccgcaguuucaggcggacuaaauacaucagucuuaagagcaguauuaccuagagauaugguauuccgaaccucaacccccagaguaguacuauaa

SEQ ID NO: 9503 - RNA, 1710 nt, Artificial Sequence
  derived and/or modified CDS sequence (opt6) from LASV(G2944-SLE-2012;Clade IV)__AIT17341__NP
augucagcaagcaaagaaauaaaaaguuuucuuuggacucaaagcuuaagaagagaauuauccggcuauugcuccaauauaaaauuacaaguuguaaaagaugcacaagcauuacugcacggacuagauuucucagaaguuucaaacguacaaagauuaaugcgaaaagaaagaagagaugauaaugauuuaaaaagauuaagagauuuaaaccaagcagugaacaaucuugucgaacuaaaaucaacacaacaaaaaucaauccuaagaguaggaacccuaacaucagacgacuuacuaauacuagccgcagaccuagaaaaacuuaaaagcaaaguaacaagaacagaacgaccacuuucagcaggcguauacaugggcaauuuaaguagccaacagcuagaucaaagacgagcucuauuaaacaugauagguaugucaggagguaaccaaggcgcucgagcuggaagagacggcguaguaagagucugggauguaaaaaacgcagaacuacuaaacaaccaauucggaacaaugccaucacuuacacuagcaugcuuaacaaaacaaggacaaguagaucuaaaugaugcaguccaagcccuaacugauuuaggucuuauauauacagcaaaauacccgaauacaagugaccuagauagacuaacucaaucacaucccauccuaaacaugauagacacaaaaaaaucaaguuuaaauauaaguggauacaacuuuagucuaggcgcagccguuaaagcaggagcauguauguuagauggaggaaacaugcuugaaacuauaaaaguauccccacaaacaauggacggaauacuuaaaucaauacuaaaaguuaaaaaagcccuaggaauguuuauuuccgaugcaccaggagagagaaauccauaugaaaauauuuuauauaaaauaugucuaucaggagacggauggccauauauagcaagucgaacaagcaucaccggacgagccugggaaaacacaguagucgaucucgaaucagaugggaaaccacaaaaagcaggaaguaacgguucaaauaaaucacuacaaucagcaggauuuacagccggacuaacauauagccaacuaaugacauuaaaagacgcuaugcuucaacuagacccaaaugcaaaaacauggauggauauagaaggaagaccagaagacccuguagaaauagcccucuaucaaccgucaucuggauguuacauacacuuuuuuagagaaccaacagaucuaaaacaauucaaacaagacgcuaaauauucacauggcauugauguuacagauuuauuugcagcccaaccaggccuaacauccgcaguaauagaugcacuuccaagaaauaugguaaucacgugccaaggaucugaugacauuagaaaacucuuugaaucacaagguaggaaagacauuaaacuaauagacauugcccugucaaaagcugacagcagaaaauaugaaaacgccgugugggaucaauacaaagaccuaugccacaugcauacuggagucguagucgaaaaaaaaaaaagagggggaaaagaagaaauaacaccacauugugccuuaauggauugcauuauguuugaugcagcaguauccggaggacuuaauacuaguguacuaagagcaguauuaccaagagauaugguauucagaacaucaacaccccgaguaguacuauaa

SEQ ID NO: 9504 - RNA, 1710 nt, Artificial Sequence
  derived and/or modified CDS sequence (opt6) from LASV(G3010-SLE-2013;Clade IV)__AIT17345__NP
augagcgcuaguaaggaaauaaaauccuuccucuggacacaaucacuaagaagagaauuaagugguuauugcaguaacaucaaauuacaaguaguuaaagaugcacaagcauuacuacauggauuagauuucucagaaguaagcaauguacaaagacuuaugaggaaagaacgaagggaugauaacgaccuaaaacgacuaagagaucugaaucaagcaguaaauaacuuaguagaauuaaaaucaacacaacaaaaaucaauucuaagaguaggcacccugacaagcgaugauuuacuaauucuagcagcagauuuagaaaaauuaaaaucaaaaguuacaagaacagaaagaccgcuaagcgcuggaguauauaugggaaaccugucuucccaacaauuagaucaaagaagagcuuuacuaagcaugauaggaaugucaucugggguccaaggagcaagagccgguagagacggaguaguucgaguaugggacguaaaaaacgcagaacucuuaaacaaccaauucggaacuaugccaaguuuaacuuuagcuuguuuaacaaaacaaggacaaguagauuuaaaugauguaguucaagcacuaacagacuuaggucuaauauauacagcuaaauaccccaauacaucagaucucgacagacuaacacaaucccaucccauauuaaacaugauagauaccaaaaaaucuucucuaaacauaucaggauacaauuuuaguuuaggugcagcuguaaaagcuggagccugcauguuagaugguggaaauauguuagaaacaauaaaagugaguccccaaacaauggaugggauccuaaaaagcauauuaaaaguaaaaaaagcauuaggaauguucauaucagagacacccggugaaagaaauccauaugaaaauauacuauacaaaaucugucuaaguggugacggcuggccuuacaucgcaaguagaacaucaauuacgggacgugcaugggaaaacacaguaguugaucuggaaucagauggaaaaccacaaaaagcaggaucaaacaacucaaauaaaagucuacaaucagcaggauucacugcaggauuaacauauucacaacuaaugacacuaaaagaugcuaugcuucaacuagacccaaacgcaaaaacauggauggacauagaaggccgaccagaagauccagucgaagucgcacuauaccaaccuaguucaggauguuauauacacuucuuucgugaaccaacagaccuaaaacaauucaaacaagacgcaaaauauucacauggaauagacguuacagaccuauucgcagcacaaccaggucuaaccagugccguaauagacgcauuaccaaggaauauggucauaacaugucaaggaucagaugauauaaaaaaacuauuagaaagucaaggaagaaaagacaucaaauuaauagauauagcacuaucaaagacagauucaagaaaauaugaaaaugcaguaugggaccaauauaaagaccuaugucacaugcauaccggaguugugguagaaaaaaaaaaaagaggagggaaagaagaaauaacgccacauugcgcauuaauggauuguauaauguuugaugccgcaguauccgguggacuuaauacaaguguacuuagagcaguacugccacgagacaugguauuuagaacaucaacaccccguguaguuuuauaa

SEQ ID NO: 9505 - RNA, 1710 nt, Artificial Sequence
  derived and/or modified CDS sequence (opt6) from LASV(G3016-SLE-2013;Clade IV)__AIT17349__NP
augagcgcaucaaaagaaauuaaaucauucuuguggacccaaucacuaaggagagaacuaaguggcuacugcucaaauauaaaacuacaaguaguaaaagaugcacaagcacuacuucacggacuagauuucucagaaguaucuaacguucaaagacuaaugcgaaaagaaagaagagacgauucagauuuaaaaagauuaagagauuuaaaucaagccguaaauaaccuaguagaacuaaaauccacacaacaaaaaucaauacuuagaguaggaacacuaacaagcgaugacuuacuaauacuugcagcagaucuugaaaaauuaaaaucaaaaguaaccagaacagaaagaccccugucagccggaguauacaugggaaaucuaucaagccaacaauuagaucaaagacgagcauuauuaaacauguuaggaaugucaggaucaaaccaaggagcaagagcuggaagagacgguguaguaagaguaugggaugucaaaaaugcagaacuacucaauaaucaauucggaaccaugccaucacuaacacuagcauguuuaacaaaacaaggacaaguagacuuaaaugaugcaguacaagcucuaacugacuuaggacuuauauauacagcaaaauauccuaauacaagugaucucgauagauuaacucaaucccacccaauauuaaacaugauagacacuaagaaaucaaguuuaaauauaucagguuacaauuucucacucggagcagcaguaaaagcaggagcuuguaugcuugauggaggaaauauguuagaaacaauaaaaguaucaccacaaacaauggacggaaucuuaaaaaguauacuuaaaguaaagaaagcacuuggaauguucauaucugacacaccaggagaaagaaaucccuacgaaaacauccucuauaaaaucugucuaucaggagauggauggcccuacaucgcaucaagaacaaguauaacaggcagagcaugggaaaauacaguuguagauuuagaaagcgaugaaaaaccucaaaaagccggaaguaauuccaguaauaaaaguuuacaaucagcaggauuuacagcaggauuaacauacagucaauuaaugacacuuaaagacgccaugcuacaauuagacccaaaugcaaaaacauggauggacauagaaggacgacccgaagacccaguagaaauugcuuuauaucaaccaucaucaggauguuauauacacuucuuucgagaaccuacugaucuaaaacaauucaaacaagacgcaaaauauagccauggaauagacgugacagacuuauuugccgcucaaccagguuuaacaucggcuguaauagacgcacuaccaagaaacaugguaauuacaugucaaggaagugaugacauuagaaaacuacuagaaucacaaggacgaaaagacauaaaacuaaucgauauagcuuuaucuaaaacagauaguagaaaauacgaaaacgcaguuugggaucaauacaaagaucuaugccauaugcauacaggaauaguaguagagaaaaagaaaagaggagguaaagaagaaauaacaccacacugugcucuaauggacuguauaauguucgacgcagcuguuagugggggacucaacgccucaguacuacgggcuguacuaccaagagauaugguauuucguacaucaacaccuaggguuguauuauga

SEQ ID NO: 9506 - RNA, 1710 nt, Artificial Sequence
  derived and/or modified CDS sequence (opt6) from LASV(G3034-SLE-2013;Clade IV)__AIT17351__NP
augagcgcaucaaaagaaauuaaaucauucuuauggacacaaucacuaagacgagaacuaucuggguauuguaguaauauuaaauuacaagucgugaaagaugcucaagcauuauugcacggucuagauuucagugaaguaaguaauguccagcgacuaaugagaaaacaacguagagaugacggagaucuaaagagacuccgagauuuaaaucaagcaguuaauaaccucguagaacuaaaaagcacucaacaaaaaaguguauuaagaguaggaacuuuaacaagcgacgacuuacuaauauuagcagcagauuuagaaaaauuaaaaucaaaaguaauaagaacagaaagacccuuaucagcaggagucuauaugggaaaucuaagcagccaacagcuagaacaaagaagagcacuauuaaauaugauaggaauguccucaggaaaucaaggagcaagaacagggaaagacggugucguaaggauaugggauguaaaaaacgcagauuuauuaaauaaucaauuuggaacaaugccuucacuaacuuuagcaugccuaacaaaacaaggacaaguagaucuaaaugauguaguucaggcccuaacagaccuuggauuaauauacacagcaaaauacccaaauacaagugaccuggauagauuaacacaaucacacccaauauuaaacaugguagacaccaguaaaucgucacuaaacauuucaggauauaauuuuucacuuggagcagcagucaaagcaggagccuguaugcuagauggaggaaacauguuagaaacaauaaaagucucaccacaaacaauggacggaauauuaaaaucaauuuuaaaaguaaaaaaaucacuaggaauguuuguaagugauacaccaggagagagaaauccuuaugaaaauauacuauauaaaauaugccuaucuggugacggcuggccauacauugcuaguagaacaaguauaacagguagagccugggaaaauacaguaguagacuuagaaaguaauggaaaaccacaaaaagcuggaagcaacaauaguaauaaaaguuuacaauccacagguuuuacggcaggacuaacguauagccaacuaaugacucuaaaagacgcaauguuacaacuagauccaaaugcaaaaacauggauggauauagaaggucgacccgaagauccagucgaaauagcacucuaccaaccaaguucaggaugcuacauacacuuuuuuagagaaccaacggaccuaaaacaauuuaaacaagacgcuaaauauucacaugguauagacguaacagacuuauuugcagcacaaccaggcuuaacaucagccguaauagacacauuaccuagaaauaugguaauaacuugucaaggaagugacgauauuaggaaauuauuagaaucacaaggaagaaaagacauaaaauuaaucgacauagcacugucuaaaauagacucaagaaaauacgaaaacgcagucugggaucaauacaaagacuuaugccacaugcacacuggaguaguaguggaaaaaaaaaaaagaggaggaaaagaagaaauaacaccacauugcgcauuaauggauugcauaauguucgacgcagcaguaagcggaggauuaaaugcaaguguacuacgagcuguauuacccagagacaugguuuuucgaaccucuacaccaagaguagucuuauaa

SEQ ID NO: 9507 - RNA, 1710 nt, Artificial Sequence
  derived and/or modified CDS sequence (opt6) from LASV(G3110-SLE-2013;Clade IV)__AIT17361__NP
augucagcuucaaaggaaauaaaaaguuuucuauggacucaaucucuaagaagagaacuaucuggauauugcagcaacauaaaacugcaaguagugaaagacgcucaagcacuacuacacggacuagauuucagcgaaguuaguaacguacaaagacuaaugagaaaagaacgccgggacgauagugaccuaaagcgauuaagagaccugaaucaagcaguaaauaaccuaguagaacuaaaaucaacgcaacaaaaaucaguauuaagagugggaacacuaacaucagaugacuuacucguacucgcagcugaucuagaaaaacuaaaaucuaaagucacacgcacagaacggccacuauccgcaggaguauauaugggaaauuuaucaucacaacaacuagaucaaagaagagcauuacuaaacaugauagggaugucaggaggaaaccaaggagcaagagcugguagagacggaguaguacgcauaugggacguaaaaaacgcugaacuuuuaaacaaucaauuuggaacaaugccaucacuaaccuuagcaugccuaacaaaacaaggccaaguagacuuaaacgauguaguacaagcacuaacagauuuaggauuaauuuauacagcaaaauacccaaauacuucagauuuagaucgauuaacacaaucacacccaauacuuaauaugauagacacaaaaaaaucaagucuaaauauaucagguuauaauuuuucauuaggugcagcaguaaaggcuggagcauguaugcuagauggugggaauauguuagaaacuauuaaaguaucaccucaaacaauggauggaauauuaaaaaguauccuuaaaguaaaaaaagcauuagguauguuuauaucagauaccccuggagaaagaaauccauacgaaaauaucuuauacaaaauaugccuuucaggagauggauggccauauauagcaucucgaacaagcauuacugggcgagcaugggaaaauacaauaguagaccucgaaagcgaugguaaaccacaaaaaacaaauaauacaaacucaaauaaaagucuacaaucagcagguuucgcagcaggacugacauauucacaacuaaugacacuaaaagaugcaaugcuacaacucgaucccaacgcaaaaacauggauggauauagaaggacgaccagaagauccaguagaaauagcuuuauaccaaccuagcuccgguugcuacauucacuuuuucagagaaccaacagaucuaaaacaauuuaaacaagacgcaaaauauagccacggaauagacguuacagauuuauucgcagcccaaccaggccuaacaagcgcaguaauagauacauuaccaagaaacaugguaauaacaugucaaggaucagaagacauacgaagguuacuagaaucacaaggcagaaaagacauaaaacuaauagauauagcuuuaaguaaaacagauucaagaaaguaugaaaacgcaguaugggaccaauacaaagacuuaugucacaugcauacaggaguaguaguagaaaagaaaaaaaaaggaggaaaagaggaaauaacaccucauugcgcacuaauggauugcauaauguuugacgcagcaguuaguggaggacugaacacauccguacuaagagcagucuuaccucgagauaugguguucagaacuucgacuccacgaguaguauuauaa

SEQ ID NO: 9508 - RNA, 1710 nt, Artificial Sequence
  derived and/or modified CDS sequence (opt6) from LASV(G3148-SLE-2013;Clade IV)__AIT17365__NP
augagcgccucaaaagaaauaaaauccuuuuuauggacucagaguuuaaggagagaacuaaguggauauugcucaaauauaaaacuucaaguaguuaaagacgcacaagcacuacuacacggcuuggauuucagcgaaguuaguaacguucaacgacuaaugagaaaagaaagaagagaugauaacgacuuaaaaagauuacgagauuuaaaucaagcugugaauaaucucguagaauuaaaaucaacacaacaaaaaucaauucuaagaguaggaacgcuaacaucagaugaccuacucauacuagcagcagaccuagaaaaauuaaaaagcaaaguuaccagaacagaaagacccuuauccgcaggaguauacaugggaaacuuaucaucacaacaauuagaucaaaggagagcauuacuaaauaugauaggaaugaguggauccaaucaaggagcucaagcaggaagagacggagugguuagaguaugggauguuaaaaacgcagaauuacuaaacaaccaauucggaacaaugccaagccucacucuagcaugcuuaacaaaacaaggucaagucgaucuaaaugacgcaguucaagcauuaacagaccuaggauuaauauauacagcaaaauacccaaauacaucagacuuagacagauuaacacaaucacaccccauacucaacaugauagauacuaagaaaucaagccuaaacauaagcggauauaauuuuucuuuaggcgcagcaguaaaagcuggugcauguauguuagaugguggaaauaugcuagaaacaauaaaaguaucaccgcaaacaauggauggaauauuaaaaucaauauuaaaaguaaagaaagcauuaggaauguuuauaagugacgcuccaggagaaagaaauccauaugaaaauauacuauauaaaauaugccugucaggagaugguuggccauauauagcaaguagaaccaguauaacagguagagccugggaaaauaccguaguagaccuagaaucggacggaaaaccucaaaaagcaggaagcaacgguagcaauaaaucuuuacaaucagcaggauuuacagcuggacuaacuuauucacaacuaaugacauugaaagacgccauguuacaacuagauccaaaugcaaaaacauggauggacauagaaggaagaccagaagauccuguagaaauagcacuauaucaaccuagcucuggaugcuauauucacuuuuucagagaaccaacugauuuaaaacaauuuaaacaagacgcaaaauacagccacggaauugauguaacagaccucuucgcagcacaaccaggauuaacaagcgcaguaaucgaugcuuuaccaagaaauaugguaauaaccugucaaggaucagaugauauaagaaaacuauuugaaagucaaggcagaaaagauauaaaacuaauagauauagcacuaaguaaaacugacaguagaaaauacgaaaacgcaguuugggaccaauacaaagacuuaugccacaugcauacaggcauaguaguagaaaagaagaaaagaggaggaaaagaagaaauaacaccucauugugcauuaauggauugcauuauguuugacgcagcugugagcggcggacucaacacuucaguauuaagagcaguucuaccaagggauaugguauucaggacaucaacaccaagaguaguauuauaa

SEQ ID NO: 9509 - RNA, 1710 nt, Artificial Sequence
  derived and/or modified CDS sequence (opt6) from LASV(G3151-SLE-2013;Clade IV)__AIT17369__NP
augucagcaucaaaagaaauaaaaucauuuuuauggacacagucacuuagaagagaacuaucaggcuacugcagcaauauaaaauuacaagucguuaaagacgcacaagcauuauuacauggacuagauuucucagaaguaaguaacguacaacgauuaaugaggaaagaacguagagaugacagcgaucuaaaaagauuaagagauuuaaaccaagcuguaaauaacuuaguugaacuaaaaagcacacaacaaaaaaguguacuacgaguaggaacacuaaccagcgaugacuuacuaguacuagccgccgaucuagaaaaauuaaaaaguaaaguuacacgaaccgaaagaccauuaagugcaggaguauauaugggaaaucuaucuagccaacaacuagaccaaagaagagcauuacuuagcaugauaggcaugucaggagguaaucaaggggcaagagcaggcagagauggaguaguaagaauaugggauguaaaaaaugcagaauuacuaaacaaccaauuugguacaaugccaucauuaacacucgcaugcuuaacaaaacaaggccaaguagaccugaaugaugucguucaagcacuaacggacuuaggacuuauuuauacagcaaaauacccuaauacaucagaccuugauagacuaacacaaucacacccaauauuaaacaugauagacacaaaaaaaagcucacuaaacauaucaggauacaacuucagcuugggagccgcagucaaagccggggcauguauguuagacggagggaacaugcucgaaacaauaaaaguaucaccacaaacaauggacggaauauuaaaaucuauuuuaaaaguaaaaaaagcacuaggaauguucauuagcgauaccccuggagaaagaaauccauaugaaaacauauuauacaaaauaugcuuaucaggagauggauggccauacauugcaucaagaacaucgauaacagggagagcaugggaaaauacaauaguagacuuagaaucagaugguaaaccccaaaaaacaagcaacacgaauucaaacaaaucacuacaaagcgcaggauuugcugcaggucuuacuuacagucaauuaaugacacucaaagaugcuaugcuacaauuagauccaaacgcuaaaacauggauggauauugaaggaagaccugaagauccaguagaaauagcacuuuaucaaccaagcaguggaugcuauauacacuucuuuagagagccaacugaccuaaaacaauuuaaacaagaugccaaauauagccauggaauugacguuaccgaucuguuugcagcacaaccuggacuaacaucagcuguaauagaugcauuaccaagaaacaugguaauuacaugccaaggaucagaagacauaagaaaacuauuagaaucucaaggaaggaaagacauaaaauugauagauauagcuuuaucaaaaacagauaguagaaaguacgaaaaugccguaugggaucaauacaaggacuuaugccauaugcacacaggaguaguaguagaaaaaaaaaaaaaaggugguaaagaagaaauaacaccacacugugcucuaauggauugcauaauguuugacgcagcuguaucgggaggucuaaauacaagcguacuaagagccguacucccgagagauaugguauucagaacaucaaccccaagaguaguauuauaa

SEQ ID NO: 9510 - RNA, 1710 nt, Artificial Sequence
  derived and/or modified CDS sequence (opt6) from LASV(G3157-SLE-2013;Clade IV)__AIT17371__NP
augagcgcaaguaaagaaaucaaaaguuucuuauggacacaaagcuuaagaagggaacucucaggauauuguaguaauauuaaacuucaaguaguaaaagaugcucaagcucuauuacauggacuugauuucagugaaguaucaaauguccaaagauuaaugagaaaagaaagaagagaugauaaugaccuaaaaagacuaagagaucucaaucaagcaguuaauaacuuagucgaauuaaagucaacacaacaaaaaucuaucuuaagaguaggaacauuaacaagugaugaucuacuaauuuuagcagcagaucuagaaaaacuuaaaaguaaaguaaccagaaccgaaaggccauuaucagcugguguuuauaugggcaacuuaucaucacaacaauuagaucaaagaagagcacuuuugaacaugauaggaaugucaggcucaaaccagggugcccaagcaggaagggacggaguaguaagagucugggauguaaaaaacgcagaauuauuaaauaaccaauucggcacaaugcccucacuaaccuuagcaugccuaaccaaacaaggacaggucgaucuaaaugaugcaguacaagcacuaacagacuuaggauuaauauauacagcaaaauauccaaauacaagugacuuagacagauuaacacaaagucaucccauauuaaacaugaucgauacaaaaaaaucaucauuaaauauaaguggcuauaacuucucacuaggagccgcagucaaagccggagcauguaugcuagauggaggaaauauguuggaaacaaucaagguaucaccacaaacaauggacggaauacuuaaaucaauauuaaaaguaaaaaaagcauuaggaauguuuauaagugacgcaccuggcgaacgaaauccauacgaaaauauucuauacaaaauaugcuuaaguggagacggauggcccuauauugcaagcagaacaagcauaacuggaagagcaugggaaaauaccguaguagaccuugaaucugaugguaaaccccaaaaagcaggaagcaacucgucaaauaaaaguuuacaaagugcaggcuuuacagcuggguuaaccuauucacaauuaaugacauuaaaagaugcaaugcuacaacuggauccaaacgcaaaaaccuggauggacauagaaggacgaccagaagauccaguagaaauagcacuauaccaaccaucaucuggcuguuauauucauuuuuucagagaaccaaccgauuuaaaacaguuuaaacaagaugcaaaauauucucauggaauagacgucacagaucucuuugcagcucaaccuggauuaacuagugcaguaauagaugcacuacccagaaauauggucauuacaugccaagguagugaugacauacgaaaacuauucgaaucccaaggaagaaaagacauaaaacuaauagacauagcacuaagcaaaacggacucacgcaaauacgaaaacgcgguaugggaccaauacaaggaccuuugccauaugcauacugguaucguaguugaaaaaaaaaaaagaggaggaaaagaagaaauuacuccucacugugcauuaauggacugcauaauguuugacgcggcagugaguggaggcuuaaacacaucugucuuaagagcaguauuaccaagagacaugguauuccgaacaucaaccccaagaguaguauuauaa

SEQ ID NO: 9511 - RNA, 1710 nt, Artificial Sequence
  derived and/or modified CDS sequence (opt6) from LASV(G3206-SLE-2013;Clade IV)__AIT17379__NP
augucagcaagcaaagaaauuaaaucauuccuauggacacaaucauuaagaagagaacuaagcgguuacugcucaaacauaaaauuacaagucguaaaagacgcucaagcauuauuacacggauuagauuucucagaagugaguaacguacaaagauuaaugcgaaaagaacgcagagacgauagcgauuugaaacgacuuagagauuuaaaucaagcaguaaauaaucuaguagaacuaaaaucaacgcaacaaaaaaguguucuacgaguaggaacccuaacuucagaugaucuauuaauauuagcagcggaucuagaaaaauuaaaaucaaaaguaaccagaacagagagaccacuuucagcaggcguauacaugggaaaccuaaguucacaacagcuagaucaacgcagagcauugcucaauaugauaggaaugaguagcggaaauagaggagcacaagcaggaagagacggcguaguaagaguaugggauguaaaaaaugcagaauuauuaaacaaccaauucggaacaaugccaucacuaacauuagcauguuuaaccaaacaaggacaaguagacuuaaacgaugcaguccaagccuuaacagauuugggacuaauauauacagcaaaauacccaaauacuucagauuuagaccgauugacgcaaagucauccaauacucaacaugguagacacaaaaaaaagcaguuuaaauauaucaggauauaacuuuucacuaggagcagcaguaaaagccggagcauguauguuagacggagguaauauguuagaaacaauaaaaguaucaccccaaacaauggauggaauauuaaaauccauauuaaaaguaaaaaaagcacuugguauguuuauuucagauacuccaggagaaagaaauccauaugaaaauauacuauauaaaauaugcuuaagcggagacgguuggccauacauagcaucaagaacaagcauuacaggaagagccugggaaaacacaguaguagaucuugaaagcgauggaaaaccacaaaaagcaggaagcaacaauaguaauaaaucacuacaaucagcaggauuugcagccggcuugacauauucacaauuaaugacuuuaaaagacgcaauguuacaacuagauccaaaugcaaaaacuuggauggauauugaaggaagacccgaagacccaguugaaauagcauuauaucaaccuucaaguggaugcuauauccauuucuuucgagaaccaacagauuuaaaacaauucaaacaagacgcaaaauauagccaugguauagacguaacagaucuuuuugcagcccaacccggauuaaccucagcaguuauugaugcuuuacccagaaacaugguaauaacaugucaaggauccgaugauauaagaaaacuauuagaaucacaaggccgaaaagauauaaaauuaaucgauauagcauuaaguaaaacagauucaagaaaauacgaaaacgcuguuugggaccaauacaaagacuuaugucauaugcauacaggaauaguuguagaaaaaaaaaaaagaggaggaaaagaagaaauuacaccgcacugcgcauuaauggauuguauaauguuugacgcagcaguuagcggaggacuaaacacaaguguacuacgugcuguacuaccaagagauaugguuuucagaacaucaacaccaagaguaguauuauaa

SEQ ID NO: 9512 - RNA, 1710 nt, Artificial Sequence
  derived and/or modified CDS sequence (opt6) from LASV(G3234-SLE-2013;Clade IV)__AIT17389__NP
augagcgcaagcaaagaaauaaaaucauuucuauggacacaaucacuaagaagagaauuaucgggauauugcucaaauauuaaauuacaaguaguaaaagaugcucaagcacuacuccacggacuagauuucuccgaaguaucaaauguacaaagguuaaugagaaaacaaagacgugacgauggagaucuaaaaagauuaagagaucucaaucaagcaguaaacaaccuaguagaacuaaaaaguacacaacagaaaaguguacuuagggucggaacacuaacaucagaugaccuguuaauauuagcugcagaucuagaaaaauuaaaaucuaaaguaacaagaaccgaaagaccacuaucagcaggaguuuacaugggaaacuuaucgucccaacaauuagaucaacgccgagcucuacuaaauaugauaggaaugucaggaggaaaucaaggagcaagaacuggaaaagacggaguggugagaauaugggauguuaaaaacgcagacuuacuaaauaaccaauuugguacaaugcccaguuuaacacuagcaugcuuaacaaaacaaggacaaguagaccuaaacgacguaguacaagcucuaacagaccuaggccuuauauauaccgcaaaauaucccaauaccagugacuuagacagauuaacgcagucacauccuauauuaaacaugauagacacuucuaaaucgagccuaaacauaaguggcuauaauuucucauuaggagccgcaguaaaagcaggagcuuguauguuagacggaggaaauauguuagaaacaauaaaagugagcccacaaacaauggauggaauauuaaaaucaauauuaaaagucaagaaaucacuaggaauguuuauaucagacacaccuggagaaagaaacccauacgaaaacauauuauacaaaauaugccuaucaggagauggauggcccuacauugcaagcagaacaaguauaacugguagagcaugggaaaacacaguuguagauuuagaaagcgauggaaaaccacaaaaagcuggaaguaacaauucaaauaaaucccugcaaagcacaggauucacagcuggauuaacauauucccaauuaaugacauuaaaagacgcaaugcuacaacuagacccaaaugcuaaaacauggauggacauagaaggccguccagaagauccaguugaaaucgcauuauaucaaccaucauccgguuguuacauacacuuuuucagagaaccaacagauuuaaaacaauuuaaacaagacgcaaaauauucccauggaauagacguaacagaucuuuuugcagcacaaccaggacuuacaagugccguuaucgauacauuaccaagaaacauggugauaacaugucaaggaucagaugacauaagaaaacuacuagaaucacaagguagaaaagacauuaaauuaauagacauagcauuaucaaaaaccgacagucgaaaauaugaaaacgcaguaugggaucaauauaaagaccuaugccauaugcauacagguguaguuguagagaaaaagaaaagaggaggcaaagaagaaauuacuccccacugcgcacugauggauugcauaauguuugacgcggcaguaucaggaggacucaacguaagcguauuacgagcaguacuaccuagagacaugguuuucagaacaucaacaccaagaguaguauuauaa

SEQ ID NO: 9513 - RNA, 1710 nt, Artificial Sequence
  derived and/or modified CDS sequence (opt6) from LASV(G3278-SLE-2013;Clade IV)__AIT17399__NP
augagugcuucaaaagaaauaaaaaguuuuuuauggacacaaagccuaagaagagaacucucaggauauugcaguaacauaaaacuacaaguggucaaggacgcacaagcacuauuacauggacuagacuucagugaaguaaguaacguacagcgauuaaugagaaaacaacguagagaugauucugaucuaaaaagacuaagagacuuaaaucaagcaguaaacaaccucguagagcuaaaaucaacucaacaaaaaucaguacucagaguaggaacacuaacaucagaugacuuacuaguccuagcagcugauuuagaaaaauuaaaaucuaaaguaauacgcacagaaagacccuuaucaucaggaguauauauggguaauuuaucaagucaacaacuagaccaaagacgagcacuacuuaacaugauagguaugucaggaggaaaucaaggagcacaaguaggaagagacggaguaguaagaguaugggauguaaaaaacgcagacuuacuaaauaaucaauuugguacaaugccuagccuaacauuagcauguuuaacaaaacaaggucaaguagacuuaaacgacguaguacaagcacuaaccgacuuaggauuaauauacacagcaaaauaucccaauaccucagaccuagauagacuagcacaaagucauccuauacuaaacaugauagacacaaaaaaaucaagucucaacauaucaggauacaauuuuagccuaggagcagcaguuaaagcaggggcaugcauguuagacggcggaaacaugcuagaaacgaucaaaguaacaccacaaacuauggaugguauauuaaaaucaauacuaaaaguaaaaaaagcauuaggaauguucauaucagaaacgccaggcgaacgaaaucccuaugaaaacaucuuauauaaaauaugccuaucuggagauggauggccauacauagcaaguagaacuucgauaacuggaagagcuugggaaaauacaguaguagaccucgaaagcgauggcaaaccacaaaaagcaggcaauaauaacagcaacaaaucacuacagagcgcaggauuuacagcaggauuaacauauucacaauuaaugaccuuaaaagauaguauguuacagcuagauccuaaugcaaagacauggauggacauagaagguaggccagaagacccaguagaaguagcacuauaccaaccaucaucgggcuguuacauacacuuuuuccgagaaccaacagaccucaaacaauuuaaacaagaugcaaaauauucacacggaauagacguuacagauuuauuugcaacacaaccuggacuuaccucagcagucauagaagcgcuuccaagaaauauggucaucacaugccaaggcagugaugacauacgaaaacucuuagaaagccaagguagaaaagauauaaaacuaauagauauagcacuaaacaaaacagauaguagaaaauaugaaaacgccgucugggaccaauacaaagacuuaugccacaugcauacagggguaguaguagaaaaaaaaaaaagaggaggaaaagaggaaauaacaccacacugugcuuuaauggauuguauuauguuugaugcugcaguaucgggcggacuaaaaacauuagcacucagagcaguauuaccaagagauaugguauucagaacaucaacaccgaaaguaguauuauaa

SEQ ID NO: 9514 - RNA, 1710 nt, Artificial Sequence
  derived and/or modified CDS sequence (opt6) from LASV(G502-SLE-2009;Clade IV)__AIT17127__NP
augagcgcaucuaaagaaauaaaaucauuucuauggacacaaucucuaagaagagaacuaucaggauacugcucaaauauaaaauuacaaguaguaaaagacgcucaagcacucuuacacggauuagauuucucugaaguuucuaauguacaaagauuaaugagaaaagaacgcagagacgacaacgaucuuaaaagauuaagagauuuaaaucaagcgguaaacaacuuagucgaauuaaaaagcacucaacaaaaaaguaucuuacgaguaggcacacucacaucagaugaccuacuuauacuagccgcagacuuagaaaaauuaaaauccaaaguaauaagaacugaacgcccucuaucagccggaguauauauggguaacuuaucaucacaacaacuagaucaaagacgagcacuauuaucaaugaucggaaugucagggggcaaucaaggcgucagagcaggaaaagacggaguaguaagaguaugggacguaaaaaacgcagaauuauugaauaaccaauuuggaacaaugccaucacugacacuagcauguuuaacaaaacaaggacaaguagauuuaaaugacgccguucaagcacuaacagaucuuggccuaaucuauaccgcaaaauauccaaacacuagugacuuagacaggcuaacacaaagccacccaauauuaaauaugauagacacaaaaaaaucuucacucaacauaagcggguacaauuuuuccuuaggugccgcagucaaagcaggagccuguauguuagacggaggaaacauguuagaaacaauaaaaguaucgccacaaacaauggaugguauauuaaaaucuauacuaaaagucaaaaaagcauuagguauguucauauccgacacaccaggagaaagaaacccauacgaaaauauccuauauaaaauauguuuaucuggagauggauggccauacauagcaucuagaacaagcaucaccggcagggcaugggaaaauaccguaguugaccucgaaucagauggaaaaccccaaaaagcagguucaaacaauucaaauaaaucauuacaauccgcaggcuuuaccgccggacuuacuuauucacaacuaaugacuuuaaaagaugcaaugcuccaacuagauccaaauaccaaaacauggauggauauagaaggacgaccagaagauccaguagaaaucgcccucuaccaaccaucaucaggcuguuacauacacuucuuuagggaaccaacugaucucaaacaauucaaacaagacgcuaaauauucacauggaaucgacguaacagaucuauuugcugcacaaccuggucucacaucagcaguuauagaugcacuaccaagaaauaugguaauuacaugccaaggaagcgacgacauacgaaaacuccuagaaucacaaggucgaaaagauauaaaacucauugauauagcauuaaacaaaacagauucuagaaaauaugaaaacgcuguaugggaccaguacaaagacuuaugucacaugcacaccggaguaguuguagaaaagaaaaaacgaggcggaaaagaagaaauaacaccucacugugcccucauggauugcauaauguuugacgcugcaguaucaggaggacuaaacacuucaguauuaagagcaguauuaccaagagauaugguauucagaacauccaccccaagaguaguguuauaa

SEQ ID NO: 9515 - RNA, 1710 nt, Artificial Sequence
  derived and/or modified CDS sequence (opt6) from LASV(G503-SLE-2009;Clade IV)__AIT17131__NP
augucagcaucaaaagaaauaaaaucauucuuauggacacaaagcuuacgucgagaauuaucaggauauugcaguaacauaaaauuacaaguggucaaagacgcacaagcauuacuacacggauuagacuuuucagaaguaagcaauguacaaagauuaaugagaaaagaaagaagagacgauaacgaucucaaaagauuaagagaucucaaccaagccguaaauaacuugguagaacuaaaaucaacacaacagaaaaguauacuacgaguaggaacccuaucaucugacgauuuacucguacuagcugcagauuuagaaaaauuaaaaucaaaagucacacgaacagaaagaccauuaucagcaggaguauauaugggcaauuuaagcagccaacaauuagaucaacgacgagcacuauuaaauaugauagguaugucuggcgguaaccaaggagcaagagcaggaagagacggagugguaagaguaugggacguaaaaaacgcugaacuacuaaacaaccaauucgguacaaugccaagucuaacccucgcaugccuaacaaaacaaggacaaguagacuuaaacgauguaguccaagcauuaacagaccucggacucauauauacagcaaaauauccaaauacaucugaucuagacagacuaacccaaucacacccuauccuuaacaugguagacacaaaaaaaagcagcuuaaauauaucagguuauaacuuuucacucggagcagcagucaaagcaggagcauguaugcuugacggaggaaauaugcuagaaacaauaaaaguaucaccccaaacaauagauggaauacucaaaagcauauuaaaaguaaaaaaagcucuuggaauguucauaucagauacaccaggcgaacgaaacccauacgaaaauauacuauacaagauaugcuuaucuggagauggauggccuuacauagcuagucgaacauccauaacaggacgugcaugggaaaauacaguagucgacuuagaauccgauggaaaaccacaaaaagcaggaucuaauaauucaaauaaauccuuacaaucugcaggauucacagcuggacucacuuacucacaauuaaugacuuuaaaagaugcuauguuacaauuagauccaaaugcaaaaauauggauggacauagaaggacgaccagaagacccaguagaaaucgcccuauaccaaccgucaagugguuguuauauacauuuuuucagagaaccaacagaucuaaaacaauucaaacaggaugcuaaauauucacauggcauagacguuacagaccuauuugcagcccaaccaggauuaaccuccgcaguuauagaugcccuaccaaggaauaugguaauaacaugucaaggugcagaugacauaagaaaacuacuagaaagucaaggaagaaaagauauaaaacuuauagauauagcacuaaacaaagcugacucuagaaaauaugaaaacgcagucugggaccaauauaaagaccuaugucauaugcauacaggaguaguuguagaaaaaaaaaaaagaggaggaaaagaagaaaucacaccacauugugcauuaauggauuguauaauguucgacgcagcaguuagcgguggucuuaauacaaguguacuuagagcaguacuaccaagagauaugguauuuagaacuucaacaccacgaguuguauuauaa

SEQ ID NO: 9516 - RNA, 1710 nt, Artificial Sequence
  derived and/or modified CDS sequence (opt6) from LASV(G610-SLE-2009;Clade IV)__AIT17135__NP
augagcgcaucuaaagaaauaaaaucauuuuuauggacccaaaguuuaagaagagaauuaucaggauauugcucgaacauaaaauuacaaguaguaaaagacgcucaggcuuuauuacacggacuagacuuuucagaaguaucaaauguucaaagauuaaugagaaaagaaagaagagacgauaacgaucugaaaagauuaagagaucuaaaccaagcagucaauaaucuaguagaacuaaaaaguacacaacaaaaaucaauauuaagaguaggcacauuaacaucagaugauuuacugauacuagcagcagaucuugaaaaauuaaaaaguaaaguaacaagaacagaaagaccacuaagugccgguguauauaugggaaaccuaucaagucaacaacuagaucaaagacgagcuuuacuaagcaugauagggaugucagggggaaaccaaggggccagagccggaagagacgggguaguaaggguaugggaugucaaaaaugcagaauuacuaaacaaucaauuuggaacaaugccaaguuuaacccuagcauguuuaacaaaacaaggacaaguagacuuaaacgauguaguacaagcauuaacagauuuaggacuuauauacacagcuaaguauccaaauacaucagauuuagacagacuaacacaaagccacccaaucuuaaauaugauagacacaaagaaaucuucacuaaauauuagcggauacaacuucucauuaggagcagcaguaaaagccggugcauguaugcuagacggagguaauaugcucgaaacaauaaaaguaucaccccaaaccauggacggaauauugaaaucuauauuaaaaguuaagaaagcauuaggaauguucauaucagauacaccaggcgagagaaauccauaugaaaauaucuuauacaaaauaugcuuaucaggagauggauggccauauaucgcaagccguacauccauaacaggcagagcaugggaaaauacaguaguagaucuggagagugauggaaaauuacaaaaagcaggaaguaacaauagcaacaaaucccuacaaucagcaggauuuacagcgggauuaacauauagccagcuuaugacacuaaaagaugcaaugcuacaacucgauccgaaugcaaaaacauggauggauauagaaggcagaccagaagacccagucgaaauagcauuauaucaaccaaguucuggauguuacauacacuuuuucagagaaccuacagauuuaaaacaauuuaaacaagaugcaaaauacagucauggcauagauguaacugacuuauuugcagcacaaccaggacuaaccucagcaguaauagacgcauuaccaagaaacaugguaauuacaugucaagguucagacgauauaagaaaacuuuuggaaucacaaggaagaaaagacauaaaguugauagauauugcauuaaauaaaacagauagcagaaaauaugaaaaugcuguaugggaccaauacaaagacuuaugccauaugcauacuggaguaguaguugaaaagaaaaagaaaggcgguaaagaagaaauaacaccacauugugcacuaauggauugcauaauguucgaugccgcuguuucaggagguuuaaacacaaguguauuaagagcaguacucccaagagacaugguauuucgaacaaguacuccaagagugguuuuauag

SEQ ID NO: 9517 - RNA, 1710 nt, Artificial Sequence
  derived and/or modified CDS sequence (opt6) from LASV(G636-SLE-2009;Clade IV)__AIT17139__NP
augagugcaucaaaagaaauaaaauccuuuuuauggacacaaucauuaagaagagaacuuuccggcuacuguucaaacauuaaacugcaagucguaaaagacgcgcaagcccuacuacauggacuagauuucagcgaaguaucaaauguacaacgauuaaugagaaaagaaagaagagaugauaaugaucuaaaacgccuaagagaucuaaaucaagccguuaacaaucuugucgaauuaaaaucaacacaacaaaaaagcguauuaagaguuggcacauuaacaagcgacgauuuauuaauacuagcagcagaucuagaaaaauuaaaaaguaaaguuacaagaaccgaaagaccacuauccgcaggagucuauaugggaaacuuaucaucccaacaauuagaccaaagaagggcguuacuaaacaugauagguaugucuggaggaaaccaaggagcuagagcuggaagagacggaguagucagaguaugggauguaaaaaacgcagaauuacuaaauaaccaauuuggaaccaugccaucauuaacacucgcaugcuuaacaaaacaaggacaaguagaccuaaacgaugcaguucaagcuuuaaccgaucuuggacuaauauauacugcaaaauauccaaacaccagcgaccuugauagauuaacucaaucacauccuauauuaaacaugauagacacaaaaaaauccucacuaaauaucucaggauacaauuucucccuaggagcagcagucaaagcaggagcauguauguuagauggaggcaacauguuagaaacuaucaaagucucgccacaaacaauggacucgauauuaaaaucaauacuaaaaguaaaaaaagccuuaggcauguuuauaagcgauacuccaggcgaacgcaauccauaugaaaauauacuauacaaaauauguuuaucaggagacgguuggccauauaucgcuucacguacgagcauuacaggucgagcaugggaaaauacaguuguagaucucgaaagcgacggaaaaccacaaaaagccgguucaaacaauucaaacaaaucuuuacaaucagcuggauucgcagcaggccuaacauauucacagcuaaugacauuaaaagacgcaauguuacaacucgaccccaacgcaaaaacauggauggauauugaaggacgaccagaagauccaguagaaauagcguuauaucaaccaucaucaggauguuacauacacuuuuuuagagaaccaacagauuuaaaacaauuuaaacaggacgcaaaauauucacacggaauagacguaacagauuuauuugcagcacaaccaggauuaacaagugcaguaauagaugcucuacccagaaauaugguaauuacaugccaaggcucagaugauauaagaaaauuacucgagagucaaggaagaaaagacauaaaacuaauagauauagcacuauccaaaaccgacucgagaaaauacgaaaacgccguaugggaccaauauaaagauuuaugccauaugcacacaggaauaguuguagaaaaaaaaaaaagaggaggaaaagaagaaauaaccccgcacugcgcacuaauggauuguauaauguucgacgcugccguaucaggaggacuaaacaccucaguacuaagagcaguucuaccaagagacaugguauuccgaacaacaacuccaagagugguccuauaa

SEQ ID NO: 9518 - RNA, 1710 nt, Artificial Sequence
  derived and/or modified CDS sequence (opt6) from LASV(G676-SLE-2009;Clade IV)__AIT17143__NP
augucagcaaguaaagagauaaaaucauuucuauggacacaaucacuaagaagagaacuaagcggcuacuguaguaauauaaaacuccaaguagucaaagacgcacaagcacuacuacacggucuagauuuuagugaaguuagcaauguccaaagauuaaugcgaaaagaacgaagagacgauaaugauuuaaagagauuaagagaucuaaaucaagcgguaaacaacuuaguagaguuaaaaaguacacaacaaaaaaguaucuuacgagucggaacauuaacaagcgacgacuuacuaauauuagcugccgaucuagaaaaacuaaaaaguaaagucacaagaacagaaagaccacuaucugcaggugucuauaugggaaaccuaucgagccaacaauuagaccaacgaagagcacuacuuaacaugauagguaugaguggaucuaaccaaggugcaagagcaggaagagauggaguaguuagaguaugggacguaaaaaacgcagaacuuuuaaauaaccaauucggcacaaugccaucacuaacacuagccugcuuaacaaagcaaggacaaguagacuuaaacgacgcaguacaagcauuaacagaccuaggcuuaauuuacacagcaaaauauccaaauacaagugauuuagacagauuaacucaaagccauccaauucuaaauaugauagauacaaaaaaaaguucacuaaauauauccggauauaacuucucacuaggagcagcuguuaaagcuggagcauguauguuagauggaggaaauaugcuagaaacaauaaaagucagcccacaaacaauggacggaauacuaaaaucaauauuaaaaguaaaaaaagcacuuggaauguucauaagugauaccccaggcgaaagaaacccauaugaaaauauacuauacaaaauuugucucucuggagauggauggccauauauagcaucacgaacaucaauaacaggacgagcuugggaaaauacagugguagauuuagaaucagauggaaaaccacaaaaagcaggaaauaacggaagcaacaagucacugcaaucugcagguuuuacagccggacuaacauauucacaacuaaugacacugaaagacgcaaugcuacaacuagauccaaacgccaaaacuuggauggauauagaaggaagaccugaagacccaguagaaauagcucucuaucaacccaguaguggauguuacauacauuuuuuuagagaaccaacugaccuaaaacaauuuaaacaagacgcgaaauauucacauggaauagauguaacagauuuauuugcagcacaaccaggauuaacaagugcaguaauagaugcauuaccaagaaacuuagugauuacaugccaaggaucagaugacauccgaaaacuauuagaaucacaagggcgaaaagauauuaaacuaauagacauagcacuaagcaaaacagacaguagaaaauacgaaaacgcaguaugggaucaauacaaagauuuaugccacaugcacacaggaauaguaguugaaaaaaaaaaaagaggaggaaaagaagaaauaacuccacacugugcauuaauggauugcauaauguucgacgcagcagugucuggaggcuuaaauacaaguguacuaagagcaguacuaccaagagacaugguauucagaacuagcacacccagagugguacucuga

SEQ ID NO: 9519 - RNA, 1710 nt, Artificial Sequence
  derived and/or modified CDS sequence (opt6) from LASV(G692-SLE-2009;Clade IV)__AIT17147__NP
augucagcaucaaaagaaauaaaaucauuccucuggacucaaucacuuagacgcgagcuaucaggauacuguucaaacauuaaauuacaaguaguaaaagacgcccaagcacuuuuacauggacuagacuucucagaaguuucaaauguacaaagacuaaugagaaaagaaagacgagaugacaaugaccuaaaaagacucagagaucuaaaucaagcaguaaauaacuuaguagaauuaaaaucaacucaacaaaaaucaguacuacgaguaggaacucuaacaucagacgaccuccuaauacucgcagcagaucuagaaaaauuaaaaagcaaaguaacaagaacagaaagaccuuuaucagccgggguauauaugggaaaccucagcucacaacaacuagaacaaagaagagcucuauuaaacaugauaggcaugagcggaucaaaccaaggggcacaagccggacgagacggcguaguacgcguaugggacguuaaaaacgcagagcuacucaauaaccaauucggaaccaugccaucacucacacuagcuugccuaacaaaacaaggucaaguagaucuaaacgacgccguacaagcauuaacagaccuaggcuuaauauauaccgucaaauauccaaacacaagcgacuuagaccgauuaacacaaucacacccaauauugaauaugauagauacuaaaaaaucaagcuuaaacauaucaggauacaacuucucucuaggagcagcaguaaaagccggagcauguaugcuagacggaggaaacaugcuugaaaccauaaaaguaucaccacaaacuauggauggaauacuaaaaucaauauuaaaaguaaaaaaagcauuaggaauguuuauuucagauacaccuggugaaagaaacccauacgaaaauauauuauacaaaauaugucuaagcggagacggauggccauauauagcaagcagaacaucaauaacaggaagagcgugggaaaauacaguaguagaucucgaaagcgaugguaaaccacaaaaagcggacucuaacuccuccaauaaaagcuuacaaucugcaggauuuacagcugguuuaacauauucucaacuaaugacauuaaaagaugcaaugcuacaacuagacccaaaugcaaaaacuuggauggauauagaagggagacccgaagacccaguagaaguagcacuauaccaaccaucauccggaugcuauauacacuucuucagagaaccaacagaucuaaaacaauucaaacaagacgcaaaauacucacauggaauagacguuacagaucuauuugcagcacaaccuggacuaaccucagcaguaauagacgcacuaccaagaaacaugguaaucacaugccaaggaucagaugauauuagaaaacuucuagaaagccaaggaagaaaagacauaaaacuaauugauauagcauuauccaaaacagacucacgaaaauaugaaaaugccgucugggaccaauacaaagaucuaugccauaugcacacaggcguaguaguagaaaaaaaaaaaagaggcggaaaagaagaaauaaccccucacugcgcucuuauggacugcauaauguuugaugcggcaguaaguggaggacuaaacaccucaguacuacgagccguauuaccaagagauaugguauucagaacaucaacaccuagaguaguacuauaa

SEQ ID NO: 9520 - RNA, 1710 nt, Artificial Sequence
  derived and/or modified CDS sequence (opt6) from LASV(G733-SLE-2010;Clade IV)__AIT17155__NP
augucugcuaguaaagaaauuaaaucauuuuuauggacacaaucacuacgcagagaacuaucaggcuacuguucaaauauuaaacuacaaguaguuaaagacgcacaagcucuauuacacggguuagacuucucugaaguaagcaacguacaaagacucaugagaaaagaacgaagggacgacaacgauuuaaaaagacuacgagacuuaaaucaagcugucaauaaucuaguagaacuaaaaucaacacaacagaaaucaguauuaagaguaggaacguuaacauccgaugaacuucuaguuuuagcagccgaucuggaaaaacuaaaaucaaaaguaauacgaacagaaagaccccuaucggcaggaguauacaugggaaauuuaucaucacaacagcuagaucaacgaagagcucuccuaucaaugauaggcaugagcggaggaaaccaaggcgcacguacaggcagagacggagucguaagaguaugggacguaaaaaacgcugaacuacucaauaaccaauuuggcacaaugccaaguuuaacuuuagcuuguuuaacaaaacaaggacaaguagaccuaaaugaugccguacaagcacuaacugauuuaggauuaauauauacagcaaaauauccaaacacaucagaucuugauagacuaacacaaucccauccaauccuaaacaugauagacacaaaaaaaucuucauuaaauauaucagguuacaacuucagccuaggagcagcuguaaaagcuggcgccuguauguuagauggaggaaacaugcuugaaacaauaaaaguaucaccacaaacaauggacggaauauuaaaaucaauacuaaaaguaaaaaaagcacuagguauguuuauaagcgauacaccaggagaaagaaauccauacgaaaauauauuauacaaaauaugccuaaguggagauggauggccuuacauugcuucaagaacaucaauaaccggacgagcaugggaaaauacgguuguagaccuggaaucggauggaaaaccacaaaaagcaggcucaaacaauucaaauaaaagucuccaaucagcaggauuuacugcaggacuuacguauucucaacuuaugacauuaaaagaugcaaugcuacaauuagauccaaacgccaaaacguggauggacauagaaggaagaccagaagacccaguagaaauagcauuauaucaaccaaguagcggauguuacauacacuucuuuagagaaccaaccgauuuaaaacaauuuaaacaagacgcaaaauacagccacgguauagacguaaccgaccuauuugcagcacaaccaggauuaaccagugcaguuauagaugcauuaccaagaaauaugguaauaaccugucaaggaucagaugauaucagaaaacuauuagaaagucaaggaagaaaagacauuaaacuaauagauauugcgcucucuaaaauagacagucgaaaauacgaaaacgcagucugggaucaauauaaagauuuaugccacaugcauacaggaguaguaguagaaaaaaaaaaaagagguggaaaagaagaaauaacaccccacugugcacuuauggacuguaucauguuugacgcagccguaaguggaggauuaaauucauuaguacuaagagcaguauuaccaagagacaugguauuccguacaagcaccccacgaguaguauuauaa

SEQ ID NO: 9521 - RNA, 1710 nt, Artificial Sequence
  derived and/or modified CDS sequence (opt6) from LASV(G806-SLE-2010;Clade IV)__AIT17161__NP
augagcgcgucaaaagaaauaaaaagcuuucuauggacacaaucacuaaggagagaacuaucaggauacuguaguaacauaaaauuacaaguaguaaaagaugcacaagcacuucuacacggguuagauuuuagugaaguaucaaauguucaaagacuaaugaggaaagaaagacgagacgauaaugauuuaaaaagacuaagagaucuaaaucaagcagucaauaaccuaguagaacuaaaaaguacacaacaaaaauccauauuaagaguagguacacuaacaucagacgaccuacuaauacuagcagccgaucuagaaaaauuaaaaucaaaagucacaagaacagaaagaccucuaucagcaggaguauauaugggaaaucuaagcucacaacaauuagaccaaagaagagcauuacuaaacaugauaggaaugucaggaagcaaucaaggugcaagaacaggaagagauggaguaguacguguaugggauguaaaaaacgcagaacuccuuaauaaccaauucggaaccaugcccucuuuaacucuagcuugccuaacaaaacaaggccaaguagacuuaaacgacgcaguucaagcacucacagacuuaggccuaauauauacagcaaaauacccuaauacaucugaccuagacaggcuaacacaaagccaucccauauuaaauaugauagacacaaaaaaaucaucacuaaauauauccggauacaauuucucuuuaggagcagcaguaaaagccggcgcauguauguuagacggaggaaauauguuagaaaccaucaaaguaucaccacaaacaauggacggaauuuuaaaauccaucuuaaaaguuaaaaaagcacuuggaauguucauuucagauacacccggugaaagaaaccccuacgaaaauauacuauauaaaauaugccuaaguggagacgguuggccauacaucgcaaguagaacaagcauaacuggaagagcaugggaaaacaccguaguugaucuggaaucagauggcaaaccacaaaaagcaggaucaaacucuucaaauaaaucauuacaaagcgcgggacucacagcaggacuaacauacagucaacuaaugacuuuaaaagaugcaaugcuacaacuagauccaaaugccaaaacauggauggauauagaaggaagaccagaagaucccgucgagauagcacuauaucaaccuucaagcggauguuauauacacuuuuuccgcgaaccaacagacuuaaaacaauuuaaacaagacgcaaaauauagucacgguauagauguaaccgaucucuuugcugcucaaccaggauugacaucagcaguaauagaugcacuaccaagaaaccuaguaauaacaugucaagguucagaugacauaagaaaacuacuagaaagucaaggucgaaaagacauaaaauuaauagacauagcacuaaguaaaacagacuccagaaaauacgagaacgcaguaugggaucaauacaaagauuuaugccauaugcacacagguaucguaguagaaaaaaagaaaagaggaggaaaagaagaaauaacaccacacugugcauuaauggauugcauaauguuugaugcagcaguaucagguggauuaaaugcaagcguucuuagagcaguccuaccucgagacaugguauucagaaccagcacacccagaguagugcuauaa

SEQ ID NO: 9522 - RNA, 1710 nt, Artificial Sequence
  derived and/or modified CDS sequence (opt6) from LASV(G808-SLE-2010;Clade IV)__AIT17165__NP
augagugcaagcaaagaaauaaaaucauuccuauggacacaauccuuaagaagagaacuaucaggauauugcucaaauauaaaauuacaaguaguaaaagaugcacaagcacugcuucacggccucgacuucucagaaguaaacaauguacaacgguuaaugagaaaagaaagaagagacgacaaugacuuaaaacgacuaagagaucucaaucaagcaguaaacaauuuaguagaauuaaaaaguacucagcaaaaaucaauauuaagaguuggaacacucacaucagaugaccugcuaauacuagcugcagacuuagaaaaauuaaaaucaaaaguaacgagaaccgaaagaccccuaagcgcuggcguauauaugggaaaccuuucaagccaacaacucgaccaaagaagagcacugcuuaauaugaucggaaugagcaacggaaaccaaggaaccagagcaggcagagacggagucgugaggguaugggacgucaaaaaugcagaauuauuaaacaaccaauucggaacgaugccaucauuaacgcuagccugcuuaacaaaacaaggacaaguagacuuaaaugauguaguacaagcccuaacagacuuaggacuaauauacacagcuaaauaucccaauaccucugaccuagauagacuaacucaaucacacccaauacuuaauaugauagauacuaagaaaaguucuuuaaacauaagcgguuauaauuuuucacuaggagcagcagucaaagcaggagcaugcaugcuagauggaggaaauaugcuagaaacaauuaaaguuucaccacaaacaauggauggaauauuaaaaucaauauuaaaaguaaaaaaagcacuagggauguuuauaucagauacaccaggagaaagaaauccauacgaaaauauauuauacaaaaucuguuuaucaggcgacgguuggccauauauagcaaguagaacaucaauaacaggaagagcaugggaaaauacagucguagaucuagaaucugauggaaaaccacaaaaagcugauuccucaaauucaaauaaaagcuuacaaagugcuggcuuuacagcagguuuaacauauucucaauuaaugacacuaaaagaugcaaugcuacaacuagacccaaacgcaaaaacauggauggacauagaaggaagaccagaagaccccguagaaguagcuuuauaucaaccaucaucuggaugcuacauccauuucuuuagagaaccaacugaucuaaaacaauucaaacaagaugcaaaauauucacauggaauugauguaaccgaucuauuugcagcacaaccagguuuaacaucagcagucaucgaugcacuaccaagaaauaugguaauaacaugccaaggaagugacgauauuagaaaacuuuuagaaucacaaggaagaaaagauauaaaacucauagacauagcccuaagcaaagccgacucaagaaaauacgaaaaugcaguaugggaccaacacaaagacuuaugucacaugcacacaggagucguuguggaaaaaaaaaaaaggggaggaaaagaagaaauaacaccacacugcgcauuaauggauugcauaauguaugacgcagcaguaagcggaggauuaaacacaagcguauuaagagcaguacuaccaagagauaugguuuucagaacaucaacaccaagaguaguucuauaa

SEQ ID NO: 9523 - RNA, 1710 nt, Artificial Sequence
  derived and/or modified CDS sequence (opt6) from LASV(Guinea Faranah;Clade IV)__AMZ00380__NP
augucaguaagcaaagaaguaaaaagcuuccuuuggacacaaaguuuaagaagagaauuaucaggguacugcucaaacauuaaauuacaaguaguaaaagacgcacaagcuuuacuccacggauuagauuucagugaaguaaguaauguacaaagacuuaugaggaaacaaagacgcgaugacagcgauuuaaaaagacuaagagaucuaaaucaggcagucaacaacuuaguagaacuaaaaucaacacaacaaaagagugucuuacgaguagguacacuaacauccgaugacuuauuaauauuagcagcagacuuagaaaaauuaaaaucaaaaguaacaaggacagaaaggccauuaagugcaggagucuauauggguaaccuaagcucacaacaacuagaucaacgaagagcgcuacugaacaugaucggaaugaauggaggaaaucaaggaguacaagcaggcagagacggcguaguacgcguaugggauguaaaaaaugcagaacuacuaaacaaccaauucggaacaaugccaagcuuaacauuagcaugcuuaacaaaacaaggccaaguagaccuaaaugaugcaguucaagcacuaaccgaccuaggguuaauauacaccgcaaaauauccaaauacaagcgauuuagauagacuagcacaaucacauccaauacuaaauaugauagauacgaaaaaaucuucacuuaacauaucgggcuacaauuuuucauuaggugcagcagucaaagcaggagcauguaugcuagacggaggcaauauguuagaaaccauaaaaguaaguccccaaacaauggacggaauacuaaaagcaauuuuaaaaguuaaacgcacacuaggaauguucguaucagauacaccaggagaaagaaacccauaugagaauauccuauacaaaauauguuuauccggugauggauggccauacaucgcaucaagaaccuccaucacaggaagagcaugggaaaauacaguaguagacuuagaaucagauggaaaaccacaaaaaguaggaaauaauggaucuaacaaaaguuuacaaagcgcgggauucucagcuggacuaacauacagucaacuaaugacacuaaaagacgcaaugcuacaacuagauccaaauacaaaaaccuggauggauauagaaggaaggccugaagauccaguagaaguagcacuauaccaaccuucaucagggugcuauauacacuuuuucagagaaccaacugaucuaaaacaauuuaaacaagacgcaaaauacucacauggaauugauguaacagaucuauucgcugcucaaccuggccuaacaucagcaguuauugaggcguuaccaagaaauaugguaauaacaugucaagguucagaagauauacguaaauuauuagaaucucaaggaagaaaagauauaaaauuaauagacauugcucuaucaaaagcagacucaagaaaauacgaaaacgcaguaugggaccaaugcaaagaccugugucauaugcacacuggaauaguaguagaaaaaaaaaaaagaggaggaaaagaagaaauuacaccacauugugcauuaauggacugcaucauguuugaugcagcaguaucaggaggacuaaauacacaaguacuaagggcaguacuaccaagagacaugguauucaggacgucaacaccaaaaguaguucuauaa

SEQ ID NO: 9524 - RNA, 1710 nt, Artificial Sequence
  derived and/or modified CDS sequence (opt6) from LASV(GUINEA Z-185a;Clade IV)__AMZ00376__NP
augucuguaaguaaagaaauaaaaagcuuccuauggacccaaucacuaagaagagaacuaagcggauauuguaguaauauaaaauuacaaguuguaaaagaugcacaagcauuauuacauggacuagauuucagcgaaguaucuaauguacagcgauuaaugagaaaacaaagaagagacgacaaugaccuaaaacgauuacgugaucuaaaucaagcaguaaauaauuuaguugaacucaaaaguacacaacaaaaaagcguccuaagaguaggaacacucacaagugaugaccuauuaauauuagcagcagacuuagaaaaauuaaaaagcaaaguuacuagaaccgaacgaccacuaucagcuggaguauacaugggaaaccuaucaucacaacaauuagaccaaagacgagcauuacuaaauaugauagguaugucagggggaaaccaaggcgcucaaacuggaagagauggaguaguaagaauaugggauguaaaaaaugccgaacuacuaaacaaccaauuuggaacaaugccaagucuuacauuagcaugcuugacaaaacaaggacaaguagaccuuaacgaugucguacaagcacuaacagaccucggucucaucuacacugcaaaauauccaaauacauccgaucucgacagacuuacacaaagucaucccaucuuaaacaugauagauaccaaaaaaucaagccuaaacauuucaggauacaauuuuucacuuggagcagcaguaaaagcaggagcuuguaugcuagauggagggaacaugcuugaaaccauaaaaguuucaccgcaaacuauggauggaauacuaaaaucaauuuuaaaagucaaaaaagcauuaggaauguuuaucucagauacuccaggcgaaagaaauccauacgaaaacaucuuauacaaaauauguuuaucaggugauggcuggccuuacauugcgucgagaaccucaauaacaggacgagcaugggaaaacacagugguagacuuagaaaguggugaaaaaccacaaaaaauaggcucaaauaacuccaacaaaugccuccaaagcgcaggauucacagcuggucuuucauacagucaacuaaugacacugaaagaugcaaugcuacaacuagauccaaacgcuaaaacauggauggacauagaaggccgcccagaagacccaguugaaauugccuuauaucaaccaucaagugguuguuacauacauuucuuucgagaacccacagaccugaaacaauuuaaacaagacgcaaaauacucacacggaauagacguaacagaucuauucgcagcucaaccaggauuaaccucagcaguaauagaagcuuuaccaagaaacaugguaaugacaugucaaggaucagaugacauaaggaaauuauuagaaucacaaggaaggaaagauauaaaauuaauagauauagcauuaaguaagacagauaguagaaaauaugaaaaugcaguaugggaucaauauaaagaccuaugucauaugcacacaggaguaguuguagaaaaaaaaaaaaaaggaggcaaggaagaaauaacaccacacugcgcacuaauggacuguauaauguuugacgcagcaguaagcggaggccuaaacacaaguguacucagggcaguacuaccacgagacaugguauucagaacaucaacaccuaaaguugucuuguaa

SEQ ID NO: 9525 - RNA, 1710 nt, Artificial Sequence
  derived and/or modified CDS sequence (opt6) from MOPV/LASV reassortant(IGS-1;Clade IV)__AFY05578__NP
auguccgcaucgaaagaaauuaaaucauuucuauggacucaaagccuuagaagagaauuaucaggauauuguucaaauauaaaacuacaagucgugaaagaugcacaagcauuacuccacggauuagauuucagcgaaguaucaaauguccaaagacuaaugagaaaagaaagaagagacgauaacgaucuaaaaagacuaagagaucuaaaucaagcaguaaacaacuuaguggaauuaaaaagcacacaacaaaaaagcauacuuagaguagguacacucacauccgacgacuuacuaauuuuggcagcagaucuagaaaaauuaagaaguaagguuaucagaaccgaaagaccucuuagcgcaggaguauauaugggaaaucuauccucucaacaacuagaucaaagaagagcauuauuaaacaugaucggaaugagcggaggaaaucaaggagcacgugcaggaagagacggagucguuagagugugggacguaaaaaacgccgaauuauuaucaaaucaguuuggaacaaugcccucauuaaccuuagcauguuuaacaaaacaaggacaaguagacuuaaacgacgcaguucaagcacucacagauuuaggauuaauauauacggcaaaauauccaaauacuuccgaccucgacagacuaacacaaucacacccaauccuaaacaugauagacacaaaaaaaucaucacuaaacauuagcggauauaacuuuucacuaggagcagcaguaaaagcaggugcauguauguuagauggagggaauauguuggaaacaaucaaaguaucaccacaaacaauggacggaauacuaaaaagcauauuaaagguaaaaaaagcacuaggcauguucaucucagacacgccaggagaacgaaacccauaugaaaacauuuuauauaaaauaugcuuaagcggagauggauggccauacauagcaucaagaacaaguauuaccggaagagccugggaaaauacuguaguagaucuagaaagcgacggaaaaccacaaaaagccgauucaaauaauaguagcaaaagucuacaaagugcaggauucacagcuggguuaaccuauucacaauugaugacacuaaaagacgcgaugcuucaacuagacccaaaugcaaaaaccuggauggauauagaaggaagaccagaagaccccguugaaauagcauuauaucaacccaguucaggauguuacauacacuuuuuucgagaaccaacagauuuaaaacaauucaaacaagacgcuaaauacucacauggaauugaugugacagauuuauucgcaacacaaccagggcuaacaagcgcagucauagaugcauuaccaagaaacaugguaauaacaugccaaggaagugaugacauaagaaaauuauuagaaucgcaaggaagaaaagacauaaaauuaauagacauagaccuuagcaaaacagacaguagaaaauacgaaaacgcaguaugggaccaauauaaagaccuaugccauaugcauaccggaguaguugucgaaaaaaaaaaacgaggugggaaagaagaaauaacaccacauugugcauuaauggacugcauuauguuugaugcagcaguaucaggaggauuaaacacaagcguauuaagagcaguauuacccagagauauggucuuccgcacaucaaccccaagaguaguauuauaa

SEQ ID NO: 9526 - RNA, 1710 nt, Artificial Sequence
  derived and/or modified CDS sequence (opt6) from MOPV/LASV reassortant(IGS-11;Clade IV)__AFY05589__NP
augagcgcuagcaaagaaaucaaaagcuuucuuuggacacaaucacugagaagagaauuaagcggauauugcagcaacauuaaauuacaaguagucaaagacgcacaagcacuacuacauggacuagauuucagcgaaguaucaaauguacaaagacuuaugagaaaagaacgaagagaugauaaugaccuaaaaagauuaagagaccuaaaucaggcagucaauaaccuaguagaacuaaaaucaacucaacaaaagucaauauuaagagucggaacgcucacaucagaugaucuuuuaauuuuagcagcagacuuagaaaaauuaaaaaguaaaguaauaagaacugaaagaccccucucagcaggaguauauaugggaaaccuaaguagucaacaauuagaucaaagacgagcucuauuaaacaugauagggaugaguggagguaaccaaggcgccagagcaggaagagacggaguuguaagagucugggaugucaaaaacgcagaacuauuaaguaaucaauucggaacaaugccaucauuaacacuagcauguuuaacaaaacaaggacaaguagaucuaaacgaugcaguacaagcucuaacagacuuaggccuaauauacacagcaaaauauccuaauacgucagaccuugauagacuaacacaaucacacccuauuuuaaacaugauagauacaaaaaaaaguagucuuaauauaucgggauacaauuuuucacuaggagccgcgguaaaagccggagcauguaugcuagacggaggcaacaugcuagaaacaauaaaaguuucaccacaaacaauggacggaauauuaaaaucaauacuuaaagucaaaaaagcauuaggcauguuuauaagcgacacaccaggagaacgaaauccauacgaaaauauauuauacaaaauaugucucucaggagauggauggccauauauagcaucucgaacaucaaucacaggaagagcaugggaaaacacaguagucgaccuagaaagcgauggaaaaccacaaaaagcagacagcaauaacaguucuaaaucauuacaaucagccggauuuacagcuggacuaacauauucgcaacuuaugaccuuaaaagaugcaaugcuucaauuagauccaaacgcaaaaacauggauggauauagaaggaagaccagaagacccaguagaaauagcauuauaccaaccaucaucuggauguuauauacacuucuuuagggaaccaacagaccucaaacaauuuaagcaagaugcaaaauacucacauggaauugauguaacagaccuauuugccacucaaccaggauuaaccagcgcaguaauagacgcauuaccccguaacaugguaauaacaugccaaggaagcgaugacauuagaaaacuacuugaaagucaaggacgaaaagauauaaaacuaauagauauagaucuaagcaaaacagacucacgaaaauaugaaaacgcgguaugggaccaauacaaagauuuaugccacaugcauacuggaguagucguagaaaaaaaaaaaagaggaggaaaagaagaaaucacaccacacugugcuuuaauggauuguauuauguucgacgcagccguaucaggcggacuaaacacaucaguauuacgcgccguauuaccaagagacaugguauucaggacauccacaccucgaguaguacucuaa

SEQ ID NO: 9527 - RNA, 1710 nt, Artificial Sequence
  derived and/or modified CDS sequence (opt6) from MOPV/LASV reassortant(IGS-12;Clade IV)__AFY05591__NP
augagugcgucaaaagaaaucaaaucauuucuuuggacucaaagccuuagaagagaauuaagcggauauugcagcaacauaaaacuacaaguaguaaaagaugcucaggcucuacuucacggacuagauuucucugaaguaagcaauguucaaagacucaugagaaaagaaagaagagaugacaaugaccucaaaagauuacgagaucuaaaucaagcaguaaauaaccuaguagaacuaaaaagcacacaacaaaaaucaauacuaagaguaggaacacuaacaucagaugaccuccuaauacuagcugcagauuuagaaaaacuaaaaucaaaaguaaucagaacagaaagaccacuaagcgcaggaguauauaugggaaaccuuucaagccaacaauuagaucaaagaagggcgcuacucaacaugaucgguaugagcggugguaaccaaggcgcaagagccggaagagacggaguuguaagaguaugggauguaaaaaacguugaauuacuaucgaaccaauuuggaacaaugccaucacuaacgcuagcaugcuuaacuaaacaaggacaaguugaccuaaaugaugcaguacaagcauuaaccgaccuagggcuaauauauacugcaaaauauccaaauaccucagacuuggacagauuagcccaaagccacccaauacuaaauaugauagacaccaaaaaaucaagcuuaaauauaucaggauacaauuuuucacuaggagcagcaguaaaagcgggagcuuguaugcuagacggaggcaacauguuagaaacaauuaaaguaagcccacaaacaauggacgggauauuaaaaucaauacuaaaaguaaaaaaagccuuaggaauguucauaagugacacaccaggugaaagaaacccuuaugaaaacauacuauacaaaaucugucugucaggagauggauggccauauauagcaucuagaacaaguauaacaggacgagcaugggaaaacacggucguagaccuagaaucagauggcaaaccacaaaaagcagacucaaacaacucaucaaaaucauuacaaucagcuggauuuacagcaggucuaaccuauagucaacucaugacauuaaaagacgcaauguuacaauuagacccaaacgcaaaaacauggauggacauagaagguagaccggaagacccaguugaaauugcacucuaucaaccaaguaguggaugcuacauccacuuuuucagagaaccaacagaccuaaaacaauuuaaacaagaugcaaaauauucucacggcauagacguuaccgauuuauuugcaacacaaccaggauuaacaagugcuguaauagaugcacuuccaagaaacauggucauaaccugccaagguucagaugauauaaggaaauuacuugaaagucaagguaggaaagacauaaaauugauagacauugaccuuucgaaaacagauucaagaaaauacgaaaacgcaguaugggaccaauacaaagacuuaugucacaugcacacagguguaguaguagaaaaaaaaaaacgugguggaaaagaagaaauuacaccacacugcgcacucauggauugcauaauguucgacgcagcaguaucaggcggacucaauacaucagucuuaagagcaguauuaccaagagauaugguuuucagaacaucaacaccuaggguaguuuuauaa

SEQ ID NO: 9528 - RNA, 1710 nt, Artificial Sequence
  derived and/or modified CDS sequence (opt6) from MOPV/LASV reassortant(IGS-14;Clade IV)__AFY05595__NP
augagugcaucaaaagaaauaaaaucauuccuauggacucaaagccuaagaagagaauuaagcgguuacuguucaaacauaaaacuacaaguaguaaaagaugcacaagcucuauuacauggacuggauuuuagugaaguuucaaacguacaaagauuaaugcgaaaagaaagaagagacgauaacgaccuuaaaagacuaagagacuuaaaccaagcaguaaauaacuuaguagaacuaaaaucaacucaacaaaaaaguauauuaagaguaggaacacuaacuucagaugacuuacuuauauuagcagcagacuuagaaaaauuaaaaucaaaaguaauccgaacugaaagaccacuauccgcaggaguauauaugggaaauuuaagcucacaacaacuagaucagagaagagcacuccugaacaugauagguaugucaggcggaaaucaaggagcacgagcuggaagagauggaguaguacggguaugggauguaaaaaaugcggaacuccuaucaaaccaauucggaacaaugccgagccuaacauuagcauguuuaaccaaacaaggccagguagaccuaaacgacgcuguucaagcccuuacagaccuuggguuaauauauacagccaaauauccaaauacaucagacuuagacagacuugcacaaagucauccaauauuaaauaugauagacacaaaaaaaaguucacuaaacauaucagguuauaauuucucacuaggagcugcaguaaaagcaggcgcauguauguuggauggcggaaauauguuagaaacuauaaaaguaucaccacaaaccauggacggaauacuaaaaucaauacucaaaguaaaaaaagcacuaggaauguucauuucagauacuccuggagaaagaaacccauacgaaaauauauuauacaaaauuugucuaagcggagauggauggccguauauagcaaguagaacaucuauaacaggaagagcaugggaaaauacaguaguagaccuagaaucagauggaaaaccacaaaaagcagacaguaauaauagcucgaaaucacuacaaagugccgguuuuaccgcaggccuaacauauucacaacuaaugacauugaaagacgcaaugcuacaacuagacccaaaugcuaaaacauggauggauauagaaggucgaccagaagacccuguagaaauagcgcucuaucaaccuagcucgggaugcuauauacacuuuuucagagagccaacagauuuaaaacaauuuaagcaagaugcaaaauacagucaugguauugauguaacagaucuauuugcaacacaaccaggauuaacaagugcgguaauugacgcuuuaccaagaaacauggucauaacaugucaaggaagcgaugauauaagaaaauuauuagaaagccagggaagaaaagauauaaaauugauugauauagaucuaucaaaaacggauucaagaaaauacgaaaaugcaguaugggaucaauacaaagauuuaugucauaugcauacagggguaguagucgaaaaaaaaaaacgaggagguaaagaagaaauuacaccucacugugcauuaauggauugcauaauguuugacgcagcaguuucaggaggauuaaauaccagcguacuuagagcaguacuaccaagagauaugguauuccgaacauccaccccacgaguaguauuauaa

SEQ ID NO: 9529 - RNA, 1710 nt, Artificial Sequence
  derived and/or modified CDS sequence (opt6) from MOPV/LASV reassortant(IGS-23;Clade IV)__AFY05610__NP
augucagcaagcaaagaaauaaaaucauucuuguggacccaaagucuaagaagagaacuaagugguuacuguucaaacauaaaacuucaaguaguaaaagaugcccaagcuuuauuacauggucuagauuucagugaaguuucaaacguacaaagacuaaugagaaaagaaagaagagacgauaaugacuuaaaaagauuaagagauuuaaaccaagcaguaaauaauuuaguagaacuaaaaucaacacaacaaaaaucaauauuaagaguuggaacccuaacaucagaugaccuauuaauacuagcagcagacuuagaaaaacuaaagaguaaaguuauaagaaccgaaagaccacuaagugcagguguuuauaugggaaacuuaagcucacaacaacuagaucaaagaagagcucuacuaaauaugaucggaaugaguggaggaaaccaaggcgcuagagcaggaagagacggagucgucagaguaugggacguaaaaaaugcugaguuguuaaguaaccaauucggcacaaugccaucacucacuuuagcuugcuuaacaaaacaaggucaaguagacuuaaaugaugccguacaagcacuaacagacuuaggcuuaaucuauacagcuaaauauccaaauacaucagaccuagaccgauuaacucaaagccacccaauauuaaauaugauagacacaaaaaaaagcucuuuaaauaucucaggauacaacuucucacuaggagcagcaguuaaagccggugccuguaugcuagacggagguaauauguuagaaacaauaaaaguaaguccacagacaauggaugguauauuaaaaucaauauuaaaagucaaaaaagcauuaggaauguucauaagugacacaccuggagaaagaaaucccuacgaaaauauacuguauaaaauaugucuaagcggagacggauggccauacauagcuucaagaacgaguauaacaggcagagcaugggaaaacaccguaguagaccuagaaucagauggaaaaccacaaaaagccgauucuaacaauagcucaaaaagucuacaaucagcagguuuuacagcggguuuaacauacucacaacuaaugacccuaaaagaugcuaugcuacaacuagacccaaauaccaaaacuuggauggacauagaagggcguccagaagauccuguagaaauagcauuauaucaacccagcaguggauguuacauacauuucuuccgcgaaccuacagauuuaaaacaauucaaacaagacgcaaaauacagucauggaauagauguaacagaucuauuugcaacacaacccggacuuacaucagcuguaauagaugcacuaccaagaaauaugguaauaaccugucaaggaagugacgauauaagaaaacuuuuagaaucacaagguagaaaagacauaaaauuaauagacauagacuuaucaaaaacugacucaagaaaguacgagaaugcuguaugggaccaauauaaagaccuuugucauaugcauacaggagucguagucgaaaaaaaaaaaagaggggguaaagaagaaauaacaccucauugugcuuuaauggauuguauaauguuugaugcagcuguaagcggaggauuaaacacuagcguuuuaagggcaguauuaccuagggacaugguuuuccgaacauccacaccuagagucguauuauaa

SEQ ID NO: 9530 - RNA, 1716 nt, Artificial Sequence
  derived and/or modified CDS sequence (opt6) from MOPV/LASV reassortant(IGS-27;Clade IV)__AFY05618__NP
augucagcaucaaaggaaauaaaaaguuuccucuggacacaaucucuccgacgggaauugucaggauauugcucaaauauuaaauuacaaguagucaaagaugcacaagcauuauuacacggauuagacuucucagaaguaucaaauguacaaagacugaugagaaaagaacgacgagaugacaacgaccuaaaaagauuaagggacuuaaaucaagcaguaaauaaccuaguagaauuaaaaucaacacaacaaaaaucaauauuaagaguaggaacacuaaccucagacgacuuauuaauucuagcagcagauuuagaaaaacuucgcaguaaaguuauaagaacggaaagaccauuaucagcaggaguauacauggguaacuuauccucacaacaauuagaucaaagaagagcccucuuaaauaugauaggaaugaguggaggaaaucaaggagcaagggccggaagagacggagucguucgagucugggaugucaaaaacgcagaauuacuaucaaaccaauucggaacaaugccaaguuuaacacuagccuguuuaacaaaacaaggucaaguagacuuaaacgacgcaguacaagcacucacagaucuaggccucauuuauacagccaaauauccgaauacaagcgaucuagacagguuaacucaaucacauccaauauuaaacaugaucgauacaaaaaaaucaagucuuaacauaucaggauacaauuucucauuaggagcagcaguaaaagcaggagcauguauguuagacggaggaaacauguuagaaacaauaaaaguaucaccacaaaccauggacgguauacuaaaaaguauauuaaaaguuaaaaaagcacuaggaauguucauaucagauacgccuggcgaaagaaauccauaugaaaauauauuauacaaaauuugccuaaguggagauggauggccauauauagcaucacgaacaagcauaacgggacgugcaugggaaaauacaguaguggaucuagaaucagaugggaaaccacaaaaagcagauaguaauaauucaucaaaaucacuccaaagcgcaggauucacagcaggacuuacauauucacaacuaaugacauuaaaagacgcaauguuacaguuagacccaaacgcaaaaacauggauggacauagaagguagaccagaagauccaguagaaauagcucuauaucagccgaguuccggauguuauauacauuuuuuuagagaaccaacagaucuaaaacaaaaacaauuuaaacaagacgcuaaauacucccauggaauagacguaacagaucuauucgcaacacaaccuggccuaacuagcgcagucauagaugcauuaccgagaaacaugguaauaacaugucaaggaagugacgacauaagaaaauuacuagaaagccaaggaagaaaagacauuaaacuaauagacauagaucuaagcaaaacagacucaagaaaauaugagaacgcaguaugggaccaguacaaagacuuaugccauaugcauacuggaguaguagucgaaaaaaaaaaacgagguggaaaagaagaaauuacaccacacugcgcccuuauggacugcauaauguuugacgcagcaguauccggcggauuaaacacaucaguuuuaagagcaguacuaccaagagauaugguuuuuagaacaucaacaccaagaguaguauuguaa

SEQ ID NO: 9531 - RNA, 1710 nt, Artificial Sequence
  derived and/or modified CDS sequence (opt6) from MOPV/LASV reassortant(IGS-3;Clade IV)__AFY05580__NP
auguccgcauccaaagaaauaaaaaguuuucuauggacacaaagucuaagacgagaauugucuggauauugcaguaauauaaaauuacaaguaguuaaagaugcacaagcauuauuacacggacuagauuucagugaaguaucaaacguacaaagauuaaugcgaaaagaaagaagagacgacaacgaucuaaaacgauuaagagaccuaaaucaagcaguuaacaauuuaguugaauuaaaaucaacacaacaaaaauccauacuaagaguuggaacucuuaccucagaugacuuacuaauacuugcugcugauuuggaaaaauuaagaucaaaaguaauaagaacagaaagacccuugagugcuggugucuauaugggaaacuuaaguucacaacaauuagaccaaaggagagcauuauuaaauaugauaggaaugucaggcggcaaccaaggagcaagagcaggaagagaugguguaguaagaguuugggauguuaaaaacgcugaacuacuaucuaaccaauucggaacaauaccaucauuaacacuagcaugcuuaacaaaacaaggacaaguagauuuaaaugaugcaguucaagcccuaacagacuuaggcuuaaucuauacugcaaaauacccaaauacaucugaucuagacagacuaacucaaagccacccaauacuuaacaugauagacacgaagaaaucgagucuuaacauaaguggcuacaauuuuucauuaggcgcagcaguaaaagccggagcauguauguuagauggaggaaauaugcuagaaacuauaaaaguaucaccacaaaccauggacggaauccuaaaaucaauuuuaaaagucaagaaagcacuaggaauguucauaagugauacaccaggagaaagaaauccauaugaaaauauauuauacaaaauauguuuaucaggugauggauggcccuauauagcaucaagaacaucaauaacagguagagcaugggaaaauacagucguagaucuagaaucaggaggcaaaccacaaaaagcagauucaaacaauucaucaaaaagucuacaaagugcaggauuuacagcaggacuaacauacagucaauuaaugacauuaaaagaugcaauguuacaauuagaucccaaugccaaaacauggauggauaucgaagguaggccagaagacccagucgaaauagcacuauaccaaccaagcagcggaugcuacauccacuuuuucagagaaccaacagaucugaaacaauuuaaacaagaugccaaauauucccauggaauagacguaaccgauuuauuugcaacacaaccaggauuaacaagugcuguuauagaugcacuaccaagaaacaugguaauaacaugucaaggcagcgaugauauaagaaaacuacucgaaagucaagggagaaaagacauaaaacuaauugacauagaucucaguaaaacagacuccaggaaauacgaaaaugcaguaugggaccaauacaaagacuuaugucauaugcauacuggaguagucguagaaaagaagaaaagaggaggaaaagaagaaauaacaccacauugugcacuaauggauuguauaauguuugaugcagcagugagcggggguuuaaauacgaguguauuaagagcaguucuaccaagggauauggucuuuagaacuucaacaccaagaguaguacuauaa

SEQ ID NO: 9532 - RNA, 1710 nt, Artificial Sequence
  derived and/or modified CDS sequence (opt6) from MOPV/LASV reassortant(IGS-4;Clade IV)__AFY05581__NP
augucagcaucaaaagaaaucaaaucuuuucuauggacacaaaguuuaagaagagaauuaaguggauauuguucaaauaucaaacuacaaguaguaaaagacgcacaagcccuacuacacggucuagauuucagcgaaguaagcaauguacaaagauuaaugcgcaaagaaagacgugacgauaaugaccuuaaaagauuaagggaccuaaaccaagcagugaacaaccuaguagaacucaaaagcacacaacaaaaaaguauacuacggguaggcacacuaacuucagaugaccuuuuaauucuugcagcagauuuagaaaaacuaaaaucaaaaguuauaagaacagagaggccacuaagcgcaggaguauacaugggaaaccuaaguucacaacaauuagaccaaagaagagcacuacuuaacaugauaggaaugagcggagguaaccaaggcgcaagagcaggaagagacggaguaguaagagucugggacguaaaaaaugcagaacuccuaucaaaucaauucggaacaauacccucacuaacuuuagcuugcuuaacaaaacaaggccaaguagauuuaaaugacgcaguccaagcauuaacugaccuaggucuaauauacacagcaaaauaucccaacacaucugacuuagaccgauuaacacaaucacauccaauauuaaacaugauagacaccaaaaaaucaucauuaaacauaucgggcuacaacuucucuuuaggagcagcuguuaaagcaggagcuuguaugcuugauggcggaaauaugcuugaaaccauaaaagucucaccucaaacaauggacggaauacuaaaaaguauauuaaaaguaaaaaaagcgcuagguauguucauaucagauacacccggagaacgaaaucccuacgaaaacauacucuauaaaauaugcuuaucaggugacggcuggccuuacaucgcuaguagaacauccauaacugguagagcaugggaaaacacaguugucgaucuagaaagugguggaaaaccacaaaaagcagauuccaauaauucaucaaaaucauuacaaagcgcaggauuuaccgcagguuuaacauacagucaauuaaugacuuuaaaagacgcaauguuacaauuagauccuaaugcuaaaacauggauggauauagaaggaagaccagaagauccagucgaaauagcauuauaucaaccaagcucaggauguuacauacauuucuuuagagaaccaacugacuuaaaacaauucaaacaagacgccaaauauucacauggaauagacguuacagaccuauucgcaacacaaccaggauuaacuucugcaguuauagaugcacuaccacgaaacaugguaauaacuugucaaggaucagaugauaucagaaaauuacuagaaagucagggaagaaaagauauaaaacuaauagauauagacuuaucuaaaaccgauagcagaaaauaugagaacgcaguaugggaccaauauaaagacuuaugucacaugcauacuggaguaguaguagagaaaaagaaaagaggaggcaaagaagaaauaacaccacacugugcauuaauggauugcauuauguucgaugcagccgugucaggagggcuaaacacaagcguacuuaaagcaguccuaccaagagauaugguuuucagaacaucaacuccaaggguagucuuauaa

SEQ ID NO: 9533 - RNA, 1710 nt, Artificial Sequence
  derived and/or modified CDS sequence (opt6) from MOPV/LASV reassortant(IGS-9;Clade IV)__AFY05585__NP
augagcgcgucgaaagaaauaaaaucauucuuauggacacaaagucuacgucgcgaacuaucaggauacugcucaaauauaaaauuacaaguagucaaagacgcccaagcauuacuacacggacuagacuuuagugaaguaaguaauguacaacgucuaaugcgaaaagaaagacgcgacgauaaugaucuaaaaagacuaagagaucuaaaucaagcggucaauaaucuaguagaacuaaaaucuacacaacaaaaaucuaucuuaagaguaggaacacugacuucagaugacuuauuaauucuagcagcagaccuagaaaaacuaagaagcaaaguaauucguacagaacgaccgcuaucagcaggagucuauaugggaaaucucucaagucaacaacuugaucaaagaagggcauuauuaaacaugauaggcaugucaggugguaaccaaggagcucgcgcuggaagagauggagucguaagaguaugggacguaaaaaacgcagaacuacuaagcaaccaauucgguacaauacccagucuaacacuagcauguuuaacaaaacaaggacaaguagaucuaaaugaugcaguacaagccuuaacagaccugggauuaauauauacagcaaaauacccaaacacaucagaccuagauagacucacacaaucacacccaauacuuaacaugauagauacaaaaaaaucaagccuaaauaucaguggauauaauuucagucuaggugcagcaguuaaagcaggagccuguaugcuagacggaggcaacaugcuagaaacuauaaaaguaagcccacaaacaauggacgguauccuuaaaucuauauuaaaaguaaaaaaagcacuuggaauguucauaagugauaccccaggcgaaagaaaucccuaugaaaauauauuauacaaaauaugucucucaggagauggcuggccauacauagcaaguagaacaucuaucacuggaagagcaugggaaaauacaguaguugaucuagaaucagaugguaagccacaaaaagcugauucaaauaauucaucaaaaucacuucaaucagcagguuuuaccgcuggacuuacauauagucaauuaaugacauuaaaagaugccauguuacaauuagauccaaacgcaaaaacauggauggauauagaaggaagacccgaagaccccgucgaaauagcuuuauaucaaccaucaaguggauguuacauacacuuuuucagagaaccaacggacuuaaaacaauuuaaacaagacgcaaaauauucacauggaauagauguuacugauuuauucgcaacacaaccaggacuuacaucagcaguaauagacgcuuuaccaagaaauaugguaauaacuugucaaggaagugacgauauaagaaaacuauuagaaucucaagguagaaaagacaucaaacuaauagauauagacuuaagcaaaacagacucucguaaauacgaaaaugcagucugggaucaauauaaagauuuaugccauaugcacacaggaguaguuguagaaaaaaaaaaaaggggaggaaaagaagaaauaacaccccacugcgcauuaauggauugcauuauguuugacgcagccguaaguggaggauuaaacacaagcguauuaagagcuguacuaccaagagauaugguauuucgaaccucaacaccacgaguagucuuauaa

SEQ ID NO: 9534 - RNA, 1710 nt, Artificial Sequence
  derived and/or modified CDS sequence (opt6) from LASV(LM032-SLE-2010;Clade IV)__AIT17803__NP
augagugcaagcaaagaaauaaaaucauuccuuuggacucaauccuuacgccgagaauuauccggauacugcucaaauauuaaacuacaaguaguaaaagacgcacaagcacuauuacacggauuagauuuuucagaaguauccaauguacaacgauuaaugagaaaagaaagaagagacgacaaugaucuaaaaagacuaagagacuuaaaccaagcaguaaauaaccugguagaauugaaaagcacacaacaaaaaucaauacuaagagucggaacacucacgucagaugaccuacuaauuuuagccgcugaccuagaaaaauuaaaaucaaaaguaauaagaacagaacgacccuuaucagcugguguauacaugggaaaccuuagcucacaacaacuagaucaaagacgagcacuuuuaaguaugauagguaugaguggagggucucaagaagcuagagcaggaagagacggaguaguaagaguuugggauguuaaaaacgcagaacuauuaaauaaccaauucggaacaaugccaucacuaacacuagcgugccuaacaaaacaaggacaagucgauuuaaacgaugccguccaagcacuaacagacuuaggauuaauauacacagcuaaauacccaaauacaucagacuuagauagacuaacacaaucacauccaauacuaaacaugauagacacaaaaaaaucuaguuuaaauauuagcggcuauaauuucucacuaggagcugcgguaaaagcaggagcauguaugcuagacggaggaaauaugcuagaaacaauaaaaguaaguccacaaaccgucgacgguauuuuaaaaagcauucuaaaaguuaaaaaagcauuagggauguucaucucagauacuccuggagaaagaaacccauaugaaaauauccucuauaaaauaugcuuaucuggcgacgguuggccauacaucgcaagccgaaccaguaucacaggaagagcaugggaaaauacaguaguagaccuagaaagcgacggcaaaccacagaaagccggaucaaacaauagcaauaaaucacuucaaucugcaggauucacagcaggauuaacauauagucaauuaaugacacuaaaagaugcaaugcuacaauuagauccaaaugcaaaaacauggauggauauugaaggaagaccagaggaccccgucgaaauagcacuguaccaaccuagcucaggauguuauauacacuuuuuccgugaaccaacagauuuaaaacaauuuaaacaggacgcaaaauauucucauggaauagaugucacagaccuuuuugcggcacaaccaggauugaccagcgcagucauagacgcauuaccacgaaauauggugauaacaugccaaggaucagacgacauaagaaaauuacuagaaucacaaggaagaaaagacauaaaauuaauagauauagcuuuaucaaaaacagacucaagaaaauacgaaaaugcagucugggaccaauacaaagaccuaugucacaugcauacaggggucguaguugaaaaaaaaaagaaaggcggcaaagaagaaauaacgccacacugcgcuuuaauggauugcauaauguuugaugccgcaguuucaggaggauuaaacacaucaguauuaagagcaguauuaccaagagauaugguguucagaacaaguacaccaagaguuguuuuauaa

SEQ ID NO: 9535 - RNA, 1710 nt, Artificial Sequence
  derived and/or modified CDS sequence (opt6) from LASV(LM395-SLE-2009;Clade IV)__AIT17811__NP
augagugcaagcaaagaaauaaaaucuuuccuauggacacaaucacuaagaagagaauuaagcggauauugcaguaacaucaaacuacaaguaguaaaagacgcacaagcacuauuacauggauuagauuucagcgaaguaucaaauguacaaagacucaugagaaaagaacgacgagaugacaacgaccuaaaacgcuuaagagaucuaaaucaagcaguaaacaacuuaguagaacuaaaaucaacacaacagaaaaguauuuuaagaguaggaacacugacuucagaugacuuacuaauauuagcagcagaucuagaaaaauuaaaaucaaaaguaacacgaacagaaagaccucuaucagcaggaguguauaugggaaaucuaagcagucaacaauuagaucaaagacgagcucucuuaaauaugauaggaaugucaggaucuaaccaaggugccagagcggggagagacggcguaguacgaguaugggacgugaaaaacgcagaauuacuaaacaaccaauuuggaacaaugccaucacuaacacuggcuugucuaaccaaacaaggacaaguagaucuaaaugaugccguacaagcucuaacagaucuugguuuaauauauacagcaaaauacccaaauacaagcgaucuugacagacuuacacagagucauccaauacugaauaugauagacacaaagaaaucaaguuuaaacaucaguggauacaauuucagccuaggagcagcaguaaaagcaggagcauguauguuagacggaggaaauaugcucgaaacaauaaaaguuagcccucaaacaauggacggaauauuaaaaucaauauuaaaagucaaaaaggcuuuaggaauguuuauaagugacacaccaggugaaagaaacccuuacgaaaauauucuguacaaaauaugcuuauccggcgauggauggccauauauagcuuccagaacuucaauaacagguagagcaugggaaaauacaguaguagacuuagaaagcgacggaaaaccucaaaaagcuggaucaaauggaaguaauaaaucacuacaaucagcgggauuuacagcaggauuaacauacagucaacuaaugacauuaaaagacgcaauguuacaauuagauccaaacgcaaaaacauggauggacauagaaggacgaccagaagauccaguagaaauagcguuuuaucaaccaaguuccggcuguuacauacauuucuuuagagaaccaacagauuuaaaacaauuuaaacaagacgcgaaauauagucaugguauagacguaacagacuuauucgccgcacaaccaggacuuacaagugcaguaauagacgcccuaccaagaaacuuaguaauaacaugucaaggauccgaugauauaagaaaauuauuugaaucacaaggacgaaaagacaucaaauuaauagauauagcauuaagcaaaacagauucaagaaaauaugaaaacgcaguaugggaccaauacaaagaucuaugucauaugcauacugguauagucguugagaaaaagaaacgaggaggaaaagaagaaauaacaccacacugugcuuugauggauugcauaauguucgacgcagcaguuucagggggacucaaugccucaguguuaagagcaguacuaccaagagauaugguauuucgaacuucaacccccagaguaguauuauaa

SEQ ID NO: 9536 - RNA, 1710 nt, Artificial Sequence
  derived and/or modified CDS sequence (opt6) from LASV(LM765-SLE-2012;Clade IV)__AIT17815__NP
augagcgccuccaaagaaauaaaaucauucuuauggacucagucauuaagacgagaacuaaguggauacugcaguaauauaaaacuacaaguaguuaaagaugcacaagcuuuacuacacgggcuagauuuuucagaaguuucaaacguacaaagauuaaugagaaaagaaagacgagacgauaaugauuuaaaaagacuaagggaucucaaucaagcuguaaauaacuuaguggaauuaaaauccacacagcaaaaaucaauauuaagaguaggaacauuaaccagugaugacuuacuuauauuagcugcagaucucgaaaaauuaaaaucaaaaguaacaagaacugaaagaccacuaucagcaggaguauacaugggcaauuuaaguagucaacaauuagaucaaagaagagcauuauuagacaugauagguaugucaggaaguaaccaaggagcacgagcaggacgagacggaguaguaaggguaugggauguaaaaaacgcagaauuacuaaauaaccaauucgguaccaugccaucauugacacuagcauguuuaacuaaacaaggacaaguagaucuaaaugaugccguacaagcuuuaacagaucuaggccucauauacacagcaaaauauccaaauacaagcgaucuagauagacucacacagucacacccaauauuaaacaugauagauacaaaaaaaaguagcuuaaauauaagugguuauaacuuuaguuuaggagcagcaguaaaagcuggagccuguaugcuagacgguggaaauauguuagaaacuauaaaagucucaccgcaaacaauggaugguauacucaaaaguauacuaaaaguaaaaaaagcauuaggcauguucauaagcgaugcgccuggagaaagaaauccauacgaaaauauauuauauaaaauaugcuuaucaggagacggauggccguacauagcaaguagaacgucaauaacaggacgugcaugggaaaauacaguaguagauuuagaaagcgacgguaaaccgcaaaaagcaggaaguaacggaaguaauaaaaguuuacaaagugcaggauucacagcaggauuaacauauucacaauuaaugaccuuaaaagacgcaauguuacaauuagauccaaaugccaaaacauggauggauauagaaggacgacccgaagacccaguagaaauagcguuauaucaaccauccucaggauguuauauucacuuuuucagagaaccuacagauuuaaaacaauuuaaacaagacgcaaaauauagccauggaauagacguaacggaucuauuugcagcacaaccuggauuaaccagcgcaguuauagaugcauuaccuagaaauaugguaauuacaugucaagguagugaugacauacgaaaauuauuugaaucacaaggacgaaaagacauaaaacuaauagacauugcccucaguaaaacggacagcagaaaauaugaaaacgcaguaugggaccaauauaaagauuuaugccacaugcauacaggaauaguugucgaaaaaaaaaaacgagguggaaaagaagagauuaccccccacugugcacugauggauuguauaauguucgacgcagcggucucaggaggacuaaacacuucagucuuaagggccgucuuaccaagagauaugguauucagaacaucaacaccaagaguaguauuauga

SEQ ID NO: 9537 - RNA, 1710 nt, Artificial Sequence
  derived and/or modified CDS sequence (opt6) from LASV(LM774-SLE-2012;Clade IV)__AIT17821__NP
augagcgcaucaaaagaaauaaaaucauuccuauggacucaaucguuacgaagggaacuaaguggauacugcucaaacauaaaauuacaaguagucaaagacgcacaagcccuacuacacggauuagauuucucagaaguaaguaauguacaaagacuaaugagaaaagaaagaagagacgauaacgaccucaaaagacuacgcgaucucaaucaagcaguuaacaauuuaguagaguuaaaaucaacacaacaaaaaucaauauuaagagucggaacucuaacaucagaugacuuauuaauacuagccgcagacuuagaaaaauuaaaaucaaaagugaucagaacagaacgaccccuuagugcaggaguuuauauggggaacuuaaguucacaacaacuagaucaaagacgagcacuacuaagcaugaucggaaugaguggaggaaaucaaggagcaagagccggcagagacggagucguaagaguaugggaugucaaaaacgcugaauuacuaaauaaccaauucgguacaaugccauccuuaacacuggcaugccuaacaaaacaaggacaaguagaccuaaaugacgcaguacaagcacuaacagacuuaggccuaauauauaccgcaaaauauccaaauacauccgauuuagacagacuaacacaaucacauccaauauugaauaugaucgacaccaagaaaaguaguuuaaacauaagugguuacaacuuuucauuaggagcagcaguuaaagccggugcauguauguuagauggaggaaauauguuagaaacaauaaaagucucgccacaaacaguagacggaauacuaaaaagcauacuaaaaguaaagaaagcauugggcauguucauaucagauaccccaggagaaagaaacccauaugaaaacauacuauacaaaauaugucuaucaggugauggauggccauauaucgcaagccguacaucaauaacagguagagcaugggaaaauacaguugucgauuuagaaucagauggaaaaccucagaaaacaggaucaaacaauucaaauaaaucucuucaaucagcaggcuucacagccggauuaacauauucccaacuaaugacacuaaaagaugcaaugcuucaacuagacccuaacgccaaaacauggauggauauagaaggccgaccagaagacccagucgaaguagcacuauaucaaccaucuagcggaugcuacauucacuuuuucagagaaccaacagaccuaaaacaauucaaacaagaugcaaaauacucacaugggauagacguaaccgauuuauuugcagcacaaccaggacuaacaucugcagugauagacgcacuaccaagaaauaugguaauaacaugucaagguuccgaugauauaagaaaacuacuagaaucacaaggaagaaaagauauuaaauuaauagauauugcauuaucaaaaacagauuccagaaaauacgaaaaugcaguaugggaucaauacaaagaucuaugucauaugcauacaggaguuguuguagaaaagaagaaaagaggagguaaagaagaaauaacaccccacugcgcauuaauggacugcauuauguuugacgcagcgguaagcggaggacuaaacacaaguguacuaagagcuguacuuccaagagauauggucuucagaacaucuaccccaagagucguauuauaa

SEQ ID NO: 9538 - RNA, 1710 nt, Artificial Sequence
  derived and/or modified CDS sequence (opt6) from LASV(LM776-SLE-2012;Clade IV)__AIT17825__NP
augucagcaaguaaagaaauaaaaaguuuuuuauggacccaaucacuacgacgagaacuaucaucauauugcucgaacauaaaauuacaaguaguaaaagaugcacaagcucuacuacaugguuuagacuuuucugaaguuucaaauguacaaagauuaaugagaaaagaaagaagagaugauaacgauuuaaaaagacuaagagaucucaaucaagcagucaauaaccucguugaacucaaauccacacaacaaaaaucaauucuaagaguaggcacuuuaaccucagaugacuuacugauacucgcagcagauuuagaaaaacuaaaaaguaaaguaacacgcaccgaaagaccacuaagugcuggaguauauauggguaaucuaaguucgcaacaauuagaccaaagaagagcucuucuauccaugauagguaugucaggaucaaaucaaggagcaagagcagguagagauggaguaguaagaguaugggacguaaaaaaugcagaacuucuaaauaaccaauucggaacaaugccaucacuuacauuagcuugccucacaaagcaaggacaaguagaccuaaaugaugcaguacaagcucuaacagacuuaggcuugauauauacagcaaaauauccaaauacuucagauuuagaucgauuaacacaaagucacccaauauuaaauaugauagauacuaaaaaaucaucauugaauauaucaggauacaauuuuagccuaggagcagcugucaaagccggagcauguauguuagacggaggcaauaugcuagaaacaauaaaaguuaguccucaaacaauggauggaauauuaaaaaguauacuaaaaguuaaaaaagcauuaggcauguuuauaagcgauacucccggagaaagaaauccauaugaaaauauauuauacaaaauaugucuaucuggagauggauggccauauauagcaagcagaacuagcauaacuggaagagcaugggaaaacaccguaguagaucuagaaucagauggaaaaccccaaaaagcaggaucgaacaauucaaauaaaagucuacaaagugcaggauuuacagcaggacuuacauauucacaacuaaugacccuaaaagaugcaaugcuacaauuagaccccaaugccaaaacauggauggacauagaaggaagaccagaggacccaguugaagucgcccuauaucaaccaucaucagguuguuauauacacuucuucagagaaccaacagaucuaaaacaauuuaaacaagacgcuaaauacagucaugguauagacguaacagaucuauuugcagcacaaccaggcuuaaccagugcaguuaucgaugcuuuaccaagaaacaugguuauaaccugucaaggaucagaugauauucgaaaacuucuagaaucucaaggaagaaaagauauuaaacuuauagauauagcacuaucgaaaacagauucccgaaaauaugaaaacgccguaugggaucaauauaaagaccucugucacaugcacacagguguagucguagaaaaaaaaaaaagaggaggaaaagaggaaauaaccccacacugugcacuaauggauugcauaauguuugacgcagcaguaucaggaggauuaaauacaucaguacuaagagcaguauuaccaagagacaugguuuuuagaacaucaaccccucgaguaguauuauaa

SEQ ID NO: 9539 - RNA, 1710 nt, Artificial Sequence
  derived and/or modified CDS sequence (opt6) from LASV(Mad39;Clade IV)__ANH09723__NP
augagcgcaucaaaagaaauaaaaucauuccuauggacccaaagccuaagacgagaacuaucagguuauugcucaaacauaaaauuacaaguuguaaaagacgcacaagcacuauugcacggacuagacuucucagaaguaucaaacguacaaagacuaaugagaaaacaacgaagagacgauaaugaucuaaaaagauuaagagaccuaaaucaagcaguaaacaaucucguagaacuaaaaucaacacaacaaaaaucaguauuaagaguaggaacacuaacaagugaugacuuauuaacccuagcugcagacuuagaaaaauuaaaaaguaaagucacaagaacagagaggcccuuaacugcaggaguguauaugggaaaucuaaguagucaacaauuagaucaacggagagcauuacuaaacaugauaggaaugucaggaggcaaucaaggagcacgaacuggaagagacggaguaguaagaguaugggacgucaaaaacgcagaguuauuaaauaaucaauucggaacaaugccaucauuaacguuagcauguuuaacaaaacaaggccaaguagacuuaaacgauguaguacaagcccuaaccgaucuagggcuaauauacacagcaaaauacccaaauacaagugaucuagacagacucacucagucucacccaauauuaaacaugauagauacaaauaaaaguucauuaaacauuucaggauacaauuucagccucggagcagcaguaaaagcaggcgcauguaugcuagacggcggaaauaugcucgaaacgauaaaagucucaccucaaacaauggauggaauacuaaaauccauacucaaaguaaagaaaaguuuaggcauguuuaucuccgauacaccaggagaaagaaacccauaugaaaacauacuauauaaaauauguuuaagcggagauggauggccauacauagcaaguagaacaucuauaacaggcagagcaugggaaaacacaguuguagacuuagaaucaggaggaaaaccacaaaaagccggaucaaacaauagcaauaaaagccuucaaucagcaggauucgccgcaggccuaacauauagccaacuaaugacauuaaaagaugcaauguuacaacuagacccaaaugcaaaaacauggauggacauagaagggagaccagaagacccaguagaaauugcucuauaucaaccaauaaguggauguuacauacacuucuuuagagaaccaacagauuuaaaacaauucaaacaagacgcaaaauacagucaugguauagacguaacagauuuauucgcagcgcaaccagggcuuacaucugcaguaauagaagcauuaccaagaaacaugguaauaaccugucaaggaagugaugacaucagaaaacuauuugaaucacaagggagaaaagauaucaaauuaauagauaucgcguuaucaaaaacagauucaagaaaauacgaaaacgcaguaugggaccaauacaaagaccuaugccauaugcauacaggcguaguaguagaaaagaaaaagaaaggcggaaaagaggaaauaacaccgcacugcgcauuaauggacuguauaauguuugaugcagcagucucaggaggauuaaacacccuaguauuaagagcaguauuaccaagagacaugguauucaggacaucgacaccaaaaguuguacuauaa

SEQ ID NO: 9540 - RNA, 1710 nt, Artificial Sequence
  derived and/or modified CDS sequence (opt6) from LASV(Mad41;Clade IV)__ANH09725__NP
augucagccaguaaagaaaucaaaucauuuuuauggacccaaucacuaagaagagaauuaaguggauauuguaguaauauaaaauuacagguaguaaaagacgcacaagcucuacuacacggacuagauuucucagaaguaaguaauguacaaagauuaaugagaaaacagagaagagaugauaacgaccucaaaagauuaagagaucuaaaucaagcuguaaauaaccuagucgaacucaaaucaacacaacaaaaauccguauuaagaguuggaacucucaccucugaugacuuauuaauacuagcagcagauuuagaaaaacuaaaaucaaaaguaacacgcacagaacgaccauuaucagccggaguguacaugggaaaucuuaguucccaacaacuagaccaaagacgagcacuacuuaacaugaucggaaugucaggaggaaaccaaggagcccgagccggcagagauggagugguaagaguaugggaugucaaaaaugcagacuuacuaaacaaucaauucggaacgaugccaucauuaacacucgcuugucuaacaaaacaaggccaaguagauuuaaacgauguaguacaagcacuaacagaccuaggacuaauauacacagcuaaauacccaaacacaucugacuuagaccgacuaacacaaucacacccuauauuaaauaugauagauacuaauaaaagcucauuaaacauuaguggauacaauuuuucuuuaggugcagcaguaaaagccggagccuguaugcuagaugguggaaauaugcuagaaaccauaaaagucagcccacaaacaauggacggaauauuaaaauccauccuaaaaguaaagaaaaguuuaggaauguucauaucagauacuccaggcgaaagaaauccauaugaaaauauccuauacaaaauuugucuauccggagauggauggccuuauauagcauccagaacaagcauaacuggcagagcaugggaaaacacaguaguagaucuagaaaguggaggaaaaccacaaaaagcaggauccaacaauagcaauaaaagucuucaaagcgcgggauuugcagcgggacuaacauacagccaacugaugacauuaaaagaugcaaugcuucaacuugaucccaacgcaaaaacauggauggacauagagggacgaccagaagacccaguagaaauagcccuauaucaaccaauaucaggaugcuauauacacuuuuucagagaaccaacggaucuaaaacaauuuaaacaagaugcaaaauauagucauggcaucgaugugacggauuuauucgcagcacaaccaggccuaacaucagccgucauagaagcauuaccgagaaauaugguaauuacaugucaaggaucagaugacaucagaaaacuauuggaaucacaaggaagaaaagacauaaaacucauugauauagcacuaaguaaaacagauucuagaaaauaugaaaaugcaguaugggaccaauacaaagaucuuugccauaugcauacagguguaguuguagaaaagaagaaacgaggaggaaaagaagaaaucacaccacauugcgcauuaauggacugcauaauguucgacgcagcaguauccggaggccucaacacacugguacuaagagcuguacuuccaagagacaugguauuuagaacaucaaccccaaaaguaguccuauga

SEQ ID NO: 9541 - RNA, 1710 nt, Artificial Sequence
  derived and/or modified CDS sequence (opt6) from LASV(Mad63;Clade IV)__ANH09729__NP
auguccgcaucaaaagaaauuaaaucauuucuauggacacaaucuuuaagaagagaacuaucgggauacugcucaaacauaaaauuacaggucguaaaagaugcacaagcacuucuacaugguuuagacuucucagaaguaucuaauguacaacgcuuaaugagaaaacagcgaagagacgauagcgaucuuaaaagauuaagagaucuaaaccaagcaguaaacaaccuagucgaacuaaaaagcacacaacaaaaaagcguuuuacgaguuggaacacucacaagcgaugaucuauuaacccuagcagcagaucuugaaaaguuaaaaucuaaaguaaccagaacugaaagaccacuauccgcaggggucuacaugggaaaccuaucaagucaacaacuagaucaaagaagagccuuacuaaauaugauaggaaugaguggaggaaaucagggagcaagaacaggccgagacggugucguacguguaugggacguaaaaaacgcagacuugcuaaacaaccaauucggaaccaugccaucauuaacacuagcaugcuuaaccaaacaaggacaaguagaccuaaaugacguaguacaagcauuaacagauuuaggauuaauauauacagccaaauacccgaauacuucugacuuagacagacuaacacaaagucacccaauucuuaacaugauagauaccaauaaaaguucauuaaauaucucaggauacaauuucucacuaggagcagcaguaaaggcaggagccugcaugcuagacgguggaaauaugcucgaaacaaucaaagucaguccccaaacaauggauggaauccuaaaaucaauacuaaaaguaaaaaaaucacuaggaauguucauaagcgauacaccaggagaacggaauccauacgaaaacauacuauacaaaauaugccuaagcggagacggauggcccuauauagcaaguagaacaaguauaacaggcagagcaugggaaaauacaguuguagaucuagaaagcggggguaaaccacaaagagcagguucaaauaauucaaauaaaagcuuacaaucagcuggcuuugcagcaggacuaacauauucccaacuaaugacacucaaagacgcaaugcugcaacucgaccccaacgcgaaaacauggauggauauagaaggaagacccgaagacccaguagaaauagcauuauaucaaccaacuaguggcugcuauauacauuuuuucagagaaccaacggauuuaaaacaauuuaaacaagaugccaaauauucacaugguauagacguaacagaucuauuugcggcccaacccggauuaacaagugcaguaauagaagcauuaccucgaaauaugguaaucacaugccaagguucagaugacauaagaaaacuacuagaaagucaagguagaaaagauauaaaacuaauugauaucgcacuaagcaaaaccgauucaagaaaauacgaaaacgcagucugggaccaauauaaagacuuaugucauaugcauacaggaguaguaguagaaaaaaaaaaaaaaggaggaaaagaagaaauaacaccacacugugcacuaauggauugcauaauguucgacgcagcaguaucaggaggccucaauacucuaguucuacgagccguauuaccucgugacaugguauuuagaacaucaacaccaaaaguaguacuauaa

SEQ ID NO: 9542 - RNA, 1710 nt, Artificial Sequence
  derived and/or modified CDS sequence (opt6) from LASV(Mad69;Clade IV)__ANH09731__NP
augucagcaucaaaagaaaucaaaaguuucuuauggacacagagcuuacgaagagaacuaucaggauacuguaguaauauaaaacuacaaguaguaaaagacgcacaagcacuauuacauggauuagacuucucagaaguuaguaauguacaaagguuaaugagaaaacaaaggagagacgauaaugacuuaaaaagacugcgugaccuaaaucaagcaguaaacaaucuaguagaacucaaaucuacacaacaaaaaucaguacuaagaguaggaacacucacaucagacgauuuacuaacucuagccgccgacuuagaaaaauuaaaaaguaaagucaccagaaccgaaagaccauuauccgcaggaguauauauggguaaccuaucaucacaacaacuagaucaaaggagagcuuuacuaaacaugauagguaugacaggaggaaaccaaggagcaagaacagguagagaugguguaguaagaguaugggauguuaaaaaugcagacuuauuaaacaaucaauuugguaccaugccaucacuaacacuggcuugcuuaacaaaacaaggucaaguagaccuuaacgacguaguacaagcacuaacagaccuaggauuaauauauacagcaaaauauccaaauacaucagaucuagacagacuaacgcaaucacacccuauacuaaauaugauagauaccaauaaaucuucacuaaauauaaguggauauaauuuuucacuaggagcagcaguaaaagccggugcauguaugcucgacggcggaaauauguuagaaacaaucaaaguaaguccucaaacuauggacggaauacuaaaaaguauacuuaaaguaaagaaaucacugggaauguucauaucagauacaccaggagaaagaaacccauacgaaaacauauuauauaaaauaugcuuaagcggcgauggauggccauauauagcaucaagaacaucaauaacuggcagagcaugggaaaauacuguaguugaucuagaaucaggaggaaaaccacaaagagcuggaucaaacaauucuaacaaaucguuacaaucagcaggauuagcagcaggauuaacuuauagccaauuaaugacacuuaaagaugcaauguuacaauuagacccaaacgcaaaaacauggauggacauagaaggaagaccagaagauccaguagagauugcccuauaucaaccaacaucaggauguuauauacacuucuuuagagaaccuacagaucuuaaacaauuuaaacaagaugcaaaauacagccacggcauagacguaacugaucuauuugcagcacaaccaggauuaacaagcgcaguaauagaagcacuaccaagaaacaugguaauaacaugucaagguagcgaugauauaagaaaauuacuagaaucacaaggaagaaaagauauaaaacuaauagauauagcacugaguaaaacagacucuagaaaauacgaaaacgcaguaugggaccaauacaaagaccuuugccauaugcacacaggaguaguuguugaaaagaaaaagaaaggaggaaaagaagaaauaacuccacacugugcacuaauggauugcauaauguuugacgcagcagucucuggaggacuuaacacauuagugcuacgagccguccuuccaagagauaugguauucaggaccucuacaccaaaaguaguauuauaa

SEQ ID NO: 9543 - RNA, 1710 nt, Artificial Sequence
  derived and/or modified CDS sequence (opt6) from LASV(Mad83;Clade IV)__ANH09733__NP
augagcgcaucaaaagaaauuaaaucauuucuguggacucaaucauuacgacgagaacucucaggauacugcaguaacauaaaacuacagguaguaaaagaugcacaagcacuauuacauggauuagauuuuucagaaguaucaaaugugcaaagauuaaugagaaaacaaagaagagaugauaacgaccuuaaaagacuuagagaccuaaaucaagcaguaaauaacuuaguugaacuaaaaagcacccaacaaaaauccguacuccgagucggaacauuaacaucagaugaccuauuaacuuuagccgcagaucuggaaaaacuaaaaucaaaaguaacccgaacagaaagacccuuaucagcaggcgucuauauggguaacuuaucaucccaacaacuagaucaacgacgagcacuauuaaauaugauaggaauguccggaggaaaccaaggagcaagaacaggaagagauggaguaguaagaguaugggaugugaaaaaugcagaccuccuuaauaaccaauucggaacaaugccaucgcuaacucuggcaugcuuaacaaaacaaggucaaguagacuuaaacgaugugguacaagcauuaacagacuuaggacucaucuauacagcuaaauauccaaauaccucugauuuagauagacucacacaaagucacccaauauuaaacaugauagauacaaacaaaaguucguuaaauauaucaggauauaauuuuaguuuaggagcagccguaaaagcaggagccugcaugcuagacggaggcaauaugcuugaaacgauaaaagucaguccacaaacaauggacggaauacuuaaaucaauauuaaaaguaaaaaaaagccucggaauguucauuucagauacaccaggagaaagaaacccuuaugaaaauauauuauauaaaauauguuuaagcggagauggauggccauauauagcaaguagaacgucaaucacaggacgcgcaugggaaaauaccguaguagauuuagaaagcgggggaaaaccccaaagagcaggaucaaacaacuccaacaaaucgcuacaaucagcaggauuugcagcaggccuuacauacucacaauuaaugacacucaaagacgcaaugcuacaacuagauccaaaugcaaaaacauggauggacauagaaggaagaccagaagaucccguagaaaucgcauucuaccaacccauuaguggaugcuacauacacuucuuccgugaaccaacagaccuaaaacaauuuaaacaagaugcaaaauauagccauggaauugauguuacagauuuauuugcagcacaacccggauuaacaagugcaguaauugaagcacuaccaagaaauaugguaauaacaugccaaggaagugaugauaucaggaaacuccucgaaagccaaggaagaaaagacauaaaauuaauagauauagcacuaucuaaaacagacucaagaaaauaugaaaacgcaguaugggaccaauacaaagaucucugccauaugcauacaggcgucguaguagaaaaaaaaaaaaaagggggaaaagaagaaaucacaccacacugugcacuaauggauugcauaauguucgacgcagcaguaucaggaggacuuaacacgcuaguacuaagggcaguacuaccaagagacaugguauucagaacaucaacccccaaaguuguauuauaa

SEQ ID NO: 9544 - RNA, 1710 nt, Artificial Sequence
  derived and/or modified CDS sequence (opt6) from LASV(NL;Clade IV)__AAO59513__NP
augucagccucaaaagagguaaaaaguuuccuuuggacucaaucacuaagaagagaacuaucaggauauuguuccaauauaaaacuacaaguagucaaagacgcacaagcauuacuacacggucucgauuucagugaaguuucaaauguacaaagacuaaugagaaaagaaagaagggacgauagcgauuuaaagcgcuuaagagaucuuaaccaagcaguaaauaacuuaguugaacucaaaucaacucaacaaaaaucuguacuaagaguuggaacacuaacaucagaugaccuacuuguacuagcagccgacuuagaaaaacuuagaucaaaaguaacaagaacugaaagaccauuaucugcagguguauacauggguaaccuaucaagucaacaauuagaccaaagaagagcauuauuauccaugauaggaaugaacggaucaaaccaaggagcaagagcuggaagagauggaguaguaaggguaugggauguaaaaaaugcagaauuauuaaauaaccaauuugguacaaugccuagccuaacacuagcaugucugacaaaacaaggucaaguagaucuaaaugaugcuguacaagcucuaacagaccucggacuuauauauacagcaaaauacccuaauaccucagauuuagacagacuaacucaaucacacccaauauuaaacaugauagauacaaaaaaaucaagccuaaauguaagcggauacaauuuuucucuaggagccgcuguaaaagccggagcauguauguuagacggaggaaacaugcuagagacaauaaaaguaucaccucaaacaauggacggaauauuaaaaucaauacuuaaaguaaaaaaagcauuaggcauguucaucucagauacaccaggcgaaagaaacccauaugaaaacauauuauacaaaauaugcuuauccggagauggcuggccauauauagcuaguagaacauccauuacaggaagagcaugggaaaauacaguaguagaccuagaaagcgacgaaaaaccacaaaaagcaggaagcaacaacucaaacaaaucacuacaaucugcgggauuuacugcgggacuaacuuauagucaauuaaugacauuaaaagacgccauguuacaacuagauccaaaugcaaaaacuuggauggauauagaaggaaggccagaagacccaguagaaauugccuuauaccaaccaucaaguggauguuacauacauuuuuucagagaaccaacagauuuaaaacaauuuaaacaagacgcaaaauacucacauggcauagacauuaccgaucuauuugcagcacaaccuggccuaacaagugcugucauagaugcauuaccacgcaauaugguaauaacaugccaaggaucagaugauauacgaaaacuacuugaaucacaaggaagaaaagacauuaaauuaauagacauagcacuaaauaaagcagacucaagaaaauacgaaaacgcagucugggaucaauauaaagauuuaugccauaugcauacaggaguagucguagaaaaaaaaaaaagaggcgguaaagaagaaauuacaccucauugugcacucauggacugcauuauguucgacgcagccguaaguggaggauuaaaaacacuaguucuucgugcaguucuaccgagagauaugguauucagaaccucaacuccaagaguaguauuauaa

SEQ ID NO: 9545 - RNA, 1710 nt, Artificial Sequence
  derived and/or modified CDS sequence (opt6) from LASV(Z0947-SLE-2011;Clade IV)__AIT17841__NP
augucagccucaaaagaaauaaaaucauuucuauggacacaaucauuacgucgagaauuaucaggauacugcucaaacauaaaacuacaaguugucaaagacgcacaagcccuacuacacggacuagauuuuagugaaguaagcaacguccaacgauuaaugagaaaagaacgcagagacgacaacgaccuaaaaagacucagagaucuaaaucaagcaguaaacaaccuaguggaacuuaaaagcacccaacaaaaauccauauuaagaguaggaacacuaacaucugaugauuuauuaauacuagcugcagaucuggaaaaguuaaaaucaaaaguaacaagaaccgaaagaccacuaucagccggaguauauaugggaaaucuaucaagucaacaauuagaucaacgaagagcacuacuaaacaugauaggaaugucuggaucaaaucaaggagcaagaaccggaagagacggugucguaagaguaugggacguaaaaaaugcagaacuacuaaauaaccaauuuggaaccaugccaucauuaaccuuagcaugucuaaccaaacaaggacagguugauuuaaaugaugcuguacaagcacuaaccgaccuuggauuaaucuauacagcaaaauauccaaauacuucggacuuagauagacuaacacaaucucacccaauacuaaacaugaucgacacaaaaaaaucaucacuaaacauaucaggauauaauuucucacuaggagcggcaguaaaagccggagcaugcauguuagacggaggaaacaugcuagaaacaaucaaaguaaguccacagacaauggacggaauucuaaaaucaauacucaaaguaaaaaaagcacuaggaauguuuauaucugacgcaccaggagaaagaaauccauacgaaaauauacuauacaaaaucugccuaucaggugacggauggccauacaucgcaucaagaacaucaauaacaggacgagccugggaaaauaccguaguagauuuagaaucagauggaaaaccacaaaaagcuggaucaaacggaucaaauaaaucauuacaaucagcagguuucacagcaggacuuacauacucacaguuaaugacacucaaagaugcuaugcuucaacuagaucccaaugcaaaaacauggauggacauugaaggaagacccgaagaucccguagaaauagcucuauaucaaccaagcucaggauguuacauccacuuuuuuagagaaccaacagacuuaaaacaauucaaacaagacgccaaauacucccacggcaucgauguaacagaucuauuugcagcucaaccaggacuuacaucagcaguaauagaugcauuaccaagaaacaugguaauaacuugccaaggaucagacgacauaagaaaacuauucgaaucucaaggacgaaaagacaucaaguuaauagauauagcacuaucuaagacagauucucgaaaauaugaaaaugcaguaugggaucaauacaaagauuuaugccacaugcauacaggcaucgucguagaaaaaaaaaaaagagguggaaaagaagaaauaacaccucauugcgccuuaauggacugcauaauguuugacgcugccguaucaggaggauuaaauacaaguguauuaagagcaguucuaccacgugacaugguauucagaacaucaacaccaagaguuguuuuauaa

SEQ ID NO: 9546 - RNA, 1710 nt, Artificial Sequence
  derived and/or modified CDS sequence (opt6) from LASV(Z0948-SLE-2011;Clade IV)__AIT17845__NP
augucagcaaguaaagaaauaaaauccuuccuuuggacacaaagccuacgaagagaauuaagcggauauuguaguaacauaaaacuucaaguuguaaaagacgcacaagcucuauuacacggacuagacuucagugaaguaucaaacguacaacgauuaaugagaaaagaacgaagagacgauaacgauuuaaaaagacucagagaccuaaaucaagcuguaaauaacuuaguugaacuaaaaucuacacaacaaaaaucaauauuaagagugggaacacucaccucugacgaucuacuaauacuagcagccgauuuagaaaaauuaaaauccaaaguaacaagaaccgaacgaccauuaagugcuggaguguauaugggcaaccugaguagucaacaauuagaucaacgaagagccuuacuaaacaugauaggaaugucaggaaguaaucaaggagcucaaacaggaagagacggaguaguacgaguaugggaugucaaaaacgcagaauuacuaaacaaccaauucgguacaaugcccagcuuaacucuagcaugccuaacaaaacaaggacaaguugacuuaaacgacgcaguacaagcuuuaacggauuugggauuaauuuauacagcuaaauacccaaauacaucagaucuagacagacuaacacaaucccacccaauauuaaacaugauagauacuaaaaaaucgaguuuaaacauaagcggcuauaauuuuaguuugggugcagccguaaaagcaggcgcgugcaugcuagacggaggaaauaugcuagaaacaauaaaaguuaguccacaaacuauggacggaauacuaaaaucaauuuuaaaagucaaaaaagcauuaggaauguucauaucagaugcaccaggagaaagaaaucccuacgaaaacauacuauacaaaauaugccuaucuggagauggauggccauauauagcaucacgaacaucaauaacaggacgugcuugggaaaacacaguaguagaucuagaaucagauggcaaaccucaaaaagcaggaucgaacgggagcaauaaaucccuacaaucggcaggcuucacagcaggauuaacauacagucaacuaaugacauuaaaagaugccauguuacaacuagaccccaacgccaaaacuuggauggauaucgaaggaagaccagaagacccaguagaaaucgcauuauaucaaccaaguucaggauguuacauccauuuuuucagagaaccaacagauuuaaaacaauuuaaacaagacgcaaaauacagccacggaauagauguaacagaucuauuugcagcacaaccagguuuaacaagugccguaauagaugcauuaccaagaaacaugguaauaaccugucagggaucagacgacauacgaaaacucuuugaaagccaaggaagaaaagacauaaaauuaauagauaucgcacuaaguaaaacagacagcaggaaauacgaaaacgcaguaugggaccaauauaaagacuuaugucauaugcauacaggaauaguaguagaaaaaaaaaaaagaggaggaaaagaagaaauaacaccacauugcgcauuaauggauugcauaauguuugaugcagcuguaaguggcggauuaaacacaucaguacuaagagcaguauuaccaagagauaugguauuuagaacuucaacaccuagaguaguauuauaa

SEQ ID NO: 9547 - RNA, 1710 nt, Artificial Sequence
  derived and/or modified CDS sequence (opt6) from LASV(Z148;Clade IV)__AAT49007__NP
augucugucaguaaagaaauaaaaaguuucuuauggacacaaucacuaagaagagaauuaagcggcuauuguucaaauauuaaacuccaaguagucaaggacgcacaagcacucuuacacggacuagauuuuucagaaguaucaaauguacaaagauuaaugagaaaacaaagaagggacgacaacgauuuaaaaagacuccgagaccuaaaucaagcagucaauaaccuuguagaauuaaaaaguacacaacaaaaaaguguacuuagaguaggaacacugacuagcgaugaucuguuaauauuagcagcagaucuagaaaaauuaaaaaguaagguaacacguacagaaagaccucuaucagcaggaauauacaugggaaaccuaagcucacaacaacuggaucaaagaagggcacuacucaacaugauaggcaugucaggaggcaaucaaggagcacaaacaggaagagauggugucguaagaauaugggauguaaaaaaugcagaguuacuaaauaaucaauuuggaacaaugccaucacuuacccuugcaugucuaacaaagcaaggccaaguagaucucaacgacguaguacaagcauuaacagaucuaggcuuaauauacacagcaaaauauccuaacacaucagacuuagacagacuaacacaaagucacccuauacuuaauaugauagauacaaaaaaaucuagcuuaaauauaucaggauacaauuucuccuuaggagcagcaguaaaagcaggagcuugcaugcuagacggagggaauaugcuagaaaccauaaaagucucuccacaaacaauggacggaauauuaaaaucaauauuaaaaguaaaaaaagcauuaggaauguuuauaucagauaccccaggagaaagaaauccauaugaaaacauauuauacaagauauguuuaucaggagacggauggccauauaucgcauccaggaccaguauaacaggaagagcuugggaaaauacagucguagauuuagaaucaggagaaaaaccacaaaaaauaggcucaaauaacucaaauaaaagccuacaaagcgcaggcuucacagcaggacuaaccuacagccaauuaaugacauuaaaagaugcaauguuacaacuagaccccaaugcaaaaacguggauggauauagaaggaagaccagaagaccccguagagauagcacuauaccaaccaucgagcggauguuacauacauuucuucagagaaccaacagaccuuaaacaauuuaaacaagaugcgaaauauagccacggcauagacguaacagauuuauuugcagcacaaccaggacuaacaagcgcuguuaucgaagcacuuccaagaaacaugguaaugacaugucaaggaagugaugacauaagaaaacuauuagaaagccagggaagaaaagauauaaaacuaauagacauagccuuaagcaaaacagacagucgaaaauacgaaaacgcagugugggaccaauacaaagaccuaugccauaugcauacaggaguaguaguagaaaaaaaaaaaaaaggagggaaagaagaaauaacaccacacugcgcccuaauggauugcauaauguuugaugcagccgcgagcggaggacucaacacacuaguacuacgagcaguauuaccaagagauaugguguuuaggacuucuacacccaaaguaguacuuuga

SEQ ID NO: 9548 - RNA, 1710 nt, Artificial Sequence
  derived and/or modified CDS sequence (opt6) from LASV(Bamba-R114;Clade V)__AHC95554__NP
augucagcauccaaagaagucagaucauuccuauggacacaaagucuacguagagaacuaaguggauauuguucaaacauaaaauuacaaguuguaaaagacgcacaagcauuauuacacggacuugauuuuucagaaguaaguaauguacagcgacuaaugagaaaacaaagacgagacgauggcgaccuaaaaagauuaagagaucuaaaucaagcaguaaauaacuugguagaauuaaaaucaacacaacaaaagucugucuuaagaguaggaacacuaaauagugaugauuuauuaacacuugcagcagauuuagaaaaauuaaaaucaaaaguaaccagaacagaacgcccgcuaucgagcggaguuuauaugggaaacuuaucaagucaacaacuagaucaaagaagagcauuacuaaacaugauuggaaugacaggcggaaaccaaggggcacaagcaggaagagauggaguaguaagaguaugggacguuaaaaaugcugaauuacuaaauaaccaauuuggaacaaugccaucacuaacucuagcaugucuaacaaaacaaggacaaguagacuuaaaugaugucgugcaagcacuaacugaucuaggacucauauacacagcaaaauacccaaauacaucagaccuagacagauuaacacaaagucacccaauacucaacaugauagauacaaaaaaaucaucauuaaauauauccggguauaauuucucacucggagcagcaguaaaagccggcgcauguaugcuugacggggguaauauguuagaaacuaucaaaauaucaccacaauccguagacggaaucuuaaaaucuauauugaaaguaaaacgaucacuggguauguuuguuucagauacaccuggcgaaagaaacccauacgaaaacauuuuauauaaaaucugucucucaggagacggauggccauauauagcaucaagaacaagcauaguaggaagagccugggaaaauacaguaguagaccuagaagcagauggaaaaccacagaaaccaaacucaggaucaucaaauaaaucauuacaaagcgcaggguuuccagcuggacuaacauauagccaacuaaugacacuaaaagaugcaaugcuucaacuagauccaaaugcaaaaacauggauggacauagaaggaagaccagaagauccaguagaagucgcucuauaucaaccuucaaguggauguuacauacauuuuuuuagagaaccaacagaccuaaaacaauucaaacaagaugcaaaauauucacacggaauagacguaacagauuuauuugccgcacaaccaggacucacaagcgcaguuauagaagcauuaccucguaacaugguaauaaccugucaaggaucagaggacauaaaaaaacuauuagaaucacaaggaagaaaagacauaaaacuaauagauaucgcauuaagcaaaaucgauagcagaaaauuugaaaaugcuguaugggaccaauacaaagaucuaugucacaugcacacaggaguaguaguagaaaaaaaaaaaagaggggguaaagaagaaauaacaccacacugugcacuaauggacugcauuauguuugacgcagcaguaucagguggacuaaaugcuaguguacucagagcaguuuuacccagagauaugguauuuagaaccagcaccccaaagguaguacuauag

SEQ ID NO: 9549 - RNA, 1710 nt, Artificial Sequence
  derived and/or modified CDS sequence (opt6) from LASV(Komina-R16;Clade V)__AHC95556__NP
augucagcuaguaaagaagugaaaucauuucuauggacacaaagucuaaggagagaacucagcggcuauugcucuaacauuaaauuacaaguggucaaagacgcucaagcacuauuacauggacuugacuucagcgaaguaaguaauguccaaagauuaaugaggaaacaaagaagagaugauggagaucucaaaagacuaagagauuuaaaucaagcuguaaauaaucuaguagaauuaaaaucaacucaacaaaaaaauguacuaagaguagguacacuaaacucagacgacuuauuaacuuuagcagcagacuuagagaaauuaaaaucaaaaguaacaagaacagaacguccacuuucauccggaguuuacaugggcaacuuaagcagucaacaauuagaucaaagaagagcucuccuaaacaugauaggaaugacaggaggaaaccaaggaacacaaacagguagagacggaguagucagaguaugggacguaaaaaacgcagaauuacucaacaaucaauucggcacaaugccuucacuuacacuagcuugccuaacaaaacaaggacaagcagaucuuaacgacgucguacaagcauuaacagaccugggacuuauauauacagcuaaauauccaaaugcaucagaccuagaccgacuaacacaaucucacccaauauuaaauaugauagauacaaaaaaaucaucauuaaacauaucaggauauaauuucagucuaggagcagcaguaaaagcaggugccuguauguuagacggaggcaauauguuagaaacaauuaaaguuucuccacaaagcauggauggaauauuaaagucaauucuuaaaguaaaaagagcacuuggaauguuuguaagugauacuccaggagaaagaaaucccuaugaaaauauacuauauaaaauaugcuuaucaggagauggauggccuuauauagcaucaagaacaucaauuguaggucgagcaugggaaaauacuguaguagauuuagaagcagacgguaauccgaaaaaacuaaauucuaacggaaguaauaaaucuuugcaaagcgcaggauuuccagcaggccuuaccuacucacaacuaaugacuuuaaaagaugccaugcuacaauuagacccaaaugcaaaaacauggauggacauagaaggucguccagaagauccaguagaagucgcacuauaccaaccaaauagcggauguuacauacacuucuuccgagaaccuacagaccucaaacaguuuaaacaagaugcaaaauauucacacggaauagauguaacggaucuuuuugcugcacaaccaggacuaacaagugcagucaucgaagcucugccacgaaacaugguaauaacuugucaaggcagcgaagauauaagaaaacuacuagaaagucaaggcagaaaagacaucaaacucaucgauauagcacugagcaaaacagauucaagaaaauucgagaaugcagucugggaccaacauaaagauuuaugucacaugcauacaggaguaguaguugaaaaaaaaaaaagagguggaaaagaagagauaacaccacacugcgcacuaauggacugcauaauguucgaugcugcaguaucagguggauuaaacacacuaguauuaagggcagucuuaccaagagacaugguauucaggacaaguacaccaaaaguaguacuauaa

SEQ ID NO: 9550 - RNA, 1710 nt, Artificial Sequence
  derived and/or modified CDS sequence (opt6) from LASV(Ouoma-R123;Clade V)__AHC95558__NP
augagcgcaucaaaagaaguaagaucuuucuuauggacucaaucucuacgaagagaauuaaguggauacugcucaaacauaaaacugcaaguaguaaaagacgcccaagcauuauuacacggucuagauuucucagaaguuucaaauguacaaagacuaaugcgcaaacaaagaagagacgauagugaucuaaaaagacuuagagauuuaaaucaagcaguaaacaaccuagucgaauuaaaaucaacccaacaaaaaucaguacuaaggguaggaaccuuaaguuccgaugaccuacuaacacuagcugcggauuuagaaaaacuaaaaucaaaagugauaagaacagaaagaccacuaucuuccgguguauauaugggaaaucuuucaucacaacaauuagaccaaaggcgagcacuauugaauaugauaggaaugacagggggaaaccaaggagcacaagccggaagagauggaguaguaagaguaugggauguaagaaacgccgaauuauuaaauaaccaauucggaacaaugccaucuuuaacacucgcaugucuaacaaaacaaggacaaguagaccuaaaugacguagugcaagcauuaacagaccuaggacuaauauauaccgcuaaauauccaaauacaucagauuuagauagauuaacucaaaaucauccaauacuaaacaugauagacacaaagaaaucuucgcuaaacauaagugguuauaacuucucacuaggagcugcuguaaaagcaggagcaugcauguuagacggcggaaauauguuagaaaccauaaaaguaagcccacaaucaauagacggcauauuaaaaaguauccuuaaagucaaaagaacauuaggcauguucguaagugauacuccaggagaaagaaauccauacgaaaauauauuauacaaaaucugucuaagcggagauggauggccauacauagcaagcagaacaucaauaguagguagagcgugggaaaacaccguuguagaccuagaaaccgaccgaaaaucucaaggaccaaauaguggaaauucaaacaaaucacuacaaagcgcgggauucucagcaggacucacguauucacaauuaaugacauuaaaagaugcaaugcugcaacuagauccaaacgcuaaaacauggauggauauagaaggucguccagaagauccaguagagguugcauuauaucaaccaauaaguggauguuacauacacuucuuuagagaaccaacagaccuaaaacaauuuaaacaagaugcaaaauacagucacggaauugauauuacagaccuuuuugcagcacaaccugguuuaacaucagcaguaauagaagcacucccuagaaacaugguuauaacgugucaagguagcgaagauauaaagaaacuucuagaaucucaaggacgcaaagauauaaaauuaauagauaucgcccuaucaaaaauugauaguagaaaauuugaaaaugcagugugggaucaauacaaagaucuaugucacaugcauacaggaguaguaguagagaaaaagaaacggggaggaaaagaagaaauaaccccacauugcgcauuaauggauuguauaauguucgaugcagcagucaguggaggauuaaaugcaucaguuuuacgcgcgguauuaccaagagacaugguauucagaacaucaacaccaaaaguaguauuauaa

SEQ ID NO: 9551 - RNA, 1710 nt, Artificial Sequence
  derived and/or modified CDS sequence (opt6) from LASV(Soromba-R;Clade V)__AHC95552__NP
augucagcaagcaaagaaguaaaaucuuuucuauggacacaaucccuaagaagagaacuuagcgguuacuguagcaacauaaaauuacagguagugaaagaugcacaagcauuacuacacggacucgauuuuagcgaaguaaguaacguacaacgauuaaugcgaaaacaaagaagagaugauggugacuuaaaaagacuaagagacuuaaaccaagcuguaaacaacuuaguagaauuaaaauccacacaacaaaaaaacgucuuaagaguaggaacacucaacucagacgaccuacuaacacuagccgccgacuuagaaaaguuaaaauccaaaguaacaagaacggaacgaccccuaucaucuggaguauacaugggaaauuuaucaagucagcaacuagaccaacgacgagcacuguuaaacaugaucggaaugacaggaggaaaccagggcacacaagcaggcagagauggagucguaagaguaugggauguaaaaaaugcagaacucuuaaacaaucaauuuggaacaaugccaucacuaacauuagccugcuuaacaaaacaaggacaagcagauuuaaacgacguaguacaggcacuaacagacuuaggacuaauauacacagcaaaauauccaaacgcaucagacuuagacagauuaacacaaagucacccuauauuaaacaugauagacacaaaaaaaaguagcuuaaacauaagcggauacaacuuuucauugggagcagcaguaaaagccggagcauguauguuagacggcggaaauauguuggaaacaauaaaaguaagcccacagaguauggacggaauccuaaaaaguauauuaaaagucaaaagagcauuaggaauguucguaucagauaccccaggcgaaagaaauccauacgaaaauauacuauacaaaauauguuuaaguggcgauggauggccguauauugcaucuagaacaaguauaguaggaagagcaugggaaaacacuguuguagaccuugaagcagacggaaacccuaaaaaacuaaacucaaacggaucuaacaaaucacuucaaagugcaggauucccagcaggauuaacauacagucaauuaaugacauuaaaagacgccauguuacaguuagacccaaaugcaaaaacauggauggauauagaaggaagaccagaagacccagucgaaguagcauuauaccaaccaaacaguggaugcuauauacauuuuuuuagagaaccaacagacuuaaaacaauuuaaacaagaugcaaaauacagccauggaauagacguaacugaccuauucgcugcacaaccuggacuaacuucagcaguuauagaagcauuacccagaaacauggucauuacaugucaaggauccgaagauauaagaaaacuauuagaaucacaaggaagaaaagacauaaaacuaauagacauagcucucaguaaaacagacucaagaaaauuugaaaaugcgguaugggaucaauacaaagaccuaugccauaugcauacaggaguaguagucgaaaaaaaaaagagaggaggaaaagaagaaauaacaccucauugugcacuaauggacugcauaauguucgaugcagcaguuucaggagguuuaaacacccuaguacuuagggcuguauuaccaagagacaugguauucagaacgaguacaccaagaguaguacuauaa

SEQ ID NO: 9552 - RNA, 1710 nt, Artificial Sequence
  derived and/or modified CDS sequence (opt6) from LASV(Soromba-R30;Clade V)__AHC95560__NP
augagcgcaucaaaagaaguaaaaucuuucuuauggacacaaucccuacgaagagaauuaucaggauauugcucuaauauuaaacuacaaguuguaaaagacgcacaagcacuacuacacggacuagauuucagugaaguaaguaauguacaaagacuaaugagaaaacaaagacgugacgacggagaccuaaaaagacuaagagauuuaaaucaagcagucaacaaccuuguagaacuaaaaucaacccaacaaaaaaacguccuuagagucggaacacuaaacucggacgauuuacuaacauuagcagcagaccuagaaaaauugaaauccaaaguaacaagaacagaaagaccuuuaucuagcggagucuauauggguaauuuaucaagucaacaauuagaucaaagaagagcacuucuaaauaugauaggaaugaguggcgguaaccaaggaacccaagugggaagagacggaguaguaagagucugggauguaaaaaacgcagaguuacuaaauaaucaguucggaacaaugccaucacuaaccuuagccugccuaacaaaacaaggccaagcggaccuaaacgauguaguacaggcgcuaacggacuuagguuuaauuuauacagcaaaauauccaaaugcaagugaccuugacagacucacacaaagucauccaauauuaaacaugauagacaccaaaaaaaguagccuuaauauaucaggauacaauuucagucuaggagcagcuguaaaagcaggagccugcauguuagacggaggaaauauguuagaaacaauaaaaguaucaccacaaucaauggacggaaucuuaaaaaguauauuaaaaguaaaacgagcauuaggaauguucguaucagauacaccaggagaaagaaacccauaugaaaauauauuauacaaaaucugccucagcggagacggauggccauacauagcaaguagaacauccauagucggacgugcaugggaaaacaccgugguagaccuugaagcagacggaaacccaaaaaaacuuaauagcaauggaagcaauaaaucauuacaaagugccggauuuccagcaggacucacauauagucaacuaaugacacuaaaagaugcaauguuacaacucgauccaaaugccaaaacauggauggauauagaaggaagaccagaagaucccguagaaguagcacuauaccaaccuaauucaggcuguuauauccauuuuuucagagaaccaacagaucuaaaacaauuuaaacaagacgcaaaauauagccauggaauagacguuacagacuuauuugcagcucaaccagguuuaacaagugcagucauugaagcauuaccaagaaacaugguaauaacaugucaaggcagugaagauauaaggaaguuauuagaaagccaaggaagaaaagacauaaaauuaauagauauagcacuaucuaaaacagacagcagaaaauuugaaaacgccguaugggaucaacacaaagacuuaugucauaugcauacaggaguaguuguugaaaaaaaaaaacgaggaggaaaagaagaaauaacaccacacugugcauuaauggauugcauaauguuugaugcugcaguaagcggaggucuaaacacacuaguauuaagagcuguauuaccccgagacauggucuucagaacaaguacaccaaaaguaguacuauaa

SEQ ID NO: 9553 - RNA, 1710 nt, Artificial Sequence
  derived and/or modified CDS sequence (opt6) from LASV(Alzey;Clade VI)__SCA79106__NP
augaguaauucaaaagaaguaaaaucauuucuauggacccaaagucuaagacgagaacuaagcggauauugcucaaauaucaaacuccaaguaguaaaagaugcacaagcauuacuccacggcuuagauuuuucagaagugucaaacguucaaagauuaaugagaaaacaaaaaagagacgauggagauuuaaaaagacuccgagauuuaaaucaagcaguuaauaaucuaguggaacucaagucaguacaacaaaagucaauauuacgaguaggaacauuaacaucagaugaccuuuuaacuuuagcagcagaucuagaaaaauuaaaaucaaaaguaacgcggacagaacgaccgcugucaucagguguauacaugggaaaccuuucaagucagcaacuagaccaaagaagagcacuauuaucuaugaucgguaugagcggaggaaaucaaaauucacaaccaaaaggugacgggguaguaagaguaugggacgucaaaaaugcugacuuauuaaauaaccaauucggaacaaugccaagccuaacacuggcuugccuaacaaaacaaggacaaguagacuugaacgacgccguacaagcauuaacugaucuuggauuaauauauacagcaaaauauccaaauagcagcgaccuugaucgccuaagucaaucacacccaauauugaauaugauagacacaaaaaaaagcucacugaauauaaguggauacaauuuuuccuuaggagcagcaaucaaaaccggagcauguaugcuagacggaggaaacauguuagaaacaauaaaaguaacaccacaaacaauggacggaauacuaaaaucuauauuaaagguaaaaaggucacuaggaauguucauaucggauacaccaggagaaagaaauccauacgaaaauaucuuauacaaaaucugucuaucaggagauggauggccauauauugcaucaagaaccgcaauaauagguagagcaugggaaaauacaguggucgaucuugaaucagauaguaaaccacaaaaaauaggaucuaacggaucaaauaaauccuuacaauccgcuggauuugccccaggauuaacauauucacaacuaaugacucuaaaagauucaaugcuucaacuagaccccaacgcaaaaacauggauugauauagaaggacgaccagaagacccagucgaaguagcguuauuucaaccaauaaguggaugcuauauacacuuuuucagagagccaacagacuuaaaacaauucaaacaagaugcaaaauauucacacgguauagacguuacagacuuauuugcagcacaaccaggacuaacuucagcaguaauagaagcauuaccaagaaacaugguacuaacaugucaaggaucugaugacauaaaaaaacuucuagacucccaaggaagacgagacauaaaacuaauagauguauccuuaaauaaaauagauagcagaaaauuugaaaaugcuguuugggaucaauauaaagacuuaugccacaugcacacaggagucguagucgaaaaaaaaaaaaaaggaggcaaagaagaaauaacaccacauugugcuuuacuagauugcauuauguuugacgcagcagucagcgguggauuaaacgcaacgguacuaagagccguacucccaagggauaugguauucagaacaaguucaccaaaaguaguacuuuaa

SEQ ID NO: 9554 - RNA, 1710 nt, Artificial Sequence
  derived and/or modified CDS sequence (opt6) from LASV(NIGERIA IKEJI;Clade II)__AMZ00372__NP
augaguguaucaaaagaaguaaaaucauucuuauggacgcaaucuuuaaggcgagaacuaucuggauacugcuccaacaucaaacuccaaguaguaaaagaugcucaagcuuuacuacauggucuagacuuuagugaaguaaguaauguccagagauuaaugagaaaacaaaaaagagaugauaacgaucuuaaaagauuaagagaucuaaaucaagcaguaaacaacuuaguagaguuaaaaucaguacaacaaaaaucaauauuaagaguagguacacuaacauccgaugacuuacuuacacuugccgcagauuuagaaaaauuaaaaagcaaaguaauuagaacagagagaccauuauccagcggagucuauaugggaaauuuauccucucaacaacuagaacagagaaaagcacuuuuaacaaugauaggaaugacaggaggcucacaaucugcacaaccugguagagacggagucgugcgaguaugggauguaaaaaauagugaucuccuaaauaaucaauuuggaacaaugccaucccuaacauuagcaugccuaacaaaacaaggacaaguagacuuaaacgaugcaguacuagcauuaacagaccuaggauuaauuuauacagcaaaauacccuaauacaagugaucuggacagacuuagccaaagucacccaauauuaaauaugguagauacaaaaaaaucaagccuaaacauauccggauacaauuucucacuuggugcagcagucaaagcaggagcuugcaugcuugaugguggaaacauguuagaaacuauaaagguaacuccacagaccauggacggaauauuaaaaaguauauuaaaaguaaaaagagcuuuaggaauguuuguaucagauaccccaggagaaagaaauccauaugaaaauauucuauacaagauuuguuuaucaggcgauggauggccauauauagccaguagaacaucaauaguaggaagggcaugggaaaacaccauaguagauuuagaaucagacucaaaaccacaaaaaguaggugccauaggaucuaauaaaucauuacaaagcgcaggauuuccugcaggacugacauauucacaacuaaugacauuaaaagauucuaugaugcagcuagauccaucagcaaaaacauggauagauauagaagguagaccagaagauccuguagaaauagcucuauaucaaccaauaagcggauguuacauacauuucuuuagagaaccaacagacuuaaaacaauuuaaacaagacgcaaaauauucacacggcauagacguagccgaccucuuuagugcacaacccggacuaacaucugcaguaauagaagcauuaccaagaaauaugguauugacaugccaaggaucagacgacauuaaaaaauuacuagacagucaaggacgcagagauauuaaacuaauagauaucagucuaaauaaagcagacagucgaagauuugaaaacgcaguaugggaccaaugcaaagaucuaugucacaugcacacgggaguaguugucgaaaaaaaaaaaagaggaggaaaagaagaaauaacaccacauugugcacuaauggacuguauaauguuugacgcagcaguuaguggaggauuaaacauaccaaccuuaagagcaguacuaccuagagacaugguauucagaacaucaagcccaaaaguaguacuauaa

SEQ ID NO: 9555 - RNA, 1710 nt, Artificial Sequence
  derived and/or modified CDS sequence (opt11) from LASV(Josiah;Clade IV)__NP_694869__NP
augucagccagcaaagaaauaaaaucauuccucuggacacaaucacuccgccgcgaacucucaggguauugcucaaacauaaaacuccaaguagucaaagacgcccaagcccuccuacacggacuagacuucucagaaguaagcaacguccaacgccuaaugagaaaagaacgcagagacgacaacgaccucaagaggcucagagaccuuaaccaagcggucaacaaccuugucgaacucaaaagcacacaacagaaauccauacuacgagucggcacacuaaccagcgacgaccuccugauccucgcagccgaccucgagaaacuaaaaagcaaagucauccgaacagaaaggccccucuccgccggagucuacaugggaaaccuaagcucccaacaacucgaccaacggcgagcccuccucaacaugaucgggaugucgggcggcaaucagggcgcccgcgccggccgggacggcgucguacgagucugggacgucaaaaacgcagaacuccuuaacaaccaguucggcaccaugcccagccuaacacucgccugccugaccaaacaaggccaaguggaccucaacgacgcagugcaagcccucaccgaccuaggccugaucuacaccgcgaaauacccaaacaccuccgaccuagaccgccugacacaaucgcaccccauacucaacaugaucgacaccaaaaaaucuucgcuaaacaucucaggauacaacuucucccucggagccgcggucaaagcaggagccugcaugcuggacggcggaaauaugcuggaaaccauaaaaguaagcccccagaccauggacggcauccugaaaucaauccugaaagucaaaaaagcccuuggcauguucaucagcgauaccccgggcgaacgcaauccauacgaaaacauccuguacaaaauaugcuuaucaggcgacggcuggcccuacaucgcauccagaacuucgaucacaggccgagcaugggaaaacaccgucgucgaccuagaauccgacggcaaaccucaaaaagcggacagcaacaacucauccaaaagccuacaaucggcaggcuucaccgccggccucacguacucccaacucaugacccucaaagacgccaugcuacagcuagacccaaacgcaaaaaccuggauggacaucgaaggccggcccgaagaccccgucgaaaucgcucucuaccaaccaagcagcgguugcuacauacacuucuucagggaacccaccgaccucaagcaauucaaacaagacgcuaaauacucccacggaaucgacgugaccgaccucuucgcgacacagcccggccucaccagcgcaguaauugacgcacugccaagaaacaugguaauaacaugccaaggaagcgacgacauacgaaaacuccucgaaucacaaggacgcaaagacaucaaacucaucgacaucgcgcucuccaaaacggacagccgcaaauaugagaaugccguaugggaccaauacaaagaccucugccacaugcacaccggaguaguaguagaaaaaaaaaaaagaggagggaaagaagagauaaccccccacugcgccuuaauggauugcaucauguucgaugcagcagugagcggcggccucaacaccuccguccuccgagcaguccuuccgcgcgacaugguauucagaaccuccacaccaagagucguacucuaa

SEQ ID NO: 9556 - RNA, 1710 nt, Artificial Sequence
  derived and/or modified CDS sequence (opt11) from LASV(LP;Clade I)__AAF86702__NP
augucaaacuccaaagaaaucaaauccuuccucuggacccaaucacuccgccgcgaacuauccggauacugcucaaacaucaaacuucaaguaguaaaagaugcacaagcccuccuacacggccucgacuuuucagagguaucaaacguccaacgacucaugcguaaacaaaaacgagacgacgcugaccuuaaacgauuacgcgaccuaaaccaagccgugaacaaccuugucgaacucaaauccacccaacagaaaaacguccuccgcguaggcacccucagcuccgacgaccucaucacucucgcugccgaccucgaaaaacuaaaauccaaaguaauccgaaccgaacggccccucuccagcggcguauacaugggcaaccugucaagucaacagcucgaccaacgcagagcccucuugucgaugaucggaauguccggaggaccccaaggcaacagaaccggcggcgacggcguaguacgugucugggacgugaaaaacgccgaacuacuuaacaaccaguuugggacgaugcccagccucacccucgccugccucaccaaacaaggccaagucgaccucaacgacgccguccaagcacucacagaccuuggacucaucuacaccgcaaaguaccccaacuccucggaccuugacaugcugacacaaucacacccaauacugggcaugguugauaccaagaaaagcagccuaaauaucucagguuacaacuucucgcucggagccgcagucaaagccggagccugcaugcucgacggaggcaauaugcuagaaaccauaaaagucucaccccaaacuauggacggcauccucaaaucaauccucaaagucaaaagaucccuuggcauguucaucuccgacacccccggugaacgaaacccuuacgaaaacauacucuacaaaaucugccuauccggcgaaggauggccuuacaucgccagucgcaccuccaucaccggccgcgccugggaaaacacccuagucgaucuugaauccgacaacaaacccccuaaacuaaacucggccggcagcaacaaaucccuccaagccgccggacuaaacgccggacucaccuacagccaacucaugacccuaaaagauugcaugcuccaacucgacccaucaucuaagacauggauagacaucgaaggacgccccgaagacccagucgagaucgcccucuuccaacccuccucaggcugcuacauccacuucuuccgcgaacccaccgaccuaaagcaauucaaacaagacgcaaaauauucacacgguauagacgucacagaccuauucucgacccaaccaggccugaccucugcggucauagaagcacuccccagaaacaugguccuaaccugccaaggcucagacgacauuaagaaacuacucgaaagccaaggccgccgcgauaucaaacuaaucgacaucucccuauccaaagccgacucacgaaaauucgaaaacgcagucugggaccaguacaaagaccugugccauaugcacacaggcgucguagucgaaaagaagaaacgcggaggaaaagaagaaauuacaccccacugcgcccuacucgacugcaucauguucgacgccgccaccacuggcucccuaaacaucaccacccuccgagccguacuaccccgcgacaugguauuccgaaccuccacccccaaagucguacuuuaa

SEQ ID NO: 9557 - RNA, 1710 nt, Artificial Sequence
  derived and/or modified CDS sequence (opt11) from LASV(803213;Clade II)__AAF86704__NP
auguccgcaagcaaagaagucaaaucauuccucuggacccaaucacuccgccgagaacucucgggcuacugcucaaacaucaaacuacaagucguaaaagacgcccaagcccuccuccacggucucgacuucuccgaagucaacaacguacagcgccucaugcgaaaacaaaaacgcgacgacggcgaccuuaaacgacuacgagaccuaaaccaagccguaaacaaccucgucgaacugaaauccacccaacaaaaaucaauccugcgaguugguacccucacauccgacgaccuccuaacacuagcagccgaccucgaaaaacucaaguccaaagucauacgcaccgaacgcccacucaguuccggcguauacaugggcaaccucucuacccaacaacucgaacaacgccgcgcgcuccuaaauaugaucgguaugguagguggagcccaaggcacccaaccaggccgcgacggcgugguacgcgucugggacgugaaaaaccccgaucucuuaaacaaucaauucggcacaaugcccucccucacacuagcaugccugaccaaacaaggacaagucgaccuaaaugacgccguccuagcucuuacagaccuaggacucaucuauaccgccaaauacccuaacuccuccgaccucgaccgacucucacaaucucacccaauccuaaacauggucgacaccaagaaauccucccucaacaucucgggauacaacuucagccucggcgccgccgucaaagcaggcgccugcaugcuagacggcggcaacaugcucgaaaccaucaaaguaacgccccaaaccauggacggcauccucaaauccauccucaaggucaaaagaagccucggcauguucguuucggacacucccggcgaacgcaaccccuacgaaaacauccuauacaaaaucugccuaucaggcgacggcuggcccuacauagcaucacgaaccaguaucguaggccgagcaugggaaaauaccacaguagaccucgaguccgacggaaaaccucaaaaagucggcacugccggaucaaacaaaucccuccaaagcgccggcuucccaaccggccuuaccuauucccaacuaaugacccucaaagauuccaugaugcaauuagaccccuccgccaagacauggaucgacaucgaaggccgucccgaagacccaguagaaaucgcccucuaccaacccaugagcggaugcuacauucacuuuuucagagaacccaccgaccucaaacaauucaaacaagacgccaaguacucccaugggauagacgucgccgaccucuuccccgcccaacccggccucaccucggccguaauagaggcccuaccaagaaacaugguccuaaccugccaagguuccgacgacaucaagaaacuccucgacucacaaggcagacgcgacaucaaacuaaucgacaucucccucuccaaagucgacucacgaaaauucgaaaacgccgucugggaucagugcaaagaccucugccacaugcacacaggcgucgucgucgaaaagaagaaacgaggcggaaaagaagaaauaacaccacacugcgcccucauggauugcaucauguucgacgccgccguaucuggcgggcuaaacauuccaguccugcgagccguccucccccgcgacaugguauuccgcaccuccuccccaaaagucguccucuga

SEQ ID NO: 9558 - RNA, 1713 nt, Artificial Sequence
  derived and/or modified CDS sequence (opt11) from LASV(GA391;Clade III)__CAA36646__NP
auguccgcaagcaaagaagugagauccuuccucuggacccaaucgcuccgccgcgagcucucaggcuacugcucgaacaucaaauuacaagucgucaaagacgcacaagcccuccuacacggacucgacuucucagaaguguccaacguccaacgacugaugaggaaacaaaagagagacgacggcgaccuaaaacgacuacgcgaccuaaaccaagccgucaacaaccuagucgaacuaaaauccacacaacaaaaaucaguccuucgcguaggaacccuaucaucagacgaccuccucauccucgcagccgaccuagaaaaacugaaaucaaaaguaacacgaaccgaacggccacucuccagcgggguauacauggggaaccucuccucccaacaacuugaccaaagacgcgcucuccuuaacaugaucggcaugacaggcgugagcggagguggcaaaggcgcaucggacgggaucguccgcguaugggacgucaaaaacgccgaacuacucaacaaccaauucggaaccaugccaucccucacacucgccugccucaccaagcaaggacaaguggaccuaaacgacgccguccaagcccucaccgaccucggccucaucuacaccgcgaaauacccaaacagcucggauuuggaccgacuaucccaaucccacccaauacuaaacaugaucgacaccaagaaauccagucuaaacaucuccggcuacaacuucucccucggagccgcggucaaagccggcgccuguaugcuggacggcggcaacaugcuagaaaccaucaaagucucuccccaaaccauggacgguauccucaaauccauccugaaagucaagaaaagccucggcauguucgucucagacacaccgggagaacgcaaccccuacgaaaacauccuguacaaaaucugucucucaggcgacggcuggcccuacaucgccagccggaccagcaucguaggcagagccugggaaaacaccguaguagaccucgaacaagacaacaaaccccagaaaauaggaaacggcggcucaaacaaaucacuccaaagcgccggauucgccgccggacugaccuacagccaacuaaugacccuaaaagacuucaaaugcuucaaccucauacccaaugccaaaacauggauggacauagaaggacgacccgaagacccaguagagaucgcccucuaucaaccuuccucaggauguuacguccacuucuucagagagcccaccgaccugaaacaguucaaacaagacgccaaauacucacacggcaucgacgucacagaccuauucgccgcccaacccggccugaccuccgccgucaucgaagcccucccacgcaacauggucauaacaugccaaggcuccgaagacaucagaaaacuacucgaaucccaaggccgccgcgacauuaagcuaauagacauaacccuauccaaagccgauagccguaaauucgaaaacgcagucugggaccaauuuaaagaccuaugccacaugcacaccggcgucgucguggaaaagaagaaacgaggcggcaaagaagaaaucacaccccacugcgcccucauggacugcaucauguucgacgccgccguuucgggcggccucgacgccaaaguccuacgcgucguccuaccccgagacauggucuuccgcaccagcacgcccaaaguaguccucuaa

SEQ ID NO: 9559 - RNA, 1710 nt, Artificial Sequence
  derived and/or modified CDS sequence (opt11) from LASV(AV;Clade V)__CCA30315__NP
augagcgcauccaaagaagucaaaagcuuccucuggacacaaucccuacggcgcgaacuauccggcuacugcucuaacaucaaacuccaagucguuaaagacgcccaagcccuccuccacggacucgacuucuccgaaguuuccaacguacaaagacuuaugcgaaaacagcgccgcgacgacucagaccuaaaacgacugcgcgaccuaaaccaagcaguaaacaaucucgucgaacucaaaagcacccaacaaaaaucaguucuccgcgucggcacucucuccuccgacgaccuccucacccuagccgcugaccuagaaaaacugaaauccaaagucaccagaaccgaacgaccccucuccucaggcgucuacaugggaaaccucaguucacaacaacucgaccaacgccgagcccuccuaaaccugaucggaaugacaaacggaagccaaggcucacaagcaggcagagacggcgucgugcgcgucugggacgucaaaaacgcggaacuccuaaacaaccaauucggcaccaugcccucacugacccucgcuugccuuaccaaacaaggccaaguagaccucaacgacguuguccaagcacuuaccgaccuaggacugauauacacugccaaauaccccaacaccuccgaccucgaccgccuaacccaaagccaccccauucuaaacaugaucgacacgaaaaaauccucauuaaacaucuccggauacaacuucucacugggagcagcaguaaaagcaggggcauguaugcucgacggcggaaacaugcucgaaaccaucaaggucagcccccaaagcauggacggcauucuaaaaucaauccuaaaaguaaaacgcgcccuaggaauguucguauccgacacccccggcgaacgcaaccccuacgaaaacauacucuauaaaaucugccuaucaggcgacggcuggcccuacauagccucccgcaccucgaucgucggcagagccugggaaaacaccguagucgaccucgaaaccgacggaaaaccacaaaaaauaggcuccggaaacagcaacaaaucucuccaaagcgcaggauucuccgccggccugaccuacagccaacucaugacccucaaagacgccaugcuccaacucgacccuaacgcaaaaaccuggauggacaucgaaggacgccccgaagaccccguagaagucgcccuauaccagccuaucuccggcuguuacauccacuucuuccgcgaacccacagaccuaaagcaauucaaacaagacgccaaauacagccacggcaucgacauagccgaccucuucgccgcucaaccuggccuaaccucugccgucaucgaagcccucccacgcaacauggucaucacaugccaaggcagcgaggacaucaaaaaacuccuagaaucccaaggccguaaagacaucaaacugauagacaucgcacuauccaaaaucgacucccggaaauucgaaaacgcggucugggaccaguauaaagaccucugccauaugcacacuggagucgucguagaaaaaaaaaaaagaggcggaaaagaagaaaucacgccacacugcgcccuuauggacugcauaauguucgacgcagcugucagcggcggccucaacacucucguccucagagccguccucccccgagauauggucuuccgcaccucaacaccccgcguaguccucuaa

SEQ ID NO: 9560 - RNA, 1710 nt, Artificial Sequence
  derived and/or modified CDS sequence (opt11) from LASV(Togo/2016/7082;Clade VI)__AMR44578__NP
auguccaacucuaaagaagucaaaucauuccucuggacccaaucacuccgccgcgaacucuccgguuacugcuccaauauaaaacugcaaguagucaaagacgcacaagcucuccuccacggccucgauuuuuccgaaguguccaacguccaacgacucaugagaaaacaaaaacgagacgacggcgaccucaaacgacugcgcgaccuaaaccaagccgucaacaaccuugucgaacuaaaaucaguccagcagaaaucaauucugcgcgucggcacacucacuuccgacgaccuacucacccuagcagccgaucucgaaaaacuuaaaucaaaagucacucguaccgaacgcccacuauccagcggcgucuacauggggaaccucagcucacaacaacucgaccaaagacgagcauuacucuccaugauaggaaugucaggcggcaaccaaaacucacaacccaaaggcgacggggucguccgcgucugggacgucaaaaacgccgaccuucucaauaaccaauucggcacaaugcccucacucacccucgcaugccuaaccaagcagggucaagucgaucucaacgacgccguccaggcacuaacagaccuaggacucaucuacaccgccaaauaccccaacuccucugaccucgaccgccucucacaaucacaccccauccugaacaugaucgacaccaagaaaucaagccucaacauuuccggcuacaacuuuucucuaggugcggccaucaaaacaggcgccuguaugcucgacggcggcaacaugcucgaaaccaucaaaguaacaccccaaaccauggacggcauacucaaauccauccucaaaguaaaacgaucccuagggauguuuaucuccgacacacccggcgaacgcaaccccuacgaaaauauccuauacaaaaucugccuaucuggcgacggauggccauacaucgccucacgaaccgccaucauaggccgggccugggaaaacaccguagucgaccucgaauccgacagcaaaccccagaaaauaggcucuaacggauccaacaaaucacuacaauccgcaggcuucgccccaggccucaccuauagccaacuaaugacccucaaagacagcaugcuccaacuugacccaaacgccaaaacauggaucgacaucgaaggacgcccagaagacccaguagaagucgcccucuuccaacccauaucgggcugcuacauccacuucuuccgcgagccaacagaccucaaacaauucaagcaagacgccaaauacucccacggaauagacgucaccgaccuauucgcagcacaacccggucucacauccgccguuaucgaggcccucccccggaacaugguccugaccugccaaggauccgacgacaucaagaaacuccucgacagucaaggacguagagacauaaaacuuauagacgucucccuaaacaaaaucgacagccgcaaauucgaaaacgcagucugggaccaauacaaggaccuaugccauaugcacaccggcgucgucgucgaaaagaaaaagaaaggcggcaaagaagaaaucacgccccacugcgcccuacuagacugcaucauguucgacgcugccgucucgggaggccucaacgcaaccguacuccgugccguacucccccgcgacaugguauuccggaccucuuccccaaaagucgucuuauaa

SEQ ID NO: 9561 - RNA, 1710 nt, Artificial Sequence
  derived and/or modified CDS sequence (opt11) from LASV(KAK-428;Clade n.d. (VII))__ANH09741__NP
augagcaacucaaaagaagucaaaucauuccucuggacccaaucacuccgcagagaauuauccggcuacugcaccaacaucaaacuccaaguagucaaagacgcccaagcccuacuacacggucucgacuucuccgaagucagcaauguccaacgacucaugcgaaaacaaaaacgugacgacaacgacuuaaaaagacucagagaccugaaccaagccguaaacaaccuagucgaacucaaaucgguccaacaaaaauccgugcuaaaagugggcacccucaacucagacgaccuuuuaacacucgccgccgaccucgaaaaacugaaaucgaaagucguccgaaccgaacgcccccucuccuccggcguauacaugggcaaccuauccucacaacaacucgaccaacgccgugcgcuccuaaacaugaucgguauggccggaggcagccaaggcaaccaacccucccgagauggagucgugcgagucugggacgucaaaaacgccgaccuucucaacaaccaauucgguacaaugccaucacucacgcuagccugccuaaccaaacagggacaaguagaccucaacgacgucguccuagcccuuacagaccuaggccugauauacaccgccaaauacccaaacuccuccgaccucgaccgcuuaagccaaaaccacccaguacuaaacaugaucgacgucaacaaaucaucccucaacauauccggcuacaacuucagccucggcgcagccgucaaggccggugcaugcaugcucgacggcggaaacaugcuagaaacuaucaaaaucagcccccaaaccguagacggcauacuaaaauccauacucaaagugaaacgugcacuaggcauguucguauccgacaccccaggagaacgaaaccccuacgaaaacauccuuuacaaagucugccuaucaggaaacggcuggcccuacaucgcaagccgcacaucaaucgucggcagagccugggaaaacaccguagucgaucuagagucgaacaaaaaccaaccuaaagucgguaauaacggauccaacaagaugcuucaauccuccggcuucgccaccggccucaccuacucccaacucaugacacuacgggacuccaugcuccaacucgaccccaccgcaaaaaccuggauugacaucgaaggccgccccgaagacccuguugagcucgcacuauuccaaccauccuccggcugcuacauacacuucuuccgcgaaccuacagaccucaagcaauucaaacaggaugccaaauacagccacggcaucgacgugaacgaccuauucucggcccaacccggccuaaccagugccguccuagaagcccucccacgcaacaugguccuaaccugccaagggagcgacgacauccgcaaacuccucgacucacaagaccgcaaagacauaaaacucaucgacaucucccucagcaaggccgacgcccgcaaauucgaaaacgacguaugggaccaauucaaagaccucugccacaugcacaccggcaucguaguagaaaagaagaagaaaggcggaaaacaagaaaugaccccucauugcgcccuccuagacugcaucauguucgacgcagcugugagcggcggccucaacguccccacccucagagcaguccuaccaacagacauggucuuccgcaccauaaccacaaaaguaguacuauaa

SEQ ID NO: 9562 - RNA, 1710 nt, Artificial Sequence
  derived and/or modified CDS sequence (opt11) from LASV(Pinneo-NIG-1969;Clade I)__AIT17837__NP
auguccaauuccaaagaaaucaaauccuuccucuggacacaaucacuccgccgagaacucucaggauacugcucaaacaucaaacuacaaguagugaaagacgcacaagcccuucugcacggucucgauuucucagaagucuccaacguacaacgccucaugagaaaacaaaaacgcgacgacgcagaccucaaacgacuccgagaccuaaaccaagccgucaacaaccucgucgagcucaaauccacccaacagaaaaacguacuccgagucggaacccucagcucagacgaccucaucacgcuagcggcagaccucgaaaaacuuaaaagcaaagucauccgcacagagcgcccacuauccuccggagucuacauggggaaccucuccucccaacaacucgaccaacgccgcgcccuccucucuaugaucgguauguccggcggcccacaaggaaaucgcaccggcggagacggaguaguacgcguaugggacgucaaaaacgcagaacuccuuaacaaccaauucggaacaaugccaucccugacccuggcaugccuaacaaaacaaggccaaguagaccuaaacgacgcaguacaagcucucacagaccuaggccucaucuacaccgcaaaauaccccaacucguccgaccucgacaugcuuacccaaucccacccaauccucggaaugguagacacgaaaaagagcucccuaaacaucagcggauauaacuucucgcugggcgccgcggucaaagcgggcgccugcaugcuggacggcggaaacauguuagaaaccaucaaggucucgccccagacaauggacgggauacuaaaauccauucuuaaagucaaacgcucucuaggcauguucaucuccgacacccccggcgaacgcaacccauacgaaaauauacuauacaaaaucugucucagcggugaaggcuggcccuacauagccagcagaaccagcaucaccggacgcgcgugggaaaacacacucgucgaccucgaaucagacaacaagccacccaagcucaacucagcaggguccaacaaaucacuacaagcagccggccucaacgccggccuaaccuacucccaacuaaugacccucaaagacugcaugcuccaacuugaccccagcuccaaaaccuggaucgacaucgaaggacgccccgaggacccagucgaaauagcccuauuccaacccuccagcggaugcuacauacacuucuucagagaaccaacagaccucaaacaauucaagcaagacgccaaauauucucacggcaucgacgugaccgaccucuucuccacacagcccgggcucaccagugcagucauagaagcccucccacgaaacaugguacucacaugccagggaagcgacgacauaaagaaacuccucgaaagccaagguagacgggacaucaaacucauagacaucucccucuccaaagcagauucacgcaaauucgaaaacgccgucugggaccaauacaaagaccuuugccacaugcacaccggagucguagucgaaaagaagaaacgagguggaaaagaagaaaucacaccccacugcgcccuacuagacugcauaauguucgacgccgcaaccacaggaagccuaaacaucaccacacucagggccguccuaccccgcgacaugguguucagaacuagcacacccaaagucguauuauag

SEQ ID NO: 9563 - RNA, 1710 nt, Artificial Sequence
  derived and/or modified CDS sequence (opt11) from LASV(ISTH0009-NIG-2011;Clade II)__AIT17405__NP
augucagucuccaaagaagucaaaucauuccucuggacccaaucccugcgacgggaacucagcggcuacugcuccaacaucaaacugcaagucgucaaagacgcccaagcacuacuccacggccuagauuucucagaaguaagcaacguccaacgacucaugcguaaacaaaaacgcgaugacucagaccuaaagcgacuacgagaccugaaccaagcaguaaacaaccucgucgaacucaagucuacccaacagaaaagcauacuccgagucggcacccucacuuccgaugaccuucucacccuagccgccgaccucgagaaacucaaauccaaagucauccgaacagaacgcccccuaucaagcggcguauacaugggcaaccuauccacacaacagcuagagcaacgccgcgcccuacuaaacaugauaggcaugguagguggagcgcaaggcacucagccaggccgcgacggcgucguacgcguaugggacgucaaaaacccugaccuccucaacaaccaauucggcaccaugcccagccuaacacucgccugccuuaccaagcaaggccaaguagaccucaaugacgcggucuuagcccucaccgaccucggccucaucuacacagccaaauaccccaacuccucagaccucgaccgccugagccaaucccacccaauucucaacauggucgacauuaaaaagagcagccuuaacauauccggcuacaacuucagccuaggcgccgcaguaaaagccggcgccugcaugcucgacggcggcaacaugcuagaaacgaucaaagucacgccccaaaccauggacggcauacucaaauccauacucaaaguuaaacgcucccucggcauguucgucuccgauacccccggcgaacgcaaccccuacgaaaacauccuuuacaaaaucugccucagcggagacggauggccauacaucgcuucccgcaccagcauagucggccgcgcaugggaaaacaccaccguagaccucgaauccgacggcaaaccccaaaaagucggcucagcaggaucaaacaaaucacuccagagugccggcuuccccacgggccuuacauacucccaacuaaugacccucaaagacagcaugaugcaacuggacccauccgccaaaaccuggauagacauagaaggccgacccgaagacccaguagagauagcccucuaccaacccaugagcggaugcuacauacacuucuuccgagaaccuaccgaccucaagcaauucaaacaagacgccaaguacucccacggcaucgacguggccgaccucuucccagcccagcccggccucaccagcgccgucaucgaagcucuaccccguaacaugguacucacaugccaaggaagcgacgacauuaaacgccuccucgauucccaaggacgacgcgacaucaaacucauagacauagcccucuccaaagccgacucccgccgcuucgaaaacgcaguaugggaccaaugcaaagaccucugccacaugcacacuggcgucgucguggaaaagaaaaagcgaggcggcaaagaagaaaucacgccacacugcgcccuaauggacugcaucauguacgacgccgcuguaucgggcggacuuaacauccccguccuaagagcgguccuaccccgagauauggucuuccgcacgucaucccccaaaguaguccucuaa

SEQ ID NO: 9564 - RNA, 1710 nt, Artificial Sequence
  derived and/or modified CDS sequence (opt11) from LASV(ISTH0012-NIG-2011;Clade II)__AIT17409__NP
auguccgccagcaaagaaguaaaauccuuccuguggacacaaucccuccgcagagaacuaucaggcuauugcucaaacaucaaacuccaagucgucaaggacgcccaggcccugcuucacggccuugacuucuccgaagucagcaacguacaacgucuaaugcguaaacaaaaacgugacgacggagaccucaaaagacuacgagaccuaaaccaagccgucaacaaccuggucgaacucaaauccacccaacaaaaauccauacuuagagucggaacccuuacuucagacgaccuccucacccucgccgccgaccucgaaaaacucaaauccaaagucaucagaaccgaacgaccacuauccuccggaguguacaugggcaaccuaucaacccaacaacuggaacaacgucgcgcacuccucaacaugauaggcauggugggcggagcucaaggaacccaaccuggacgcgacggaguaguccgcgucugggacguuaaaaaccccgaccuccucaacaaccaauucggaacaaugcccucacuuacucucgcaugccuaacuaagcaaggccaaguagaccucaacgacgcaguacucgcccucacggaccuaggacucaucuacaccgccaaauaccccaacuccucagaccuagaccgccugucccaaucccaccccauacuaaacauggucgacaccaagaaaagcucccuaaacaucuccggauacaacuucucccucggagccgccguaaaagccggcgccugcaugcuagacggcggaaacaugcuagaaacaauuaaagugaccccucaaacaauggacggaauccucaaaucaauacuaaaagucaagaaaucccuaggaauguucgucucagauacacccggagagcgcaaccccuacgaaaacauccucuacaaaaucugccuaagcggagacggcuggccauacauagcaucccgcacaagcaucgucggacgcgccugggaaaacaccacagucgaccuagaaucugacggcaaaccacagaaggucggaaccgccggcagcaacaaaucucuccaguccgccggcuuccccacaggccuaaccuacucgcaauuaaugacccucaaagauucuaugaugcaacuagaccccuccgccaaaacguggauugacaucgaaggccgccccgaagaccccgucgaaaucgcccucuaccaacccauguccggcugcuacauccacuucuuccgagaaccuaccgaucucaaacaauuuaaacaagacgccaaauacucacacggcaucgacguaaccgaccuguuuuccgcacaacccggccucaccagcgccguuaucgaagcccuaccccgcaacaugguccuaaccugccaaggauccgacgacaucaaacggcuccuagacucacaaggacgacgagacauaaaacuaaucgacauagcccuaaacaaggccgauagcaggcguuucgaaaacgcaguaugggaccaaugcaaagaccuuugccacaugcacaccggcgucgucguagagaaaaagaaacgcggcggcaaagaagaaaucaccccacacugcgcccucauggacugcaucauguaugacgcagccguaucaggcggacuaaacaucccaguacuaagagcaguccugccucgcgacaugguauucagaacaagcucaccaaaagucguccuguga

SEQ ID NO: 9565 - RNA, 1710 nt, Artificial Sequence
  derived and/or modified CDS sequence (opt11) from LASV(ISTH0047-NIG-2011;Clade II)__AIT17413__NP
augucagccucaaaagaagucaaauccuuccucuggacgcaaucucuucgcagagagcucagcggcuacugcuccucuaucaaacuccaagucgucaaagacgcccaagcccuacuccacggccuagacuucucagaaguaagcaacguacagcgccucaugcgcaaacaaaaacgcgacgacucugaccucaaacgccuccgagaccucaaccaggccgucaacaaccuaguagaacuaaaaucaacccagcagaaauccauacuccgcgucggcacccuaacuucagacgaccuccucacccuugcugccgaccucgaaaaacuaaaaucaaaaguaauccgcaccgaacgcccacucuccuccggaguguacaugggaaaccucagcacccaacaauuagaacagcgacgagcccuacucaacaugaucgggauggucgggggcgcccaaggaacacaacccggcagagacggcgugguccgcgucugggacgucaaaaaccccgaccuccuaaacaaccaauucggcaccaugccaucacucacccucgccugccucaccaaacagggccaaguagaccuaaacgacgccguccuagcccucacugaccucggccucaucuacacagcaaaauaccccaacuccucagaccucgaccgguuaucccaaucacacccuauccuaaacaugguagacacgaagaaauccucccuaaacauuucaggcuacaacuucucccucggagccgccgucaaagcgggagccugcaugcucgacggaggcaacaugcucgaaacaaucaaagucacaccacaaacaauggacggcauccucaaauccauacucaaagucaaacgaucccuaggaauguucgucagugacgcccccggcgaacgcaaccccuacgaaaacauccuauacaaaaucugccuauccggcgacggguggcccuacaucgccucccgaaccucuaucgucggccgagccugggagaacaccacaguggaccucgaaucagacggcaagccacagaaaaugggcacagccgguucaaacaaaucccuccaaucugccggcuuuccuacaggacucaccuacucucaacucaugacccucaaagacuccaugaugcaacucgaccccagcgcaaaaacauggaucgacauagaagggcgccccgaagaccccgucgaaauagcccucuaccaaccuaugucaggcugcuacauacacuucuuccgcgagcccaccgaccuaaaacaauucaaacaagacgccaaauacucccacggcaucgacguugccgaccucuuccccgcccaacccggccuaaccucagcaguaaucgaggcacucccccgcaacaugguccucaccugucagggcucagacgacaucaagaaacuauuagacucacaaggccgccgugauauaaaacuaaucgacauagcccuuucuaaagccgacucacgccgcuuugaaaacgccgucugggaccaauguaaagaccuaugccacaugcauaccggcgucguaguugagaaaaagaaacgagggggaaaagaagaaauaacaccacauugcgcccucauggacugcaucauguacgacgccgccgucuccgguggccuaaacauccccguccuccgcgccguacuucccagagacaugguauuccgaaccuccuccccaaaagucguccuuuaa

SEQ ID NO: 9566 - RNA, 1710 nt, Artificial Sequence
  derived and/or modified CDS sequence (opt11) from LASV(ISTH0230-NIG-2011;Clade II)__AIT17421__NP
augagcgcaagcaaagaggucaaauccuuccucuggacacaaucccuacgucgugaauuauccggauacugcagcaacauaaaacuccaaguaguaaaagacgcacaagcacuccuacacggccuagacuucuccgaagucucaaacgugcaaagacuuaugcgcaagcagaagcgggacgauagcgaccugaagcgccugcgcgaccucaaccaagccguaaacaaccucgucgaacucaaauccacccaacaaaaaucaauacuacgaguaggcacacucaccucagacgaccuacuaacccucgcugccgaccucgaaaaacuaaaaucaaaagucaucagaaccgaacgaccacucagcucgggcguauacaugggcaaccucucgacccagcagcucgaacagcgacgcgcgcuccucaacaugaucggcauggucuccggcgcccaaggcacacaacccgggcgagacggcgucguacgcgucugggaugucaaaaaccccgaucuccuaaacaaccaauucggaaccaugcccagccucacccuagccugccuaacaaaacaaggccaagucgaccuaaacgacgcgguacuagcgcuaacugaccucggacugaucuacacagcuaaauacccuaacagcucugaccuagaccgacuaagccaaucccacccaauacucaacaugguagauaucaagaaauccucccucaacaucagcggcuacaacuucagcuugggcgcagcaguaaaagcgggcgcgugcaugcucgacggagggaacaugcucgaaaccaucaaaguaacaccccaaaccauggacggcauccuaaaaaguauacucaaagucaaacgcucacucgggauguucgugucggacacaccaggcgaacgaaaccccuacgaaaacauccucuacaaaauaugccuguccggcgacggauggcccuacauagcaagccgaaccuccauagucgggcgugccugggaaaacaccaccgucgaccuagaauccgacgguaaaccacagaaaaugggaagcgccggaagcaacaaaagccuacaauccgccggcuucccaacaggacucaccuacucccaacugaugacacuaaaggacuccaugaugcaacucgaccccuccgcaaagaccuggaucgacaucgaaggccgacccgaagaucccguagaaaucgcccucuaccaaccaauguccggaugcuacauccacuucuuccgcgagccaaccgaccuaaagcaauucaaacaagacgccaaauacucccacggcaucgacgucgcagaccucuucccagcacaaccgggccucaccagcgccgucaucgaagccuuaccccgcaacaugguacuaaccugccaaggaucagacgacaucaaacgccuacuugacagccaaggccgacgcgacauaaaacuuaucgacauagcccuguccaaagcagacucacggagguucgaaaacgcaguaugggaccaaugcaaagaccucugccacaugcacaccggcgucgucguagaaaagaagaaacgaggaggcaaagaagaaaucacuccccacugcgcccucauggacugcaucauguacgacgccgccgucagcggcggccucaauauacccguacuccgagccguccuaccccgagacauggucuuccgaaccuccagccccaaaguaguacucuaa

SEQ ID NO: 9567 - RNA, 1710 nt, Artificial Sequence
  derived and/or modified CDS sequence (opt11) from LASV(ISTH0531-NIG-2011;Clade II)__AIT17425__NP
augagcgcaucaaaagaagucaaauccuuccuauggacccaaagucuccgacgagaacucuccggcuacugcucaucaauuaaacuacaagucguuaaagacgcccaagcacuccuacacggccucgacuucagugaaguaagcaacguucagcgacuaaugcgaaagcagaaaagagacgacuccgaccucaaacgccuccgcgaccucaaccaagcagucaacaacuuaguagaacucaaaagcacacaacagaagucaauccuccgcgucggaacgcuaacaucagacgaccuacuuacacucgccgcagaccucgaaaaacucaaauccaaaguuauccgcaccgaacgcccacuuucaucaggcgucuacauggguaaccucagcacccagcaacuagaacaacgccgagcccuacuaaacaugauaggaauggucggaggcgcccagggcacccaaccaggccgcgacggaguugucagagucugggacgucaaaaaccccgaucuacucaacaaccaauucggcaccaugcccucguuaacccucgcaugccucaccaagcaaggacaagucgaccuaaacgaugccguccuugcacuaacggaccuaggccucaucuacacagccaaauaccccaauagcuccgaccucgaccgccuaucacaaagccaccccauacucaacauggucgacaccaagaaauccagccucaacaucagcggcuacaacuucagccucggcgccgcagucaaagccggcgcuugcaugcuagacggcggcaacaugcucgagacaaucaaagucaccccacaaacaauggacggcauccuaaaaucaauacucaaaguaaagaaaucacucggaauguucgucuccgacacacccggcgaacgcaaccccuacgaaaacauucucuacaaaaucugccugucaggcgacggauggcccuacaucgcaagccgaaccagcauagucggucgcgccugggaaaacaccaucguagaccucgaguccgacggcaaaccacaaaaagucggaaccgcaggcagcaacaaaucucuucaauccgcaggauucccgaccggccuaacauacagccaacuaaugacccuuaaggacagcaugaugcaacuggaccccuccgccaagacauggauagacaucgaaggccgccccgaggaccccgucgaaaucgcgcucuaucaacccaugucaggcugcuacauccacuucuuccgagaacccaccgaccucaaacaauucaaacaagacgcuaaauacagccacggcaucgacguagccgaccuauuccccgcacagcccggccucacuuccgccgugaucgaagcccuaccacggaacaugguccuaacaugccaaggaagcgacgacauaaaacgccuccucgauucccaggggcgacgagacaucaaacuaauagacaucgcccucuccaaagccgacucacgcagauucgaaaacgcagucugggaucaaugcaaagaccuaugccacaugcacacaggcguagucgucgagaaaaagaaacgaggaggaaaagaagaaauaaccccacacugcgcucuaauggacugcauaauguacgaugcagccguaagcgggggccucaacauccccguucugcgcgcaguccucccacgcgacaugguauuccgcaccuccucccccaaagucguccucuaa

SEQ ID NO: 9568 - RNA, 1710 nt, Artificial Sequence
  derived and/or modified CDS sequence (opt11) from LASV(ISTH0595-NIG-2011;Clade II)__AIT17429__NP
auguccgccuccaaagaagucaaauccuuccucuggacccaaucacucagaagagaacucuccggcuacugcagcaacauaaaacuacagguagucaaagacgcccaagcccuacuccacggccucgacuucuccgaagucagcaacguccaacgacucaugcgaaaacaaaaacgcgacgacagcgaucuaaaacgccuacgagaucucaaucaagccgucaauaaccucgucgaacucaaauccacgcaacagaaaagcauacuccgcgucggcacccucaccagcgacgaccuacucacucuugcagccgaucucgaaaaacuaaaaucaaaagucauacgcacugagaggccacucagcucuggugucuacaugggcaaccuuuccgcgcaacaacucgaacaaagacgagcgcuccucaacaugaucggcauggugggaggcgcacaaggcacccaaccaggucgcgacggcgucguccgagugugggacguaaagaacccagaccuacucaacaaccaauucggcacaaugcccucccucacacucgccugccuaacaaaacaaggccaaguugaccugaacgacgccguccucgcgcucacagaccucggccucaucuacaccgcuaaauaccccaacucgucagaccuagaccgccucagccaaucccaccccauccucaacauggucgauacuaaaaagucgucccuaaacaucuccggcuacaacuucucacucggcgccgcagucaaagccggagccugcaugcucgauggcggaaacaugcuggaaacgauaaaagucacgccccaaaccauggacggaauacucaaauccauccuaaaagucaagcgcucccuaggaauguucgucagcgacgcccccggcgaaagaaauccuuaugaaaacauacuauacaaaaucugccuaucaggcgacggcuggcccuacauagcaucacgaaccuccaucgugggccgagccugggaaaacaccacagucgaccucgaaucagacggcaaaccccagaaaguaggcaccgccgguagcaauaaaucccuccagucugccggcuucccaacaggacuaaccuacucacaacucaugacccuaaaagacagcaugaugcagcucgaucccuccgccaaaaccuggaucgacaucgaaggucguccagaagaccccgucgaaaucgcacucuaccaaccaaugucaggaugcuacauccacuuuuuccgcgaacccacagaccuaaaacaauucaaacaagacgcaaaauacagccacggcaucgacgucgccgaccucuuccccgcacaacccggccucaccuccgcagucaucgaagcccucccccggaacaugguacuaacgugccaaggcuccgaugacauaaaaagacuccucgacucacaaggccgccgcgacaucaaacugauagacaucgcccucucuaaagccgacucccgacgauucgaaaacgccguaugggaccaaugcaaagaccucugccauaugcacacaggcguuguagucgagaaaaagaaaagaggaggcaaagaagaaauaacgccccacugcgcccuuauggacugcauuauguacgacgcggccgucuccggcggccuaaacauccccgugcuacgcgccguccucccaagagacaugguauuccgaacaucuuccccaaaaguuguccucuaa

SEQ ID NO: 9569 - RNA, 1710 nt, Artificial Sequence
  derived and/or modified CDS sequence (opt11) from LASV(ISTH0964-NIG-2011;Clade II)__AIT17431__NP
augucagccagcaaagaggucaaguccuuccucuggacccaaucccuccgacgcgaacucuccggauacugcucaaacaucaaacuccaggucguaaaagacgcccaggcccuacuacacggccucgauuucuccgaagucuccaacguccagcgacuaaugcgaaaacagaaaagagacgacuccgaccucaaacgacuacgcgaccuaaaccaagccgucaauaaccuagucgaacucaaauccacucaacaaaaauccauucuacgcgucggcacacuaacaucagacgaccuccuaacucuagcagccgaccucgaaaaacucaaauccaaaguaauccgcaccgaacgcccacugucaagcggcgucuacaugggaaaucucucaacacaacaacucgaacaacgccgagcacuacucaacaugaucggcaugguaggcggcgcacaaggaacccaacccggccgcgacggcgucgucaggguaugggacgucaaaaacccagaccuacucaauaaccaauucggcacaaugcccucccucacacuagccugccucaccaaacaaggccaaguugaccucaacgacgccguucucgccuuaaccgaccucggucuaauuuacaccgccaaauaccccaacuccagcgaccuugaccgccucucacaaucacacccaauccuaaacauggucgacacaaagaaauccagccugaacaucucaggcuucaacuucucccucggcgccgcagucaaagcaggagccugcaugcucgacggcggcaacauguuagaaaccauaaaaguaacaccacaaaccauggacggcauccucaaauccauccucaaaguaaagaaaucccuggggauguucguaagcgauacccccggagaacgaaaccccuacgaaaacauacucuacaaaaucugcuuauccggcgacggauggcccuacaucgccuccaggacaucaauagucggucgcgccugggaaaacacaaccguugaccucgaaucggacggaaaaccccaaaaagucggcaccgccggcagcaacaaaucccuucaauccgccgguuuccccacaggccucaccuacucccaacuaaugacccucaaagacuccaugaugcaacuagaccccucagccaaaaccuggauagacaucgaaggacgccccgaagacccagucgaaauugcacucuaccaacccauguccggaugcuacauacacuuuuuccgagagcccacagaccuaaaacaauucaaacaagacgccaaauacucacauggaauagacgucgcagaccucuucccagcccaacccggccucaccucagcagucaucgaagcccuuccacgaaauaugguacugaccugccaaggcagcgacgacaucaagcgcuuacuagacucccaaggccgccgggacauaaagcucauagacauagcucuaucaaaagccgacuccagacgcuucgaaaacgccguaugggaccaaugcaaggaccugugccacaugcacacaggagucguagucgaaaagaagaaacgcggcggaaaagaagaaaucacaccccacugcgcacucauggacugcauaauguacgacgcagccguuuccggaggccucaacauacccguacuccgcgccgugcucccccgggacauggucuuccgaaccgccuccccuaaaguaguccuauga

SEQ ID NO: 9570 - RNA, 1710 nt, Artificial Sequence
  derived and/or modified CDS sequence (opt11) from LASV(ISTH1038-NIG-2011;Clade II)__AIT17439__NP
augucagcaagcaaagaagucaaaucauuccuauggacccaaucccucagacgcgaacucucaggauacugcucauccaucaaacuccaagucguaaaagacgcccaagcccuccuacacggacucgacuucuccgaggucucaaacguacaaagacuuaugcgcaaacaaaaacgcgacgacuccgaccucaaacgacuccgcgaucucaaccaagccgucaacaaccuaguagaacucaaaucuacccaacaaaaauccauccuccgcgucgguacccucacaucagacgaccuccuaacacuggccgccgaccuggaaaaacuaaaauccaaagugauccgcacugaacgaccccuauccucuggagucuacaugggaaaccuauccacccaacaacucgaacaacgucgcgcucuccuuaacaugaucggaaugguaggcggcgcucagggcacccaacccggccgagacgggguaguacgcgucugggacguaaagaacccagaccuacuaaacaaccaauucggaaccaugccaucccucacccuggccugccucacaaaacagggccaaguugaccugaacgacgccguccucgcccucaccgaccucggacuaauauacaccgccaaauaccccaauuccuccgaccucgaccgccucucacaaucccacccaauccugaacaugguugacaccaaaaagagcucacuuaacaucagcggauucaacuucucacucggcgccgccgucaaagccggagccugcaugcuagacggaggcaacaugcucgagacaaucaaagucacaccccaaaccauggacggcauccugaaaucaauccuaaaagucaaacgcucccuuggcauguucgugucggauacccccggcgaacguaacccauacgaaaacauccucuacaaaaucugccucuccggagacgguuggcccuauaucgcuagccguacaaguaucgucggacgcgccugggaaaacaccacagucgaccucgaaucagacggcaaaccccagaaaaugggcaccgcaggcucaaacaaaucacuucaaucagcagguuuuccaaccggccucacauacucucaacucaugacccuaaaagacuccaugaugcaacuagaucccagcgccaaaaccuggauagacaucgaaggacgccccgaagaccccguagaaaucgcgcucuaccaaccaguuuccggcugcuauauccacuucuuccgcgaaccaaccgaccucaaacaauucaaacaagacgccaaauacucucacgggaucgacgucgcagacuuauucucagcccaaccaggccucacaagcgcagucauagaggcccucccccguaacaugguacucacaugccaaggcucagacgacauaaaacgacuccucgacagccaaggccgccgcgacaucaaacucauagacauagcccucuccaaagccgauucacgccgcuucgaaaacgccgucugggaccaaugcaaggaccucugccacaugcacaccggagucgucgucgagaaaaagaaaagagggggaaaagaagaaaucacaccccacugcgcccugauggacugcaucauguacgacgccgcagucucuggaggccucaacauccccgucuuccgagccguacuccccagagacauggucuuccgaaccucuagcccuaaaguaguacucuaa

SEQ ID NO: 9571 - RNA, 1710 nt, Artificial Sequence
  derived and/or modified CDS sequence (opt11) from LASV(ISTH1048-NIG-2011;Clade II)__AIT17443__NP
auguccgccaguaaagaaguaaaauccuuccucuggacccaaucccuccgccgcgagcuuucagguuacugcucauccauaaaacuacaaguaguaaaagacgcacaagcacuacuacacggacuugacuucuccgaaguaagcaacguccagcgauuaaugcgcaaacaaaaacgcgacgacuccgaccucaaaagacuacgcgaccuaaaucaagccgucaacaaccuaguugaacuaaaaucuacccagcaaaaaucuauccuccgcgucggaacucucacaagcgacgaccugcucacccuagcagccgaccucgagaaacuaaaauccaaaguaauccgcaccgaacgaccccucucuagcggcgucuacaugggaaaccuaucaacucaacaacucgaacaacgacgagcccuccuaaacaugaucggaaugguaggcggagcacaaggcacccaaccaggccgcgacggagucguaagagugugggacgucaaaaaccccgaccucuuaaauaaccaguucggcacaaugcccucacuaacccuagcuugccuaacaaaacaaggccaggucgaccuaaacgacgccguccuagcccucaccgaccuaggccucaucuauaccgccaaauaccccaacuccucagaccuagaccgccuuucccaaucacaccccauccucaacaugguggauaccaagaaaagcucccugaacaucagcggcuacaacuucucacuaggggccgccguaaaagcgggugccugcaugcuagacggcggcaacaugcuagaaacaauaaaagucacuccccaaacaauggacgguauccucaaaucaauccucaaaguuaaaagaucccucggcauguucgucagcgacgcaccaggcgagagaaacccauacgaaaacauacuauacaaaaucugccucucaggagauggcuggcccuacauagccagucgaacaucaaucgucggacgagccugggaaaacaccaccgucgaccuagaaagcgacggcaaaccccaaaaaguuggaaccgcaggaucuaacaaaucgcuacaaucggccggcuucccaacaggccuaacuuacucccagcucaugacccuuaaagacucaaugaugcagcuagaccccagcgcaaaaacauggaucgacauagaaggaagacccgaagacccaguagaaauagcccuauaccaacccauguccggauguuacauccacuucuucagagaaccaaccgaccuaaaacaauuuaaacaagacgccaaauacucccacggcauugacgucgcagaccucuucccagcacaaccaggacucacauccgccgucauagaggcccuacccagaaacaugguucugaccugccaaggcagcgaugauauaaagaaacuccucgacucccaaggccggcgcgacaucaaacucauagacauagcccucucaaaagccgacucccgccgauucgaaaacgcgguaugggaccaaugcaaagaccucugccacaugcacaccggcguaguagucgagaaaaagaaacgcggcggaaaagaagagauaacaccccacugcgcgcuaauggacugcauaauguacgacgcagccguuuccggcggacucaacauacccguccuacgcgccgugcuaccacgcgacaugguauuccgaaccuccagccccaaaguaguccuauaa

SEQ ID NO: 9572 - RNA, 1710 nt, Artificial Sequence
  derived and/or modified CDS sequence (opt11) from LASV(ISTH1058-NIG-2011;Clade II)__AIT17447__NP
auguccgcauccaaagaaguuaaauccuucuuguggacccaaucccuacggagagaacucaguggcuacugcagcaacauaaaacuacaagucguaaaagacgcacaagcacuccuccacgggcuagacuucuccgaagucucgaacguacaaagacucaugcgcaaacaaaaacgagacgacuccgaccucaaacgccuacgcgaucucaaccaagccgucaacaaccuagucgaacuaaaaaguacccaacaaaaaucaauccuacgagucgggacccucacaagcgacgaccuccucacccuagccgcggaccucgaaaaacuaaaauccaagguaauccgcaccgaacgcccccucuccuccggcguauacauggguaaccucuccacccaacaacucgaacaacgccgcgcccuacucaacaugaucgggauggucggcggugcccaaggcacucaacccggcagagauggagucgucagaguaugggacgucaaaaacccugaccucuuaaacaaccaauucggaaccaugccaucacucacacuagccugccugaccaaacaaggccaagucgaccucaacgacgcaguacucgcccuaacggaccucggacucauauacaccgcaaaauacccgaacuccuccgaccucgaccgccucagucaaagccaccccauccucaacauggucgacacaaagaaaagcucacuuaacauuucaggcuacaauuucucccuuggcgccgccgucaaagccggcgcauguauguuagacgguggcaacaugcuagagacaaucaaagucacaccccaaaccauggacggcauucucaaauccauacucaaaguaaagaaaucacugggcauguucguguccgacacccccggcgaaagaaaccccuacgaaaacauccucuacaaaauaugccuguccggcgacggcuggcccuauauagccucacgaaccuccauugugggacgcgccugggaaaacaccacagucgaccuggaaagcgacggcaaaccucaaaaagucggcacgaccggcuccaacaaaagccuucaaagcgcuggcuuccccaccggccuaacuuacagccaacugaugacccucaaagauagcaugaugcaacucgaccccagcgcaaaaaccuggauagacauagaaggacgacccgaggaccccgucgaaauagcccucuaucaacccauguccggcugcuacauacacuucuuccgagaaccgacagaccuaaagcaauucaaacaagacgccaaauacucccacggaaucgacgucaccgaccucuuuccagcccaacccggacuaaccuccgcaguaauugaagcccuuccccgaaacaugguacugacaugccaaggaagugacgacaucaaacgacuccuagacucccaaggccgccgcgacaucaaacugaucgacauagcucuguccaaagccgacucacgacgauucgaaaacgcagucugggaccaaugcaaagaccucugccacaugcacacgggcguaguagucgaaaagaagaaacgcggaggcaaagaagaaaucacaccccacugcgcccuaauggacugcauaauguacgaugccgccguaucaggcggccucaacauccccguacuucgcgcaguacuuccucgagacauggucuuccgaaccucuucccccaaaguaguccucuaa

SEQ ID NO: 9573 - RNA, 1710 nt, Artificial Sequence
  derived and/or modified CDS sequence (opt11) from LASV(ISTH1064-NIG-2011;Clade II)__AIT17451__NP
augucagccagcaaagaagucaaauccuuccuauggacccagagccuucgccgcgaacucagcggauauugcagcaacaucaaacuccaagucgucaaagacgcucaagcucuccuccacggccucgacuucuccgaaguaucuaacguacaacgacucaugcggaaacaaaaacgagacgauuccgaccuaaaacgacuacgcgaccucaaccaagcagucaacaaccuaguugaacucaaaucgacacagcagaaaagcauacuccgcgucggaacccucacguccgacgaccuucucacacuagcagccgaccuagaaaaacuaaaaucaaaagucauccgaacggaaagaccccuaucaucgggcguguacaugggaaaccucucaacccaacaacucgaacaaagacgggcccucuuaaacaugaucgggaugguaggcggcgcacaaggcacucaaccgggccgcgacggagucguccgagucugggacgucaaaaacccagaccuccucaacaaccaguucggcaccaugcccucccucacccuagcaugccuaaccaaacaaggacaggucgaccuaaacgacgcaguccucgcccuaaccgaccuaggccucaucuacaccgccaaauuuccaaacuccucugaccuggaccgacugagccaaucccacccaauacucaacauggucgacacaaagaaauccagccuaaacaucagcggguacaacuucucccucggcgcagccgugaaagccggcgccugcaugcucgacggaggcaauaugcucgaaaccauuaaagucaccccucaaaccauggacggaauacugaaauccauccugaaaguaaagaaaagccuuggcauguucgucagcgacacgccaggagaacgcaacccauacgagaacauccucuacaaaaucugccucuccggagacggauggccauacaucgccucccgaaccuccaucguaggcagagccugggaaaacaccacaguagaccucgaaucggacggaaaaccacaaaaaguaggcaccacaggaucuaauaaaucucugcagucagccggcuucccuaccggacuuacuuacucccaacuuaugacccugaaagacagcaugaugcaacuagacccauccgcuaaaaccuggaucgauaucgaaggccgacccgaagacccaguugaaaucgcgcucuaccagccaaugucaggcugcuacauccacuucuuccgcgaacccaccgaccuaaaacaauucaaacaagacgccaaauacucacacggaaucgacguagccgaccucuuucccgcacaaccaggccucacaagcgcagucauagaagcccucccccgcaacaugguccucacaugccaaggcucggacgacauaaaacgacuccucgacucccaaggccgucgagacaucaaacucaucgacauagcucuauccaaagcagacucacgaagauucgagaacgccguaugggaccaaugcaaagaccuaugccacaugcacacagguguaguaguagaaaagaagaaaagaggcggcaaagaggaaaucaccccgcacugcgcccuaauggacugcaucauguaugacgccgcagucagcggaggacucaacaucccaguacuacgcgccguccucccccgagacaugguauuccgaacauccagcccaaaaguaguccuauaa

SEQ ID NO: 9574 - RNA, 1710 nt, Artificial Sequence
  derived and/or modified CDS sequence (opt11) from LASV(ISTH1069-NIG-2011;Clade II)__AIT17455__NP
auguccgccagcaaagaaguaaaaucuuuccucuggacccaaucacucagacgcgaguuaucgggcuacugcagcuccaucaaacuccaaguugucaaggacgcccaagcucugcuacacggccucgacuucagcgaagucagcaacguccagcggcucaugcgaaaacaaaagcgugacgacuccgaccuaaagcgccucagggaccucaaccaagccgucaacaaccuaguggaacuaaaaagcacccaacagaaaucaguccuacgcguaggcacucucacauccgacgaccuacucacacucgccgcagaccuagaaaaacuaaaauccaaaguaauccgcaccgaacgcccucucuccagcggcgucuacaugggcaaccucucaacccaacaacuagaacagcgacgcgcccuucucuccaugauuggaauggucggaggugcccaaggcacccaacccggcagagacgguguaguacgcguuugggacgucaaaaaccccgaccuccucaacaaccaauucggcaccaugcccucccucacccucgccugccuaaccaaacaaggccagguagaccuaaacgacgccgucuuagcccuaacagaccucggccuaaucuauaccgcaaaauaccccaacuccuccgaccuagaucgccucucacaaucacaccccauccuaaauauggucgauaccaagaaaucaagccucaacauaagcggcuacaacuuuagccucggcgccgcaguaaaagcgggcgccugcaugcuagacggcggaaacaugcuggaaacaaucaaagucacaccccaaaccauggacggcauacucaaaagcauccucaaagucaaacgaagccucgguauguucguaagcgacacccccggagaacgcaaucccuacgaaaacauccucuacaaaauuugccuauccggcgacggcuggcccuacaucgcaagcagaaccuccaucguaggccgcgccugggaaaacaccacagucgaccucgagagcgacgguaagccacaaaaagucggaaccgccggaucaaauaaaucccuccaaagcgcaggauuccccacaggccucaccuacagucaacucaugacacuaaaagacuccaugaugcaacuagaccccucagcaaaaaccuggaucgauaucgagggcagaccagaagacccggucgaaaucgcccucuaccaacccauguccggcugcuacauccacuucuucagagagcccaccgaccuaaaacaauuuaaacaagacgccaaauacagucauggcaucgacgucgcagaccuuuuccccgcacaacccggacuuaccagcgccgucaucgaagcacucccaagaaacaugguccugaccugccaaggaagcgacgacauaaaacgccuccucgacucacaaggacgacgagacauaaaacuaaucgauaucgcccucucgaaagcagacucccgccgcuucgaaaacgccguaugggaccaaugcaaagaccucugccacaugcacacuggagucgucguagaaaagaagaaacgcggcgggaaagaagaaauaacaccccacugcgcacucauggacugcauaauguacgacgcggcagucagcggaggccucaacauccccguccuccgcgcaguccucccccgcgacauggucuuccgaaccagcagccccaaaguggugcuauga

SEQ ID NO: 9575 - RNA, 1710 nt, Artificial Sequence
  derived and/or modified CDS sequence (opt11) from LASV(ISTH1096-NIG-2012;Clade II)__AIT17459__NP
auguccgcaagcaaagaagucaagagcuuccucuggacacaaucccuacgccgcgaauuauccggauacuguagcucaauaaaacuacaagucguuaaagacgcccaagcccucuuacacggacuagacuucagcgaagucuccaauguccaacgccuuaugcgcaaacagaaaagagacgacuccgaccuaaaaagacuacgcgaccucaaccaagcaguaaacaaccucguagaacugaaauccacccaacagaaaagcauacuccgcguuggcacucuuaccuccgacgaccuccucacccucgcagcagaccuagaaaaacucaaauccaaagucauccgaaccgaacgcccacucuccuccggagucuacaugggcaaccucucgacccaacaacucgaacaacgccgcgcccuacucaacaugaucggcauggucggcggcgcccaagggacccaaccaggaagagacggagucguucgcgucugggacgucaaaaacccagaccuccucaacaaccaauucggaacgaugcccucacucacccucgccugccucaccaaacaaggacaagucgaccucaacgacgcagucuuagcacugacugaccucggccugauauacaccgccaaauacccaaauuccuccgacuuagacagacuaucccaaucccaccccauacucaacauggucgacacaaagaaauccucacuaaacauaagcggcuacaacuucucucucggagcugcgguaaaagcaggcgccugcaugcuagacgguggcaacauguuagaaaccauaaaagucacaccccaaaccauggacggcauacucaagagcauacucaaagucaaacgaucccuuggcauguucguauccgacacaccaggcgaacgaaacccauaugaaaacauacucuacaaaaucugccucucaggcgacggauggccauauauagccucccgaacauccaucgucggccgcgcaugggaaaacacaaccgucgaccucgaaagcgacggaaaaccccagaagaugggaacagccggcucuaacaaaucccuccaaucggccggcuucccaaccggccucacauacucacaacuaaugacacucaaagacucgaugaugcaacuggauccauccgccaaaacauggaucgacaucgaaggacgacccgaagacccaguagaaaucgcucuauaccagcccgucagcggaugcuacauucacuucuuccgcgaaccaaccgaucuuaaacaauucaagcaagacgccaaauacucccacggcaucgaugucgcggaccuguuccccgcccaacccggccuaaccuccgcagucaucgaagcccucccuagaaacaugguccuaaccugccaaggcuccgacgacauaaaaaggcuacucgacucccaaggacgcagagacaucaagcuaaucgacaucgcccuuuccaaagccgacucgcgacgauucgaaaacgccguaugggaccaauguaaagaccucugccacaugcacaccggcgucguagucgaaaagaagaaacgcggaggcaaagaagaaauaacaccccauugugcacuaauggacugcaucauguacgacgccgccgucagcggcggucuaaacaucccaguccuccgugccguacuaccacgcgacauggucuuucgcaccuccucccccaaagucguacucuaa

SEQ ID NO: 9576 - RNA, 1710 nt, Artificial Sequence
  derived and/or modified CDS sequence (opt11) from LASV(ISTH1107-NIG-2012;Clade II)__AIT17463__NP
augucagcguccaaagaagucaagagcuuccucuggacccagucccuccgccgggaacuuuccggcuacugcucauccaucaaacuacaagucgucaaagacgcccaggcccuacuccacggacucgacuucagcgaggucuccaacgugcaacgacucaugcgcaaacacaaacgcgacgacagcgaccuaaaacgccugcgcgaccuaaaccaggccguaaauaaccucguugaacuaaaaucaacccaacagaaaagcauccuccgagucggaacccuuaccuccgacgaccuccuaacucucgccgccgaccucgaaaaauuaaaaagcaaagucauccgcacugagcgcccacuauccuccggagucuacaugggcaaccuuuccacccaacaacucgaacaaagacgagcccuccucaacaugauaggcauggucggcggagcccaaagcacccaacccgguagagacggagucguacgcguuugggacgucaaaaaccccgaccuccuaaacaaccaauuuggaacaaugcccucacucacccucgccugccugaccaaacaaggccaagucgaccucaacgacgcaguacucgcccuaaccgaccucggccucauauacacugcuaaauacccaaacuccagcgaccucgaccgacuuucccaaucucaccccauacuaacaaugguagacaccaagaaaucgucccucaacauauccggauuuaauuucucacugggugccgcagugaaagcgggugccugcaugcucgacggcgggaacaugcucgaaaccauaaaagucacaccccaaaccauggacggcauccucaaaagcauccucaaagucaagaaaucacucggaauguucgucagcgacacccccggagaacguaaccccuacgaaaacauccuauacaaaaucugccucucaggagacggauggcccuauaucgccucacgcaccuccaucguaggacgagcaugggaaaacaccaucgucgaccucgaaacagacgguaaaccacaaaaagucggcacugcaggcuccucccgcagucuccaauccgccggcuucccuaccggccucacuuacagccaacuaaugacccucaaagacucuaugaugcaacucgacccaucugcaaaaacauggauugacauagaaggccgccccgaagaccccguagaaaucgcccuauaccaaccaauguccggcugcuacauccacuucuuccgcgaaccaacugaccugaaacaauucaaacaagacgcuaaauacagccacggcaucgacgucgcagaccuauuccccgcccaaccuggccucaccucagcaguaaucgaggccuuaccccgcaacaugguccucacaugccaaggaucagacgacauuaagaaacuacucgacagccaaggccggcgcgacaucaaacucauagacauugcccuauccaaagccgacucacgccgauucgaaaacgccgucugggaccaaugcaaagaucuaugccauaugcacaccggaguugucguagaaaagaagaaacgaggcggaaaagaagaaauaacaccccacugcgcccuaauggauugcaucauguacgacgccgccguuagcggaggacuaaacaucccuguucuucgcgccguccuaccccgcgacaugguauuccgcaccucaagcccuaaagucguucucuaa

SEQ ID NO: 9577 - RNA, 1710 nt, Artificial Sequence
  derived and/or modified CDS sequence (opt11) from LASV(ISTH1111-NIG-2011;Clade II)__AIT17467__NP
augucugccuccaaagaaguaaagagcuuccucuggacccaaagccuacgccgcgaacucagcggauacugcuccucgaucaaacuccaagucguaaaagacgcccaagcccuccuccacggccuagacuucuccgaaguauccaauguccaacgucucaugcgaaaacaaaaacgagaugacucagacuuaaaacgccugagggaucuaaaccaagccgucaacaaccuaguagaacuuaaaucaacccaacaaaaauccauccuccgcgucggcacccuaacaucugacgaccuccuuacacucgccgccgaccucgaaaaacucaaaagcaaaguaauacguacagaacgaccccuaagcuccggcguauacaugggcaaccuaagcacccagcaacuagaacaacggcgcgcccuacugaacaugaucggcauggucggaggaacccagggaacucaaccaggccgcgacggcguuguucgcgucugggacgucaaaaacccagaccuccucaacaaccaauuuggaacaaugcccuccuuaacccuagccugccuaacaaaacaaggacaagucgaccucaacgacgccguucucgcccuaaccgaccucggucuuaucuacacggccaaauacccaaacuccagcgaccucgaccgccuaucacaaucccacccaauccucaacauggucgacaccaagaaaucgucccuaaacaucuccggauacaacuuuucacucggcgcagccgucaaagccggagcuugcaugcucgacggaggcaacaugcucgagaccaucaaagucaccccacagaccauggacggcauacuuaaaucaauccuaaaaguaaagaaaucauuaggaauguucgucucagacaccccaggcgaacgaaacccauacgaaaacauccuuuauaaaaucugccugagcggcgacggcuggcccuacaucgccucacgaacuucaauagucggcagagccugggaaaacacuacagucgaccucgaaucugacggaaaaccccaaaaagucggaaccgcaggcucaaauaaaucccuccaaucagcggguuuccccaccggccuaaccuacucccaacuaaugacccucaaagacuccaugaugcagcucgaccccuccgcaaaaaccuggaucgacaucgaaggacgacccgaagaccccguagaaauagcccucuaccagcccauguccggcugcuacauccacuucuuccgagaaccuaccgaccucaaacaauucaaacaagacgcuaaauacucacacggcauagacgucgccgaccuauuccccgcacagccaggccucacauccgccgucauagaagcccuaccccgcaacaugguacucacaugccaaggaucagacgacaucaaacgccuccuagacucccaaggccgccgagacaucaaacuaaucgacaucucccuaagcaaagccgacucacgucgcuucgaaaacgccgucugggaccaaugcaaagaccucugccauaugcacaccggcguagucgucgaaaagaagaaacgcggcggcaaagaagaaauaacaccccacugcgcccucauggacugcaucauguacgacgccgcagucagugggggccucaacaucccaguccuccgcgccguccucccacgcgacauggucuucagaacaucgucccccaaaguaguccucuga

SEQ ID NO: 9578 - RNA, 1710 nt, Artificial Sequence
  derived and/or modified CDS sequence (opt11) from LASV(ISTH1121-NIG-2012;Clade II)__AIT17471__NP
auguccgccagcaaagaagucaaauccuuccucuggacccaaucacuacgacgcgaacucaguggcuacugcuccucaauuaaauuacagguagucaaagacgcccaagcccuacuccacggccucgacuucucagaggucucaaauguccaacgccucaugcgcaaacaaaaacgagacgacuccgaccucaaacggcucagggaccucaaccaagcagucaacaaucucgucgaacucaaauccacccaacaaaaauccauccuucgaguaggcacacuaacguccgacgaccuucucacccuggccgccgaccuagaaaaauuaaaauccaaagugauccgcaccgaaagaccacucagcuccggagucuacaugggaaaucucuccacccaacaacucgaacaacgccgggcacuccuaaacaugauaggcauggucggaggcgcucaaggaacacaaccaggccgagacggcguugugcgcguaugggaugucaaaaaccccgaucuccugaacaaccaguucggaaccaugcccucccucacccucgccugccucaccaaacaaggccaaguagaccuaaacgacgccguccucgcccucaccgaccuaggccucaucuacaccgccaaguacccaaacucuagcgaccucgaccgacuaucacaaucucaucccauccucaacaugguagacaccaagaaaucaucccucaacaucucaggcuacaacuucucccuaggcgccgccgucaaagccggcgccugcaugcucgauggcgggaacaugcucgaaaccaucaagguaacaccacaaaccauggacggcauccucaaaagcauccuaaaagucaaacgcucccucggcauguucguuuccgacacccccggcgaacgaaaccccuacgagaacauccucuacaaaaucugucugagcggcgacggauggcccuacaucgcauccagaacaucuauagucggccgggcaugggaaaacacaacugucgaccucgaaagcgacggcaaaccccagaaaauggguacaaccggcuccaacaaaucccuccaaucagcaggcuuccccaccggacuuacauacucacaacucaugacacucaaagacuccaugaugcaacucgaccccagcgcaaaaaccuggaucgauauagagggccgccccgaagacccaguagaaauagcccucuaucaacccauguccggcugcuacauccacuuuuuccgcgaaccaacagaccucaaacaauuuaagcaagacgcaaaauacagccacggcauagacgucgccgaccuauuccccgcccaacccggccucaccucagccgucaucgaagcccucccccgcaacaugguacucacaugucaaggcagcgacgacauaaagaaacuacuagacucacaaggacgccgugacauuaaauuaaucgacauagcccuaucuaaagccgacucccgcaaauucgaaaaugucguaugggaccaaugcaaagaccucugccacaugcacaccggugucguaguggaaaagaagaaaagaggcggaaaagaagaaauaacaccccacugcgcacucauggauugcaucauguacgacgccgccguuucaggcggccucaacaucccaguacuccgcgcaguccucccacgcgacauggucuuccgcaccucaucucccaaaguaguacucuga

SEQ ID NO: 9579 - RNA, 1710 nt, Artificial Sequence
  derived and/or modified CDS sequence (opt11) from LASV(ISTH1129-NIG-2012;Clade II)__AIT17475__NP
augucugccagcaaagaagucaaauccuuccucuggacccaaucacuacgccgcgaacuaucaggauacugcagcagcauaaaacuccaagucguaaaagacgcacaagcccuccuccacggccuagacuucagcgaagucucgaacguccagagacuuaugcgaaaacaaaaacgagacgacucagaccuaaaaagacuacgcgaccucaaccaggccguaaacaaccucgucgaacuaaaauccacacaacagaaaagcgugcuccgaguaggaacacucaccucagacgaccuacucacccucgcagcagaccucgaaaaacucaaauccaagguaauacgcacugaacgaccacuauccuccggcgucuacaugggaaaccucuccgcccaacaacuagaacaacgacgcgcccuccucuccaugauaggcauggucggaggagcccaaggaacccaacccggcagagacggcgucgucagaguaugggacgucaaaaaccccgaucuccucaacaaccaauucggcaccaugcccucccucacauuagccugccuaacaaaacaaggacaagucgaucucaaugauaccguacuugcccucaccgaccucggacucaucuacaccgccaaauaccccaauagcuccgaccucgaccgcuuaucccaaucccacccaauccucaacaugguagauaccaaaaaguccucccuaaacauaucaggcuacaacuucagccuuggagccgcagucaaagccggagccugcaugcuagacggcgggaacaugcucgagaccaucaaagucacaccacaaaccauggacggcauccuaaagagcauucuaaaaguuaagcgcucccucggcauguucgucagcgacacccccggagagcgaaacccauacgaaaacauucucuacaagaucugccucucaggagacggauggcccuacaucgcaucccgcaccuccaucguaggccgagccugggaaaacacaacaguagaccuugaauccgacggcaaaccacaaaaagucggcaccgcugguuccaauaaaucacuccaaucggccggcuucccaaccggucucaccuacucccaacucaugacccucaaagacuccaugaugcagcucgacccguccgccaaaacauggaucgacauagaaggccgcccagaagaccccgucgaaauagcacuguaccaaccaaucucaggauguuacauacacuuuuuccgcgaaccgacagaccucaaacaauucaagcaagacgcaaaauacucgcauggcaucgaugucacagaccucuuccccgcacaacccggccuuaccuccgcagucaucgaagcacugccuagaaacaugguccucacaugccaaggcucagacgauaucaaacgacuacucgacucacaaggucgcagagacauaaaaaucaucgacauagcgcuauccaaagccgacucccgccgcuucgaaaacgccguaugggaccaaugcaaagaccucugccacaugcacacuggcguaguuguagaaaagaagaaacgaggcggcaaagaagaaauuacaccccacugcgcgcucauggacugcaucauguacgacgccgcaguauccggcggccuaaacauccccguccucagagccguacucccccgcgacaugguauuccgcaccuccucgcccaaaguaguccucuaa

SEQ ID NO: 9580 - RNA, 1710 nt, Artificial Sequence
  derived and/or modified CDS sequence (opt11) from LASV(ISTH1137-NIG-2011;Clade II)__AIT17479__NP
auguccgcguccaaagaagucaaauccuuccucuggacgcagucccugagacgcgaacucucuggcuacugcucaaacaucaaacuacaaguagucaaagacgcacaagcacuccuccacgggcucgacuucagcgaggucucaaacguacaacgccucaugcgcaaacaaaaacgcgacgacucagaccucaaacgccuccgcgaucuuaaccaggcggucaacaaccuaguagaacucaaaucaacccagcagaaaagcguccuccgcgucggcacccucaccuccgacgaccuccucacccucgccgccgaccuagaaaaacucaaaucaaaaguaaucagaaccgaacgaccccucuccuccggaguguacaugggaaaccucuccacccaacaacucgaacaacgccgcgcccuucuuaacaugauagguaugguaggaggagcccaaggcacgcaaccuggacgagacggcgucguccgcgucugggacgucaaaaacccggacuuacuaaacaaccaauucggaacaaugccgucauuaacacuagccugccucaccaaacagggccaaguagaccucaacgacgcaguccucgcccuaaccgaucuaggccuaaucuacaccgcaaaguaccccaacuccuccgaccucgaccgccucucccaaucacacccaauucuaaacaugguagacacaaagaaauccucauuaaacauaucaggguacaacuucucccuaggcgcggcggucaaagccggcgccugcaugcucgacggcggcaacaugcucgaaaccaucaaaguaaccccacaaaccauggacggcauacuaaaaucgauccucaaagucaaacgcagccuaggcauguucgucagcgacaccccuggcgaacgcaaccccuacgaaaacauacucuacaaaauaugucuaucaggcgacggauggcccuacaucgcauccagaacaagcauagucggacgagcaugggaaaacaccacagucgaccucgaaucagacggcaaaccacaaaaagucggcaccgcaggcucaaauaaaucccuccaaagcgccggcuucccaaccggccucaccuacucacaacucaugacccucaaagacuccaugaugcaguuagaccccuccgcaaaaaccuggaucgacaucgaaggcagacccgaagaccccgucgagaucgcccuauaccaacccaugagcggaugcuacauacacuucuuccgcgaaccaaccgaucuaaagcaauucaaacaagacgccaaauacagccacgggaucgacgucgccgaccucuuccccgcacaaccaggucuaacauccgcaguaaucgaagcccucccccgaaacaugguacuuaccugccaaggaagugacgacaucaaaaagcuccucgacucacaaggccgaaaagacauuaaacucaucgacauugcccucucaaaaguagacucacgacguuucgaaaacgcugucugggaccaaugcaaagaccucugccacaugcacaccggcgucgucgucgagaaaaagaaacgaggcggcaaagaggaaaucaccccacauugcgcccucauggacugcauaauguacgacgcagcaguaagcggcggacucaacauacccguccuacgcgccguccuacccagagauauggucuuucgcaccuccucccccaaaguaguccucuaa

SEQ ID NO: 9581 - RNA, 1710 nt, Artificial Sequence
  derived and/or modified CDS sequence (opt11) from LASV(ISTH2010-NIG-2012;Clade II)__AIT17483__NP
auguccgcuucaaaagaagucaaaucauuccuuuggacccaaucccuacgacgugagcucagcgguuacugcagcaacauaaaacuacaggucgugaaagacgcccaagcgcuacuucacggacucgacuucagcgaggucuccaacguccaacgacucaugagaaaacaaaaacgcgacgacucagaccuuaaaagacuucgagaccucaaucaagccguaaacaaccucgucgaacuaaaauccacccaacagaaaagcauccuucgcgucggcacacucaccuccgacgaccugcuaacccuagccgccgaucucgaaaaacucaaaucaaaagucaucaggaccgagcgcccccuauccucaggcgucuacauggguaaccuauccacccaacaacucgaacaaaggcgagcccugcuaaacuuaaucggcauggucggcggcgcccaaggcacccaaccaggacgagacggcgucguccgaguaugggacgucaaaaaccccgaccuacucaacaaccaauucggcacgaugccaagccucacccucgccugccucacuaaacaaggacaagucgaucuaaaugacgccguccuggcgcucacagaccuaggacucauauacacagccaaauaccccaacuccuccgaccucgaccgccuaucacaaagccaccccauucucaacaugguagacaccaagaaaagcagccucaacaucagcgguuucaacuucucacuaggcgcggccgugaaagcgggagccugcaugcuagacggcggcaauaugcucgaaacaaucaaaguaacaccacaaaccauggacggcauacucaaaagcauccucaaagugaagaaaucacucggcauguucguauccgacacuccaggcgaacguaacccauacgaaaacauccucuacaaaaucugccuuuccggcgacggcuggcccuacaucgccuccagaaccucaaucgucggcagagcuugggaaaacacgaccguagaccuagaaucugacggcaaaccacacaaagucggcaccgccggcuccaacaaaagccugcaauccgccggauucccaaccggccuaacauauucacaacucaugacccucaaagacuccaugaugcaacuggaccccagcgccaaaacauggauagacauagagggccgcccggaagaccccguggaaaucgcccucuaccaacccaugagcggcugcuacauacacuucuuccgugaaccaacggaccuaaaacaauucaaacaagacgcuaaauacucacacggcaucgacguagccgaccucuuccccgcccaacccggccucaccagcgccguaauugaagcacuaccccgcaacaugguccuuaccugccaaggauccgacgacauaaaacgccuacucgacucacaaggacgccgcgacauaaaacucauagacauagcccuauccaaagccgauucccggcguuucgaaaacgcaguuugggaccaaugcaaagaccuaugccacaugcacacaggcgucgucguagagaaaaagaaacgcggcggaaaagaagaaauaacaccucacugcgcccucauggacugcauaauguaugacgcagcaguauccggaggccucaacauaccaguacuacgggcgguccuuccacgcgacaugguauuccgaacaagcucaccaaaagucguccucuga

SEQ ID NO: 9582 - RNA, 1710 nt, Artificial Sequence
  derived and/or modified CDS sequence (opt11) from LASV(ISTH2020-NIG-2012;Clade II)__AIT17491__NP
augucggccuccaaagaagucaaauccuuccucuggacacaaucccuacgccgugaacuauccggauacugcucaaacaucaaacuccaagugguaaaggacgcccaagcacuacuacacgggcucgacuucuccgaagucucaaacguacagcgccucaugcgcaaacaaaaacgcgacgacggcgaccucaaacgccuucgcgacuuaaaccaagccgucaacaaucuagucgaacuaaaauccacccaacaaaagucgguacuaagagugggaacacuaacuagcgacgaccuacuuacccucgcugccgaccucgaaaaacuuaagucaaaagugauccgcaccgagcgaccgcuauccucaggcgucuacaugggcaaccuaucaacccaacaacucgaacagcgacgggcccuccuaaguaugaucggaaugguaggcggagcccgaggaacccaaccaggccgagacggcgucguccgcgucugggacgucaaaaacccagaccuccucaacaaccaauucggaacaaugccaucucucacccucgccugccucacaaaacagggccaagucgaccucaacgacgucguacuagcacucacagaccuaggacuaaucuacaccgcgaaauaucccaauucauccgaccucgaccgccuaucccaaucucacccaauccugaacauggucgacaccaagaaauccagccucaacauauccggcuacaacuucucccucggcgccgccgucaaagccggugccugcaugcuagacggcggcaacauguuagaaaccaucaaagucaccccacaaaccauggacggaauccucaaguccauccuaaaagucaagaaaucccucggcauguucgucuccgacacacccggcgaacgcaacccauacgaaaacauccuauacaaaauaugccuuuccggcgacggcuggcccuacaucgcaagccgcacauccaucguaggacgagccugggagaacacaacaguagaccucgagagcgauggaaaaccccaaaaagucggcgccgccggauccaauaaaucccuacaauccgcgggcuucccaaccggacuaaccuacucccagcuaaugacccuuaaagacaguaugaugcaacuugaccccucagcaaaaaccuggaucgauaucgaaggcagacccgaagaccccguagaaauagcacucuaccaacccauguccggcugcuauauacacuucuuccgcgaaccaaccgaccucaaacaauucaaacaagacgcaaaauauucccauggcauagacgucaccgaccucuucuccgcacaaccaggacucaccagcgccguaaucgaagcccucccccguaacaugguccuaaccugccaaggcagcgaugacaucaaaagacuccucgacucgcaaggccgccgcgacaucaaacucaucgacauagcacuaagcaaagccgacucacgacgcuucgaaaacgcagucugggaccaaugcaaagaccucugccacaugcacacaggcgucgucguggagaaaaagaaacgaggcgggaaggaagaaauaacuccgcacugugcccucauggacugcauaauguacgaugcagccguuucugguggccucaacauacccguccucagagccguccugcccagagacaugguauuccgcaccuccagcccuaaaguaguacucuaa

SEQ ID NO: 9583 - RNA, 1710 nt, Artificial Sequence
  derived and/or modified CDS sequence (opt11) from LASV(ISTH2025-NIG-2012;Clade II)__AIT17495__NP
augagcgcaucaaaagaagucaaaucauuccucuggacccaaucccuacgccgcgaacuaucaggauacuguucaaacauaaaacugcaaguggucaaagacgcccaagcccuccuccacggacucgauuucuccgaagucuccaacguccaacgccucaugagaaaacaaaaacgagaugacucagaccucaaacgccuacgcgaccucaaccaggcagucaacaaccucgucgaacucaaauccacacaacaaaaauccauacuacgggucggaacccucaccagcgacgaccuucucacccuagcagcugaccuggagaaauuaaaaucaaaagugauccgcacagaacgcccacuauccucaggcguauauaugggcaaccuaaguacacagcaacuagaacaacgccgugcccuccucaacaugaucgggauggucggcggcgcacaauccgcacagcccggccgcgacggcgucguuagaguaugggacgucaaaaacccagaccuccucaacaaccaauucggaaccaugcccucacucacccuugccugccuaaccaaacaaggacaagucgaccucaacgacgccguccuagcccucacggaccuaggucucaucuacacagcaaaauacccaaacuccuccgaccuagaccgccugucgcaaucacacccaauacucaacaugguagacaccaagaagucaucccuaaauaucagcggcuucaacuucucacucggagccgcagucaaagccggagcaugcaugcucgacggaggcaacaugcucgaaacaaucaaaguaaccccacaaaccauggacggcauccugaaguccauccucaaagucaaacgaucacuaggaauguucguuagcgacgcgcccggcgaacgcaauccauacgaaaacauacucuacaaaauaugccucucaggagacggauggcccuacauugccucccgcacauccauugugggccgcgccugggaaaacaccacagucgaccuagaaucagacggaaaaccacaaaaaguagggaccgcaggcuccaacaaaucacuccaauccgccggauucccaacaggacucaccuacucccaacuaaugacccucaaagacagcaugaugcagcuugacccaagcgccaaaaccuggaucgauaucgaaggacgcccagaagacccagucgaaauagcccuauaccagcccaugucaggcugcuacauccacuucuucagagaaccaaccgaccuaaaacaauucaaacaagacgcaaaguacagccacggcaucgacgucgccgaccucuucccagcccaacccggccucaccucugccgucauagaggcccuaccucgcaacaugguccuaaccugccaaggauccgacgacaucaagaaacuccucgauagccaaggccgcagagacaucaaacucaucgacauagcccucucaaaagcagacucccgccgcuucgaaaacgcagucugggaccaaugcaaagaccucugccauaugcacaccggaguaguugucgaaaagaagaaacggggugggaaagaagaaaucacaccgcacugcgcccucauggacugcaucauguacgacgcggccguaucaggaggccucaacauaccuguacuaagagcaguccucccccgcgacauggucuuccgcaccuccucccccaaagucguccuauaa

SEQ ID NO: 9584 - RNA, 1710 nt, Artificial Sequence
  derived and/or modified CDS sequence (opt11) from LASV(ISTH2031-NIG-2012;Clade II)__AIT17499__NP
augucagcauccaaagaggucaaauccuucuuauggacccaaagccuccgccgcgagcuauccgguuacugcuccagcaucaaauuacaaguagucaaagacgcccaagcccuacuccacggacucgacuucucagaggucuccaacguccaacggcuaaugagaaaacaaaaacgugacgauucggaccucaaacgucuccgagaccuuaaccaagccgucaacaaccuugucgaacuaaaaucaacccagcaaaaauccauccucagagucggcacccucaccucugacgaccuccuaacccucgcagcagaccucgaaaaacucaaaagcaaagucauccgcaccgaacgaccacucagcucaggcguauacaugggcaaccucuccacgcagcaacucgaacaacgccgcgcccuacucaacauaauaggcaugguuggcggagcgcaagggacccagcccggcagagacggagucguaagagucugggacgucaaaaaccccgaccuacucaacaaccaauucggaaccaugcccucgcucacacucgccugcuuaaccaaacagggccaaguagaccuaaaugacgccguauuagcccucaccgaccugggccuuaucuauaccgcuaaauacccaaacuccuccgaucucgaucgccuaucacaaagccacccaauacuuaacauggucgacaccaagaaauccucccuaaacauauccggcuacaacuucagccuaggugcagccgucaaagccggcgccugcaugcucgacgguggcaacaugcucgaaaccauuaaaguaaccccacaaacgauggacggcauccugaaaucgauccuaaaagucaaacgcucccucggaauguucgucuccgacacccccggcgaaagaaacccauaugaaaacauccuuuacaagaucugccuguccggcgacgguuggccauacaucgccucccgaacaucaaucgucggacgcgccugggaaaauaccaccgucgacuuagagucagacgguaaaccccaaaaagucggcgccgccggcuccaauaaaucccuacaaucggccggauucccaaccggacugacguacucccaacuuaugacucuaaaagacucgaugaugcaacucgacccauccgcaaaaacauggauagacauagaaggccgccccgaagaccccgucgaaaucgcacucuaucaacccauguccggcugcuacauucacuucuuccgcgaaccaacagaccucaaacaauucaaacaagacgccaaauacucacacggcauagacgucgccgaccucuucccagcgcaaccuggucucaccucagccgucaucgaagcccuuccccgaaacaugguacuaacaugucaagguuccgacgacgucaaacgccuacucgacucacaaggccgacgcgacauuaagcucaucgacaucgcccucuccaaagccgacucgcggcgcuucgaaaacgcagugugggaccaaugcaaggaccuaugccacaugcacacuggagucgucgucgaaaagaagaaaagaggcggaaaagaagaaauaacaccccacugcgcacucauggacugcaucauguacgacgccgcaguauccggaggccuaaacauccccguacuacgcgcaguccucccucgagacaugguguuccgcaccagcucaccaaaaguaguccuauaa

SEQ ID NO: 9585 - RNA, 1710 nt, Artificial Sequence
  derived and/or modified CDS sequence (opt11) from LASV(ISTH2037-NIG-2012;Clade II)__AIT17503__NP
augagcuccagcaaagaggucaaaucauuccuauggacccaaucacucagacgagaacucuccggcuacugcucuucaaucaaacuccaagucguaaaagacgcacaagcccuccuccacggccucgacuucuccgaagucuccaacguccaaagacuaaugaggaaacagaaaagagacgacagcgaccugaaacgacuacgcgaccucaaccaagccgucaacaaccucgucgaacucaaaucaacucaacaaaaaagcauacuacgagucggcacccucaccuccgaugaccuacucacacucgccgcagaccuagaaaaacuaaaaucaaaaguaaucaggacagagcgaccccuuucaagcggcgucuacaugggcaaccuaagugcccaacaacucgagcaacgccgcgcacuacugaacaugaucggcauggucggcggcgcccaaggcacccaacccggccgagacggcgucguccgcgucugggacgucaaaaaccccgaccuccuaaacaaccaauucgggaccaugcccucacucacacucgccugccucaccaaacaaggccaaguggaccucaacgacgcaguccuagcccuaacagaccuaggacugaucuacaccgcaaaauaccccaacuccucagaccuagaccgacuaucacaaagccacccaaucuuaaacauggucgacacaaaaaaauccucccuaaacaucuccggauacaacuucucacucggagccgccgucaaagccggagccugcaugcuggacggaggcaacaugcucgaaaccaucaaagucacuccacaaaccauggacggcauccuaaaaucaauccucaaagucaaaaaaucccucggcauguucgucagcgacacucccggcgagcgaaaucccuacgaaaacaucuuguacaaaaucugccuuuccggagacggauggccauacaucgccagccgcaccuccauugucggcagggccugggaaaacacaacugucgaccuugagucagauggcaaaccccaaaaaguaggcaccgccggcucaaacaaaucacuccagagcgcaggauuccccaccggacuaaccuacagccaacucaugacccuaaaagacuccaugaugcaacuagaccccagcgcuaagaccuggaucgacauagaaggcaggcccgaagaccccguagaaaucgcacuauaccaacccaugagcggcugcuacauccacuucuucagagaaccgacagaccucaaacaauucaaacaagacgcaaaauacucacacggaaucgacguagccgaccucuuccccgcacagcccggucuaacguccgccgucauugaagcacuaccccgcaacaugguccuuaccugccaagguucugaugacaucaaacgccuccucgacucacaagggcgaagggacauaaaacuaauagacauagcacucuccaaagcggacagccgucgcuucgagaacgcggucugggaccaaugcaaagaccuuugccacaugcacaccggcguagucguagaaaaaaagaaacgcggaggaaaagaggaaauaaccccccacugcgcccugauggacugcaucauguacgacgcagcaguauccggaggccugaacauccccguccucagagccguccuaccgcgcgacaugguauuccgaacuuccucccccaaagucguacucuga

SEQ ID NO: 9586 - RNA, 1710 nt, Artificial Sequence
  derived and/or modified CDS sequence (opt11) from LASV(ISTH2042-NIG-2012;Clade II)__AIT17507__NP
augagcgccucaaaagaaguaaaaucauuccuauggacccaaucccuacgaagagaacucucaggauacugcuccaacauaaaacuccaggucgucaaagacgcccaagcacuccuacacgggcuagacuucucagaagucuccaacguccaacgacuaaugcgaaaacaaaaacgggacgacuccgaccugaaacgacucagagaccugaaccaagccgucaacaaccucguagaacucaaauccacacaacaaaagagcauccuccgcgucggaacacucacgagcgacgaccuccucacccuagccgcugaccucgaaaaacugaaauccaaagucauccgcacggagcggccccuaagcuccggcgucuacauggguaaccuaucaacccaacaacucgaacagcgccgcgcccuacucaaucucauuggaaugguaggcggcgcacaaggaacucaaccaggccgcgacggcguaguccgcgucugggacgucaaaaacccggaccuccucaacaaccaauucggaacaaugccaucacuuacgcuagccugccugaccaaacaaggccaaguagaccucaacgacgccguucucgcccucacggaccucggacuaaucuacaccgccaaauacccaaauagcucagaccuagaccgccucagccagucacaccccauacucaauauggucgacaccaagaaaucaucauuaaacaucuccggcuucaacuuuucacucggcgccgccgucaaagcgggagccugcaugcucgacggcggcaacaugcuugaaaccaucaaaguaacgccccaaacaaucgacggcauccucaaaucuauacugaaagucaagaaaucccucggcauguucguaagcgacaccccaggagaaagaaacccauacgaaaacauccucuacaaaaucugccuguccggagacggauggcccuacauugcaagccgcaccagcauaguaggccgagccugggaaaacaccacaguagacuuagagagcgacggaaaaccgcacaaagucggaaccgccggcagcaauaaaucccuacaauccgcaggauucccaacaggacucaccuacagccaacucaugacccucaaagacuccaugaugcaacucgaccccucggcaaaaacauggauagacauagaaggacgccccgaagaccccguagagaucgcccucuaccaaccaauguccggaugcuacauccacuuuuuccgagaacccacagaccuaaaacaguucaaacaggacgccaaauacagccacggaaucgacguagcagaccucuuccccgcccaacccggccuaacauccgccguaaucgaagcacucccccgaaacaugguccuaaccugccaggggagcgacgauaucaaacgccuccucgacucacaaggaagacgcgacaucaaacucauagacauagcucugucuaaagucgacucccgccgauucgaaaacgccguaugggaccaaugcaaggaccuaugccacaugcacaccggagucguagucgagaaaaagaaacggggcggcaaagaagaaaucacaccccacugugcccucauggauugcaucauguacgacgcagcagucucaggcggccucaacauccccguauuacgggcaguccuaccccgcgacaugguauuccgcacaucaucacccaaagucguacucuag

SEQ ID NO: 9587 - RNA, 1710 nt, Artificial Sequence
  derived and/or modified CDS sequence (opt11) from LASV(ISTH2046-NIG-2012;Clade II)__AIT17511__NP
augagcgcguccaaagaaguuaaauccuuccuuuggacccaaucccuacgccgcgaacuaucaggauacugcuccaacaucaaacuacaaguaguaaaagacgcacaagcccuacuccacggacuggacuucucagaaguaucaaacguccagcgccucaugcgcaaacaaaaacgcgacgacggcgaccucaaaagacuacgcgaccucaaccaagccguuaacaaccucgucgaacuaaaaagcacacaacaaaaauccauccuacgcguaggcacccuaacuuccgacgaccuacucacacuagcagccgaccucgaaaaacuaaaaucuaaagucauccgcaccgaacgacccuuauccucaggcgucuacaugggaaaccucagcacacaacaacuagaacaaaggcgcgcacuacucaacaugauagguauggucggaggcgcccagggcacccaacccggccgugacggcgucguccgcgucugggacgucaaaaaccccgaccuacucaacaaccaauucggcaccaugccaucacuaacccuagccugccucacuaaacaaggucaaguagaccucaacgacgccguccucgccuuaaccgacuuagggcuaauauacacagcuaaauacccaaacagcuccgaccuugaccgacuaagucaaagccaccccauccucaacaugguagacaccaagaaaagcagccucaacaucucaggcuacaacuucucccuuggcgccgccgucaaagccggagccugcaugcucgacggcggcaacaugcucgaaaccauaaaagucaccccacaaaccauagacggaauccuaaaauccauccuaaaagucaagaaaucgcuaggcauguucgucucagacaccccaggcgaacgcaaccccuacgaaaacaucuuauauaaaaucugccucucaggcgauggcuggcccuacaucgcaucacgaacgagcauagucggacgggcgugggaaaacaccacaguagaccuagaauccgacggaaaaccccaaaaagucggcacagccggcucaaacaaaucacuucaaucagccggcuuccccaccggccucacguacucacaacucaugacacugaaagacucuaugaugcaacucgacccauccgcaaaaaccuggaucgacaucgaaggcaggcccgaagaccccgucgagaucgcccucuaccaaccuauguccggcugcuacauccacuucuuccgcgagccgacagaccuaaaacaauucaaacaagacgcuaaguacucccacggcauagacguaacagaccucuucagcgcccaacccggccuuaccuccgccgucaucgaagcccucccccgaaacaugguccugacaugucaaggcuccgacgacauaaaacgccuccucgacucccagggacgacgcgauauaaaacuaaucgacaucgcacucucaaaagccgacucaagaagauucgaaaacgcagucugggaccagugcaaagaccucugccauaugcacacaggcgucgucgucgaaaagaagaaacgaggcggaaaagaggaaaucaccccgcacugcgcacuuauggacugcaucauguacgacgccgccguaucaggcggccuaaacauccccguccuccgcgcuguccucccacgcgacaugguauuccgcaccuccucacccaaaguaguccuuuaa

SEQ ID NO: 9588 - RNA, 1710 nt, Artificial Sequence
  derived and/or modified CDS sequence (opt11) from LASV(ISTH2050-NIG-2012;Clade II)__AIT17515__NP
augagcgccuccaaagaagucaaaucauuccuauggacccaaucccuccgccgagaacucagcggauauugcuccagcaucaaacuacaagucgucaaagacgcccaagcccuacuccauggccucgacuucuccgaaguaagcaacguccaacgacuaaugcgcaaacagaaaagagacgacagcgaucucaaacgucuccgagaccucaaccaagcagucaauaaccucgucgaacucaaaucaacgcaacaaaaaucaauccuacgcgucgguaccuuaacaagcgacgaccuccucacacucgccgccgaccucgaaaaacucaaaucaaaagucauccgaacagagagaccacuauccagcggugucuacauggggaaccucuccacccaacaacuagaacaacgccgcgcccuacuuaacaugaucggcauggugggcggagcccaaggaacccaaccgggaagagacggagucguacgcgucugggacguuaaaaaccccgaccuccucaacaaccaauucggaacaaugcccucgcuaacccucgccugccuaacaaaacaaggccaaguagaccuaaacgacgccguccuagcccucacugaccuuggacuaaucuacacagcgaaauacccgaacagcucggaccuggaccgacucagccaaucccacccaauccuaaauauggucgacacaaagaaaucuucucugaacaucagcggcuacaacuucucccucggagcagccgucaaagcaggagcuugcaugcuagacggcggcaauaugcuagaaacgaucaaagucacaccccagaccauggacggcauacuaaagagcauccuuaaaguaaaacgcagccuuggcauguucguguccgacaccccaggcgagcgcaaccccuacgaaaacauccucuacaaaaucugccuauccggagauggcuggcccuacaucgccucccgcacgaguaucgucggcagagccugggaaaacaccacagucgaucucgagucagacggcaagccccaaaaaguaggagcugccggcuccuccaagucccuccaaucagccggauuccccaccggacuaaccuacucccaacucaugacacucaaagacuccaugaugcaacuagaccccuccgccaaaacauggaucgacaucgaagggcgcccagaggaccccgucgaaaucgcacuauaccaacccguauccggaugcuacauccacuuuuucagagaacccaccgaccuaaaacaauucaagcaagacgccaaauacagccacggcauagacgucgccgaccucuucccagcacaacccggccucacauccgccguaaucgaagcccucccaagaaacaugguccuuaccugccaaggcucagacgacauaaaaaggcuacuagacucacaaggacgccgagacauaaaacuuauagacaucgcccucuccaaagccgacucccgccgcuucgaaaacgcagucugggaccaaugcaaagaccucugccacaugcacacaggagucguaguagaaaagaagaaacgaggcggaaaagaagaaaucacaccccacugcgcacuuauggacugcaucauguacgacgcggccguauccggaggccuaaacauaccaguccuccgagcaguacuaccccgcgacaugguauuccgcaccuccuccccaaaaguaguacuauaa

SEQ ID NO: 9589 - RNA, 1710 nt, Artificial Sequence
  derived and/or modified CDS sequence (opt11) from LASV(ISTH2057-NIG-2012;Clade II)__AIT17519__NP
auguccgccagcaaagaaguuaagucauuccuauggacccaaucacuccgacgcgaacuauccggcuacugcuccaacauaaaacuccaaguagucaaggacgcccaagcccugcuccacggccucgacuucuccgaagucuccaacguccaacgccuaaugcgcaaacaaaaacgcgacgacucagaccuaaaacgccuccgcgaccuuaaccaagcaguaaacaaccucgucgagcucaagucaacccaacaaaaauccauccuccgagucggcacccucaccagcgacgaccuccugacccuugccgccgaccucgaaaaacugaaaagcaaagucaucaggacagaacgcccacuaucaagcggugucuacaugggaaaccucuccgcacaacaacucgaacagcgacgcgcccuccuaaacaugauaggcaugguaggaggcgcccaaggcacacagccaggccgagacggagucguucgcgucugggacgucaaaaaccccgaccuccuaaacaaccaauucggcacaaugcccucccugacccucgcuugccucacaaagcaaggccaagucgaccucaacgacgccguacuagcccuaaccgaucucggacuaaucuacaccgcaaaguaccccaacucuagcgaccuggaccgccuaucccaaucccaccccauacuaaauaugguagacacaaagaaaucaucucucaacaucuccggcuucaacuucucacuaggcgcugcagucaaagccggcgccugcaugcuugacggaggcaacaugcuagaaaccaucaaaguaacaccccaaacaauggauggcauacucaaauccauccucaaagucaagcgaucccucggcauguucguaucagacacucccggagaacguaaccccuacgaaaauauccucuacaaaauaugccuaagcggcgacggauggcccuacaucgccucccgaacuagcauaguaggcagagcaugggaaaacacuacagucgaccuugaaucagacggcaaaccccaaaaagucggcaccgccggcuccaauaaaagccuacagucagcuggauuccccacaggacucacauacagccaacucaugacacuaaaagacuccaugaugcaacucgaccccuccgccaaaaccuggaucgacaucgaaggccgacccgaagacccugucgaaaucgcccucuaccaaccaauguccggaugcuauauacacuuuuuccgagaaccaaccgaccucaaacaauucaaacaagacgcuaaauacucacacggcaucgaugucgccgaccucuuccccgcacagccaggacucaccuccgcugucauagaggcacuacccaggaauauggucuuaaccugccaaggaagcgacgacaucaaacgccuacuagacagucaaggacgaagagacaucaaacuaaucgacauagcccucucaaaggcagacucccggcgauuugaaaacgcaguaugggaccaaugcaaggaccucugucacaugcacaccggagucgucguugaaaagaagaaacgaggcggcaaagaagaaaucacaccacacugcgcacugauggacugcauaauguacgacgccgcaguauccggaggccuuaauauucccguccuccgcgccgugcucccacgcgacaugguauucagaacuagcucaccaaaagucguccucuaa

SEQ ID NO: 9590 - RNA, 1710 nt, Artificial Sequence
  derived and/or modified CDS sequence (opt11) from LASV(ISTH2064-NIG-2012;Clade II)__AIT17525__NP
augagcgcaagcaaagaaguaaaauccuuccucuggacccaaagccugcgccgcgaacucucaggcuacugcucaucaaucaaacuccaagucgucaaagacgcccaagcccuccuccacggccuagacuucagugaaguauccaacguccaacgacugaugagaaaacaacgucgcgacgacagcgaccuaaaaagacuccgcgaucucaaccaagccgucaacaaccugguagaacugaaauccacccaacaaaaaucaauccuacgaguaggcacacucacaagugacgaucuacucacccucgcagccgaccuagaaaaacuaaaaucgaaagucauacgaaccgagcgaccgcugucauccggagucuacaugggcaaccucagcacacaacaacucgaacaacgaagggcacuccucaacaugaucggcauggucggcggugcccagggcacacaacccggcagagacggcgucguccguguaugggacgucaaaaacccggaccuacucaacaaccaguucggcaccaugcccagccuaacgcucgcaugccucacuaaacaaggacaagucgaccucaacgacgccguacuagcccuuaccgaccucggacucauauacaccgccaaauacccaaacuccuccgacuuagacagacuaucccaaucucacccgauacucaacaugguugacacaaagaaaucaucacucaacaucuccggauacaacuucucacuaggcgcagccgucaaagccggggccuguaugcucgacggcggcaacaugcucgaaacaauaaaagucacaccccaaaccguagacggcauccuaaaauccauccugaaggucaaaagaucccuaggcauguucgucagcgacaccccuggcgaacgaaacccuuacgaaaacauccuuuacaagaucugccucuccggagacggcuggcccuacauagcaagccggaccagcaucgucggacgagccugggagaacaccaccguagaccuagaguccgacggcaaaccacaaaaaguaggaaccgcaggaagcaacaaaagccuccaauccgccggcuuccccacuggacuaacauacucccaacucaugacccuaaaagacagcaugaugcaacuagaccccucugccaaaaccuggaucgauaucgaaggaagaccagaagacccaguagaaaucgcccuuuaccaacccauguccggaugcuacauucacuucuuccgcgaacccacugaccucaaacaauucaaacaagacgcgaaauacagccacggcaucgacguagccgaccuauuucccacccaaccaggccugaccuccgccgucaucgaggcccucccucgaaacaugguccugaccugccaaggcucggacgacauaaaaagacuccucgacucucaagggcgccgagacaucaaacucaucgacauugcccucuccaaagccgacucccgcaaauucgaaaacgcagucugggaccaauguaaagaucucugccacaugcacaccgggguuguaguugaaaagaagaaacgcggcggaaaagaagaaaucacaccccacugcgcccuaauggacuguaucauguacgacgccgcagugagcggcggacucaacauacccguccuaagagccguacucccccgcgacauggucuucagaaccucaucucccaaagucguccuauga

SEQ ID NO: 9591 - RNA, 1710 nt, Artificial Sequence
  derived and/or modified CDS sequence (opt11) from LASV(ISTH2065-NIG-2012;Clade II)__AIT17529__NP
augucagccucaaaagaagucaaaucauuccuauggacccagucccuacgccgcgaacuauccgguuacugcuccaacaucaaacuccaaguagucaaagaugcccaagcccuacuccacggccucgacuucucugaaguaaacaacguacaaagacuaaugcgcaaacaaaaacgagacgacucagaccugaaaagacuccgagaccucaaccaagccgucaacaaccucguggaacucaagagcacacaacaaaaauccauccuccggguagguacgcucacgucagacgaucuccugacacucgcagcagaccuagaaaaacucaaguccaaaguaauacgcaccgaacgaccacucuccagcggcguauacaugggcaaccuaagcacccaacagcuagaacaacgccgcgcccuucucaacaugaucggcauggccgggggcacacagggcacccaaccaggacgcgacggaguagucagagucugggacgucaaaaacccagaucuccucaauaaccaauucggcaccaugcccagccugacccucgccugccucacaaaacaaggacaagucgaucucaacgacgccguccucgcacugacugaccucggccucauauauaccgccaaauaccccaacagcuccgaccucgaccgccuaucccaaucccacccaauacuaaacaugguagacaccaagaaauccagccucaacauaucgggauacaauuucagucuaggcgccgcagucaaagcaggcgccuguaugcucgacgguggcaauaugcuagaaacaaucaaaguaacaccccaaaccauggacggcauacuuaaauccauccucaaagucaaaagaucgcucggcauguucguaagcgacacccccggagaacgcaaccccuacgagaacauccucuacaaaaucugccuaucaggcgacggauggcccuacaucgccucuagaaccuccauagucggccgugcaugggagaacaccacagucgaccucgaauccgacggaaaaccacaaaaaguagguaccgcaggcuccaacaaaucccuccaaucggccggauuccccaccggacuaaccuacucccaacugaugacacucaaagacagcaugaugcaacucgacccauccgcaaaaaccuggaucgauauagaaggacgccccgaagaucccgucgaaauagcacucuaccaaccaaugagcggaugcuacauacacuucuuccgcgaacccaccgaccucaaacaauucaaacaagacgcaaaguacucccauggaaucgacgucgcagaccucuuccccgcccaacccggacucacaagcgccgucauugaagcacuaccccguaacaugguacuaaccugccaaggcucagacgacauaaagaaacuccucgacucccaaggacgccgagacaucaaacucauagacauaucccucucuaaaaucgacucucgaaaauucgaaaacgccgugugggaccaaugcaaagaccucugccacaugcacacaggcgucguugucgagaaaaagaaacggggcggcaaagaagaaauaacaccccacugcgcacuaauggacugcaucauguucgacgcagcagucucaggcggccucaacauucccguccuacgcgccgugcuccccagagacaugguauuccgaaccucuucacccaaaguuguccucuaa

SEQ ID NO: 9592 - RNA, 1710 nt, Artificial Sequence
  derived and/or modified CDS sequence (opt11) from LASV(ISTH2094-NIG-2012;Clade II)__AIT17539__NP
augucagcauccaaagaaguaaaaucauuccuguggacccaaucacuccggagagaacuauccggcuacugcuccaacaucaagcuacaagucgucaaagacgcccaagcacuccuccacggacucgacuucagcgaaguaagcaacguacaacgucuuaugcgaaagcaaaaacgagacgacggcgaccucaagcgccuuagggaccucaaccaagccgucaauaaccucguugaacucaaauccacgcagcagaaaagcguccuaagggucggcacacucaccucagacgaccuccucauacucgcagccgaccucgagaaacuaaaauccaaaguuauacgcacagaaagaccccuauccucuggcgucuacaugggcaaccucagcacacaacaacuagaacaacgcaaagcacuccucagcaugauaggcauggucggaggcgcacaagguacccaacccggccgcgacggcgucguccgcguuugggacgucaaaaaccccgaucuacucaacaaucaauucggaacaaugccuucccucacccuagccugccuuaccaaacaaggccaaguagaccucaacgacgccguccuggcucucacagaccugggccuaaucuacacggcuaaauacccaaacaguagcgaccuagaccgccuaucccaaucacaccccauucucaacauggucgacaccaagaaauccucacuaaacaucagcggcuacaacuuuucacucggagcugccguaaaagcaggagccugcaugcucgacggaggcaacaugcucgaaaccauaaaagucacaccccaaaccauggacggaauacucaaaagcauacucaaagucaaacgcucacuaggcauguucguaagcgacacccccggagaacgcaaccccuacgaaaacauacucuacaaaaucugccucucaggcgacggcuggcccuacaucgccagccgcaccuccaucgucggccgagccugggaaaacaccacaguagaucucgaauccgacgguaaaccccaaaaaguaggauccgccggcagcaacaaaucacuacaauccgccggcuuccccacaggucuaacauacucacaacucaugacgcucaaagacucaaugaugcaacucgacccauccgcaaaaaccuggaucgacauagaaggccggccagaggaccccguagaaaucgcccuguaccaacccaugucaggcugcuacauacacuucuuccgggaaccaaccgaccucaaacaauucaaacaagacgcuaaauacagccauggcauagacgucaccgaccucuucucagcacaacccggucuaaccuccgccguaaucgaagcccuaccccgcaacaugguccuaacaugccaaggcagcgacgacaucaagaaauugcuagauucgcaaggccgccgcgacauaaaacucaucgacaucucccuaggcaaagccgauucccgacgcuucgaaaacgcagucugggaccaaugcaaagaccucugccacaugcacaccggcgucgucgucgaaaagaagaaacgcggcggaaaagaggaaaucacaccccacugcgcccuaauggacugcaucauguuugacgcggcagucuccggcggacucaacaucccgauccucagagccguccucccccgcgauauggucuuccgaaccucgucccccaaaguaguccucuga

SEQ ID NO: 9593 - RNA, 1710 nt, Artificial Sequence
  derived and/or modified CDS sequence (opt11) from LASV(ISTH2129-NIG-2012;Clade II)__AIT17545__NP
auguccgcauccaaagaaguaaaaucguuccuauggacccaaucccuacgccgcgaacuaagcggcuacugcagcaacauaaaacuacaaguagugaaagacgcacaagcacuccuacacggacuggacuuuucagaagucagcaacgugcaacgccugaugagaaaacagaaacgugacgacuccgaccucaaaagacuucgcgaccugaaccaagcagucaacaaccucgucgaacucaaaucaacccaacaaaaaucaguucugcgcguaggcacccugacgagcgacgaccuacucacccuagccgcagaccucgaaaaacucaaaagcaaagucauccgaaccgaacgaccccuaagcucaggagucuacaugggaaaccuaagcacccaacaauuagaacaacgccgcgcgcuccuaaacaugauagggaugguaggcggagcccaaggaacacagcccggccgcgacggagucguccgaguaugggacgucaaaaacccagacuuacuaaacaaucaauucggaaccaugcccagccuaacacucgcuugccucacaaagcaaggccaagucgaccucaacgacgcaguccuagcccuaacagaccuaggacuaauuuacaccgccaaauacccaaacucaagcgaccuagaccgccuaucccaaucacaccccauccucaacaugguggacacaaagaaauccucacuuaacaucuccggauacaacuucucacucggagccgcgguuaaagccggcgccugcaugcucgacggcggaaacaugcuugaaaccauaaaaguaacaccccaaaccauggacgguauccuaaaaucaauccuaaaagucaagaaaagccuaggcauguuuguauccgacacccccggagaacgcaacccguacgaaaacaucuuauacaaaauaugucuaaguggugacggcuggcccuacaucgcaucacgcaccuccauagucggacgcgccugggaaaacaccacagucgaccuagaauccgacggcaaaccccaaaaaguaggcauagccgguucaaacaaaucccuccaauccgccggauucccaaccgggcucacauacucacaacuaaugacccuuaaagacagcaugaugcaacucgaccccagcgcaaaaaccuggaucgacaucgaaggccgcccagaagacccagucgaaauagcacuguaccagccaauguccggcugcuacauccacuucuucagagaacccaccgaccuaaagcaauucaaacaggacgcuaaauacucacacggcaucgacgucgccgaccuauucucagcgcaaccaggccucaccuccgcaguaaucgaagcccuaccccgcaauaugguccugacaugccaaggcagcgacgacaucaaacgccuccucgacucacaaggacgacgcgacaucaagcugaucgacaucgcgcucucaaaagcggacagccgcaaauucgaaaacgccgucugggaccaaugcaaagaccucugccacaugcacacaggcguagucguagaaaagaagaaacgaggcggcaaagaagaaaucacaccccacugcgcccucauggacugcauaauguacgacgccgccgucagcggcggacucgacauacccguccuacgcgcaguccuuccccgugacauggucuuccgcaccagcucccccaaagucguccucuaa

SEQ ID NO: 9594 - RNA, 1710 nt, Artificial Sequence
  derived and/or modified CDS sequence (opt11) from LASV(ISTH2217-NIG-2012;Clade II)__AIT17549__NP
auguccgcaucaaaagaaguaaaaucguuucuuuggacccaaucacuacgcagagaacucuccggcuacugcucaaauaucaaacuccaaguggucaaagacgcccaagcccuacuccacgggcuggacuucucagaagucuccaacguacaacgacugaugcgaaaacaaaagagagacgacuccgaccuaaaacgccuccgcgaccuuaaccaggcggucaacaaccucguagaacucaaaucaacacagcaaaaauccauccuucgagucggaacccugaccagcgacgaccuccucacccucgccgccgaccuugaaaaacuaaaaagcaaaguuauccgaacagaaagaccccucuccuccggugucuacauggguaaccucagcacccagcaauuagaacagcgacgcgcgcuccucaacaugaucggcaugguuggcggagcccaaggcacccaaccaggacgagacggagucguccgcgucugggacgucaaaaauccggaccuccucaacaaccaguuuggaacgaugcccucacuaacccuggcaugccuaaccaaacaaggacaaguagaccucaacgacguaguacucgcccuaaccgaccuaggacucaucuacacagccaaauacccuaauuccuccgaucuagaccgccuaucccaaucccaccccauacuaaacaugguugacacaaagaaaucuucccuaaacauuucaggauacaacuucucacugggcgcagccguuaaagccggagccugcaugcuugacggcggaaacaugcucgaaaccaucaaaguaaccccacagacaauggacggcauccucaaaucaauccucaaagucaagaaaucacucggcauguucguaagcgacacccccggcgaacgaaaccccuacgagaauauccucuacaaaaucugccucuccggcgacggauggcccuacaucgcgagccgcaccucaauagugggcagggcuugggaaaacacgaccgucgaccuagaguccgacggcaaaccccaaaaagucggcacaguaggcagcaacaaaucacuccaaagcgcuggauuucccaccggccuuaccuacucacagcucaugacccucaaagacuccaugaugcaacucgaccccuccgcuaaaacauggaucgacauugaaggccgacccgaggaccccguagagaucgcacuuuaccaacccauguccggcugcuacauccacuucuuucgagaacccacggaucucaaacaauucaaacaagacgcaaaauacagccacggcauagacgucgccgaccuauucccagcccaacccggccucacauccgccgucaucgaagcccuacccagaaacaugguccuaaccugccaagggagcgacgacaucaaaaagcuccucgacagccaaggacgccgggacaucaaacucauagacaucgcacuaucaaaagcagacucacgcaaauucgaaaacgccgucugggaccagugcaaagaccucugccacaugcacaccggcgucgucgucgaaaagaagaaacgaggaggcaaagaagaaaucacaccccacugcgcccucauggacugcaucauguacgacgcagccgucuccgguggacuaaacauccccguacucagagcaguccuacccagagacauggucuuccgcaccucaucaccaaaaguaguccuauga

SEQ ID NO: 9595 - RNA, 1710 nt, Artificial Sequence
  derived and/or modified CDS sequence (opt11) from LASV(ISTH2271-NIG-2012;Clade II)__AIT17553__NP
auguccgccagcaaagaagugaaauccuuccuuuggacccagagccuucggcgcgaacucagcggcuacugcuccuccaucaaacugcaagucgucaaagacgcucaagcacuacuacacggccucgacuucuccgaggucucaaacguacaacgacucaugcgcaaacaaaaacgggacgacuccgaccucaaacgccuccgagaccucaaucaagccgucaauaaccugguagagcucaaauccacccaacaaaaaucuauucuacgcguaggcacccuaaccagcgacgaccuacucacccucgcugccgaccucgagaagcucaaaucaaaagucauccgaaccgagagaccacuauccagcggcgucuauaugggcaaccuaucuacacaacagcucgaacaacgccgugcccuccucaacaugaucggaaugguaggaggcgcccagggcacacaaccaggccgugauggugucgucagaguaugggacgucaaaaacccagaccuacucaacaaccaauucggcaccaugcccucccuuacccucgcgugccucaccaaacaaggccaaguagacuuaaacgacgccguccucgcacugacagaccuuggccuaaucuacaccgccaaauaccccaacuccucagaccuagaccgacuaucccaaucccacccaauccuuaacauggucgacaccaagaaaucaucgcucaauauaucaggcuacaacuucucccuaggagccgccgucaaagccggcgcaugcaugcucgacggcggcaacauguuagaaacaaucaaagucacaccccaaaccauggacggaauccucaaaagcauccucaagguaaaacgcucacugggcauguucguauccgacacgccaggcgaaagaaacccauaugagaacauccuauacaaaaucugccuauccggcgacggcuggcccuacaucgcaucccgcacaucgaucguuggacgcgcuugggaaaacaccacagucgaucucgaauccgacggcaaaccccagaaaaugggcaccgccggaagcaacaaaucacuacaaagcgcaggcuuccccaccggacuaacauacucacaacucaugacccuaaaagacagcaugaugcaacuagaccccuccgccaagacauggaucgacaucgaaggccgaccagaagacccaguagaaaucgcacucuaccagcccaugucaggcugcuacauccacuucuuccgagaacccaccgaccucaaacaauucaaacaagacgcaaaauacucccacggaaucgacguagcggaccuauuccccgcgcagcccggccucacauccgcggugauagaagcacuaccucgaaacaugguacuuacuugccaaggcucagaugacaucaagaaacuacuagacagccagggccgccgugacauaaaacugaucgacaucgcccucagcaaagccgacucucgcagauucgaaaacgccgucugggaccaaugcaaagaccucugccacaugcauaccggcgucgucguggaaaagaagaaacgcgguggaaaagaagaaaucacaccccacugcgcacucauggacugcauaauguacgacgccgcagucagcggaggccuaaacauccccguacuccgcgccguccuacccagagacaugguauuccgcaccucuuccccaaaagucguccucuaa

SEQ ID NO: 9596 - RNA, 1710 nt, Artificial Sequence
  derived and/or modified CDS sequence (opt11) from LASV(ISTH2312-NIG-2012;Clade II)__AIT17561__NP
augucggccuccaaagaagucaagagcuuccuauggacccaaucccuccguagagaacucagcggcuacuguuccaacauaaaacuccaagucgucaaagacgcgcaggccuuacuacauggucuagacuucucagaaguaucaaacgugcaacgacugaugagaaaacaaaagcgcgacgacuccgaccugaaacggcuacgcgaccucaaccaagccguuaacaaccucguagaacuaaaaagcacccaacagaaaagcauccuccgagucggcacgcucacuuccgaugaccuccugacucucgcagccgaccucgaaaaacucaaaucaaaaguaauccgcacggaacgcccccugagcagcggcguuuacaugggcaaccuaagcacccaacaacuagaacagcgacgggcacugcugaacaugauuggaaugguaggcggagcacaaggcacccaacccggacgagacggcguaguccgcgucugggacgucaaaaacccagacuuacuaaacaaucaauucggcaccaugccaucacucacccucgccugccucaccaaacaaggacaaguagaccuuaacgacgcgguccucgcccuaaccgaucucgggcucaucuacaccgccaaauacccaaacuccuccgacuuggaccgccuaagccaaagccacccaauccuaaacaugguugacaccaagaaauccucacucaacauuuccggguacaacuucuccuuaggagccgcagucaaagcaggagccuguaugcuagacggcgggaacaugcuagaaacaaucaaagucacaccccaaaccaucgacggcauccucaaaucaauccuaaaagucaagaaaucacucggaauguucgucucagauacccccggagaacgaaacccauacgaaaacauccucuacaaaaucugccucuccggcgauggcuggcccuacaucgcaucacgcaccuccaucgucggccgagccugggagaacaccaccguagaccucgaaagcgacggcaaaccacaaaaaguaggcacaguaggcuccaacaaaucccuccaaucugcgggcuuccccacaggccucaccuacagccaacucaugacacuuaaagacaguaugaugcaacucgacccaagcgccaaaaccuggaucgacaucgaaggccgcccugaagaccccgucgaaauagcucucuaucaacccaugucaggaugcuacauccacuucuuccgcgaacccaccgaccucaaacaguucaaacaagaugccaaauacucacacggcaucgaugucgccgaccucuuucccgcccaaccaggccuaacaucagcagucaucgaagcccuaccccgaaacaugguucuaacaugccaaggcagcgacgacauaaaacgccuacucgauagccaaggacgacgagacauuaaacucaucgacaucgcccuaagcaaagccgacuccagacgcuucgaaaaugcagucugggaccaaugcaaagacuuaugccacaugcacacaggcguugucguagagaaaaagcgccgcggaggcaaagaagagaucacaccccacugcgcccucauggacugcauaauguacgacgccgccguauccgguggacucaauauaccaguccuccgcgcaguacuuccgagagacauggucuuccggaccagcucacccaaagucguccucuag

SEQ ID NO: 9597 - RNA, 1710 nt, Artificial Sequence
  derived and/or modified CDS sequence (opt11) from LASV(ISTH2316-NIG-2012;Clade II)__AIT17565__NP
augucagccuccaaagaaaucaagagcuuccuauggacccaaucacuccgccgcgagcucucaggauacugcucaagcaucaaacuacaaguaguaaaagacgcacaagcucuacuacacggccucgacuucagcgaagucagcaacguacagcgccuaaugagaaaacaaaaacgugacgacagcgaccucaaacgacucagagaccuaaaccaagccgucaacaaccuagucgagcucaaauccacacaacagaaaagcauacuccgcgucggcacccuaacgagcgacgacuuacucacccucgcagcagaccucgaaaaacucaaauccaaagugauccgcacagaacgcccccuaagcagcggcgucuauaugggcaaccucuccacgcaacaacucgagcaacggagagcccuccugaacaugaucggaauggucggaggagcacaaggcacccaacccggccgcgacggcgucgugcgaguaugggacgucaaaaaucccgaccuccucaacaaccaauucgguaccaugccgucucucacccuagcaugccuaacuaaacaaggccaagucgaccugaacgacgccguacucgcccucacggaccucggccuaauauauaccgcaaaauaccccaacagcuccgaucucgacagacucucacaaucacacccaaucuuaaacauggucgacaccaagaaauccucacuaaacauauccggcuacaacuuuucacucggagcagccgucaaggccggggccugcaugcucgacgggggcaacaugcuagagaccauaaaaguaacaccccaaaccauggacggaauccuuaaauccauauuaaaagucaaacgaagccucggcauguucgucuccgacgcgccaggcgaaagaaaccccuacgagaacauacuguacaagaucugccuauccggugauggauggccauacaucgccucccgaaccuccauagucggccgagccugggaaaacaccacaguagaccucgagagcgacggcaagccacaaaaaguagguaccgccggaagcaacaaaucccuacaaagcgccggcuucccaacgggccucacauacagccaacucaugacccucaaagauuccaugaugcaacucgacccaagcgccaaaacauggauugacauagaaggccgcccagaagaccccgucgaaauagcccucuaccaaccaaugagcggaugcuacauccacuucuuucgagaacccacagacuuaaaacaauucaagcaagacgcgaaauacagccacggcaucgacgucgcagaccuauucccagcacaaccaggacuuaccagcgccgucauagaagcccuuccuagaaacaugguauuaacaugccaagggagcgacgacaucaagagacuccuagacucccaaggaagacgggacauaaaacuaaucgauaucgcacucagcaaagcagacucccgcaaauucgaaaacgcuguaugggaccaaugcaaagaccucugccauaugcacaccggggucgucgucgaaaagaagaaacgcggcggaaaagaggaaaucacaccccacugcgcccuaauggacugcauaauguacgacgccgcagucuccggaggccucaacauacccguccucagagccguacuaccccgcgauauggucuuccguaccucgagcccgaaagucguacucuaa

SEQ ID NO: 9598 - RNA, 1710 nt, Artificial Sequence
  derived and/or modified CDS sequence (opt11) from LASV(ISTH2334-NIG-2012;Clade II)__AIT17569__NP
augagcgccuccaaagaagucaaaucauuccucuggacccaaucccugcgccgcgaauuaucuggguacugcucaaacaucaaacugcaagucgucaaagacgcacaagcccugcuacacggccucgacuucuccgaaguuagcaauguccaacgccucaugcgcaaacagaaaagagacgacagcgaccucaaaagacuccgagaccucaaccaagccgucaacaaccucgucgagcucaaauccacccaacaaaaaucuauacuacgaguagguacccucaccucugacgaccugcugacacucgcagccgaccucgaaaaacuuaaaucuaaagucauccggacagagcgcccccucucauccggcgucuacaugggaaaccucagcacgcaacaacucgaacaacgacgagcgcuacuuaacaugaucggaaugguaggcggagcacaaggcacccaacccggacgcgacggcgucgucagaguaugggacgucaaaaaccccgaccuccucaauaaccaauucgggaccaugccaagccucacccucgccugccuaaccaagcagggccaagucgaccucaacgacgccguacuagcccuuacugaccucggcuuaauauacaccgcaaaauuccccaacagcuccgaccucgaccggcucucccagucccaccccauacucaacauggucgacacaaagaaauccagccuaaacaucuccggguacaacuucucacucggagccgccgucaaagccggcgcaugcaugcuagacggaggaaacaugcucgaaaccaucaaagugacaccccaaaccauggacgggauccuaaaaagcauccucaaaguaaagaaaucacucggcauguucgucuccgacaccccgggcgaacgcaacccauacgaaaacauccucuacaaaaucugccucuccggagacggauggcccuacauagccucccgaaccucuaucguaggccgcgccugggaaaacaccaccgucgaccuagaauccgacggcaaaccccaaaaagucggcaccacuggaucaaacaaaagccuccaaucagcaggcuuccccacaggccucaccuacagccagcucaugacacucaaagauagcaugaugcaacucgaccccuccgccaaaaccuggaucgacaucgaaggcagaccagaagacccggucgaaauagcccucuaucaacccauguccggaugcuacauacauuucuuccgcgaaccaacugaccucaaacaauucaaacaagaugcuaaauacucccacggcauagacgucgccgaccuauuccccgcccaacccggccucaccucggcugugaucgaggcccuacccagaaacaugguucuaaccugucaaggaagcgacgacaucaaacgccuccuugacucacaaggucgacgcgacauaaaacuaauagacaucgcccucuccaaagccgacucgcgacgcuucgaaaacgccgucugggaccaaugcaaagaccuaugccacaugcacacgggaguaguugucgaaaagaagaaacgaggaggcaaagaagaaaucacaccccacugcgcccucauggacuguauaauguacgacgcagcagucuccggcggccuaaaccuccccguacucagggcaguccuccccagagacaugguauuccgaaccagcagccccaaagucguccuauga

SEQ ID NO: 9599 - RNA, 1710 nt, Artificial Sequence
  derived and/or modified CDS sequence (opt11) from LASV(ISTH2358-NIG-2012;Clade II)__AIT17573__NP
augagcgccuccaaagaaguaaaaucauuccuauggacccaaucgcuccgccgcgaacucuccggcuacugcagcaacaucaaacuccaagucguaaaagacgcacaagcccuccuccacgggcucgacuucuccgaagucucaaacguccaacgacucaugcgcaaacagaaaagagacgacuccgaccucaagcgccuacgcgaccuaaaccaagccgucaacaaccucguagaacucaaguccacccaacaaaaauccauacucagagucggaacccugaccucagacgacuuacucacccucgccgcagaucuagaaaagcugaaauccaaaguaauaagaaccgaacgcccccucucaagcggaguguacaugggcaaccucagcacccaacaacucgaacaacgccgcgcucuccucaacaugaucggcauggucggaggugcgcaaggcacacaacccggacgcgacggcgucguacgagucugggacguaaagaauccggaccuccucaauaaccaauucggaaccaugccaucacucacccucgccugccugacaaaacaaggccaggucgaccuaaacgacgccguacuagcacucaccgaucuugggcuaaucuacaccgcgaaauaccccaacucauccgaccucgacagacuaucccaaucccaccccauacuaaacauggucgacacaaagaaauccagccuaaacauuagcggauacaacuuuucccucggcgcugccgucaaagccggcgcaugcaugcuugacggcggcaacaugcucgaaacgaucaaagucacaccucagaccauggacggaauccuuaaguccauccucaaagucaagaaaucccucggaauguucgucuccgacacaccaggagagcgcaacccauacgaaaacauacucuacaaaaucugccuauccggcgacggauggcccuauaucgcaucccgcaccucaauagucggccgcgccugggaaaacacgacagucgaccuagaauccgacggcaaaccccaaaaagugggcacagccggcuccaacaaaucccuacaaucagccggauucccaacaggccuuaccuacucacagcugaugacucuaaaagacuccaugaugcaacuugaccccuccgccaagaccuggauagacaucgaaggccgacccgaagacccagucgaaaucgcacucuaccaaccaauguccggcugcuacauacacuucuuccgugaacccacagaccuaaaacaauucaagcaagacgccaaauauucccacggcauagacaucgccgaccucuucccugcccaaccaggccucacauccgcagucaucgaggcacuaccacgaaacaugguacuaaccugccaaggcuccgacgacaucaaacgccuccucgauucccaaggccgccgcgacaucaaacucaucgacaucgcccuaucgaaagcagacucccgucguuucgagaacgcagucugggaccagugcaaagaccuaugccacaugcacaccggagucguggucgagaaaaagaagcgaggcgggaaagaagaaaucacgccccauugcgcccucauggacugcauaauguacgacgccgcagucuccggaggccuuaacauccccgugcuccgcgcaguccuaccccgagacauggucuucaggacauccucccccaaaguaguacucuaa

SEQ ID NO: 9600 - RNA, 1710 nt, Artificial Sequence
  derived and/or modified CDS sequence (opt11) from LASV(ISTH2376-NIG-2012;Clade II)__AIT17577__NP
augucggcauccaaagaagucaaauccuuccucuggacucaaucccuccgacgcgagcucuccggcuacugcucauccauaaaacuccaagucgucaaagacgcccaagcccuacuccacggccuggacuucuccgaggucucaaacguacaacgccucaugcgaaaacaaaaacgugacgacuccgaccugaaacggcuaagagaccucaaccaagcagugaauaaucucgucgagcuaaaauccacccagcaaaaaucgauacuccgcguaggaacauuaacuagcgacgaccuacuaacccuagccgccgaccuagaaaaacuaaaauccaaaguaauccgcacagaacgaccacuauccucaggcguuuacaugggcaaccuauccacccaacaacucgaacaacgcagagcacuccuuaacaugaucggcauggucggcggagcccagggcacccagccaggccgcgacggcgucguacgaguaugggacgucaaaaaccccgaccuauuaaacaaccaauucggaaccaugccaagucuaacccuagccugccuaaccaaacaaggccaaguagaccucaacgacgcaguccucgcccucacagaccucggccuaaucuauaccgccaaauacccaaacucguccgaccucgacagacuaucucaaucccaccccauccucaacaugguagacaccaagaaaucaucacuaaacaucagcggcuacaacuucucccuaggcgccgcaguaaaagcaggcgcaugcaugcucgacggcggcaacaugcucgagaccaucaaagucacaccgcaaaccauggacggcauacucaaauccauccugaaaguaaaacgcucccucggaauguucgucagcgacacccccggagaacgaaacccauaugaaaauauccuuuacaaaaucugccucagcggcgacggauggccauacaucgcaagcagaacaagcaucgccggccgcgcaugggaaaauacaaccgucgaccucgaaagcgacggcaaaccucaaaaggucggcgcagccggauccaacaaaucccuacaauccgccggcuuccccaccggccuaaccuacucgcaacucaugacccucaaagacuccaugaugcaacuagaccccucagcaaaaacauggauagacaucgagggaaggcccgaagaccccguagaaauagcacucuaccaaccaaugagcgguugcuacauacacuucuuucgcgagccaaccgaccucaaacaauucaaacaagacgccaaauauucgcacggcauagacguagcagaccucuuccccgcccaacccggccucaccucagccguaauagaagcccugcccagaaacaugguacuaaccugccaaggaucagacgacaucaagcggcuccuagacagccaaggacgccgcgacauaaagcuaaucgacauugcacuauccaaagcagacagccgacgcuucgaaaacgccguaugggaccagugccgcgaccucugccacaugcacaccggaguaguggucgaaaagaagaaacguggcggcaaagaggaaaucacaccccacugcgcccugauggacugcaucauguaugacgccgcgguaucaggaggacucaacauacccgugcuucgcgccguccuacccagagacaugguguuccgaaccuccucgccaaaagucguccucuaa

SEQ ID NO: 9601 - RNA, 1710 nt, Artificial Sequence
  derived and/or modified CDS sequence (opt11) from LASV(Lassa virus/H.sapiens-wt/NGA/2015/ISTH_0543;Clade II)__AVO03640__NP
augagcgcaagcaaagaaguaaaauccuuccuguggacacaaucccuccggcgcgagcucuccggcuauugcuccaacaucaaacugcaaguggucaaagacgcacaagcacuacuacacgggcuagacuucucggaagucuccaacguccaacgacucaugcgcaaacaaaaacgagacgacagcgaccuaaagcgcuuacgagaccucaaccaggccgucaacaaccuggucgagcuaaaguccacgcaacaaaagagcauccugcgaguaggaacgcucacauccgaugaccuccucacccuagcagcugaccucgaaaaacucaaauccaaagucauccgaacugaaagaccccucuccagcggaguauacaugggcaaucuauccacccagcaacuugaacaaagacgcgcacuccuaaacaugauaggaauggucggcggagcccaaggaacacaacccggccgcgacgguguagucagagugugggacgucaaaaacccagaccuucuaaacaaccaguuuggaaccaugcccucacucacccuugcaugccucaccaagcaaggccaaguagaccucaacgacgccguacuagcacuaaccgaccugggacucaucuacaccgccaaauaccccaacagcucagaccucgaccgacuaagccaaagccacccaauacugaauauggucgacacaaagaaauccagccuaaacauaagcggcuacaacuucucccuaggagccgcggucaaagccggagccugcaugcuagacggcggaaacaugcuggaaacuauaaaagucacaccccaaacaauggacggcauacucaaaucaauacucaaaguaaagaaaagccucggcauguucgucucagacacacccggcgaacgcaaccccuacgaaaacauacuauacaaaaucugccuuucaggcgauggauggccauacauagcauccagaaccucaaucguaggcagagcaugggaaaacaccaccguugaccucgagucagacggaaaaccccaaaaagucgggucagcaggcaguaacaaaucccuccaaagugcaggauuccccaccggccugaccuacucacaacucaugacucucaaagacaguaugaugcaacucgaccccucggccaaaacauggaucgacaucgagggaagacccgaagaccccgucgaaauagcccuauaccaaccaauguccggaugcuacauacacuucuuccgagagccaaccgaccucaaacaauucaaacaagacgccaaauacucacacggcauagacguagcugaccucuuccccgcccaacccggccucaccuccgcugucaucgaagcccucccccgcaacaugguacuaacaugucaagguucugacgacaucaaacgccuccucgacucccaaggacgcaaagacaucaaacuaauagacaucgcccucagcaaagcugacucccgaagauucgaaaacgcagucugggaccaaugcaaagaccucugccacaugcacaccggagucgucgucgaaaagaagaaaagaggcgggaaagaagaaaucacaccccacugcgcccugauggacugcauuauguacgacgccgccguuuccgguggucucaacauccccguacuccgagccguccuaccacgcgacauggucuuccgcaccuccagccccaaaguaguccuauaa

SEQ ID NO: 9602 - RNA, 1710 nt, Artificial Sequence
  derived and/or modified CDS sequence (opt11) from LASV(Lassa virus/H.sapiens-wt/NGA/2015/ISTH_0547;Clade II)__AVO03584__NP
auguccgccagcaaagaaguaaaauccuuccucuggacccaaucccuccgccgcgaacucagcggcuacugcagcuccauuaaacuccaaguaguuaaagacgcccaagcacuccuccacggccucgacuuuucagaaguauccaacguccaacgacucaugcgcaaacaaaaacgcgacgauuccgaccuaaaacgccuacgcgaccuaaaccaggccgucaacaaccucgucgaacuaaaguccacccaacaaaagucaauccuucgcgugggcacccuaacauccgacgaccuacuaacacucgcagccgaccuagaaaaacuaaaaagcaaaguaauaagaacagaacgcccccucuccuccggcguauacaugggcaaccuaagcacucaacagcucgaacaaagacgagcccuccucaacaugaucggcaugguaggcggcgcccaaggcacccaaccaggacgcgacggcgucguccgcgucugggacgucaaaaaccccgaccuccucaacaaccaauucggcacaaugcccagccuaacccucgccugccucaccaagcaaggacaagucgaccucaacgacgccguccucgcacuaaccgacuuaggacuaauauacaccgccaaauaccccaacucaagcgaccucgaccgccucucccaaagucacccaauacuaaacaugguggacacaaagaaauccucacucaacauauccggguacaacuucagccucggcgccgcaguaaaagcaggagccugcaugcucgacggagguaauaugcuugaaacaaucaaggucaccccucagaccauggacggcauccucaaaucaauacucaaagucaaaagaucacucggaauguucgucucagacaccccuggagaacgcaaccccuacgaaaacauacucuacaaaaucugccucucaggcgacggcuggccauacaucgccucgcggacaucaauaguaggacgcgcaugggaaaacaccaccgucgaccuagaaagcgacggcaaaccacaaaaggucgggguagccggcucaaacaagucccuacagucagccggcuuccccacaggccucacauacucacaacugaugacucucaaagacucaaugaugcaacucgaccccucagccaaaacauggaucgacauagagggccgcccagaagaccccgucgaaaucgcacuauaccaaccaaugucgggaugcuacauccacuucuucagagaacccaccgaccuuaagcaauucaaacaagacgccaaguacucccacggaauagacgucgccgaccuauucccagcccagccagggcuaaccagcgccgucaucgaagcacuaccacgcaacaugguccucacgugccaaggcucggacgacaucaaacgccuccucgacucgcaaggacgccgcgacaucaaacuaauagacaucgcccucuccaaagcggauucccgccgcuucgaaaacgcagucugggaccaauguaaggaccuuugccacaugcacacuggcgucgucguagaaaagaagaaaagaggaggcaaagaagaaauaacuccccacugcgcacuaauggacugcaucauguacgacgccgcagucuccggcggccucaacauucccguacuccgcgccguacugccccgugacaugguauuccgaaccucaucaccaaaagucguccucuaa

SEQ ID NO: 9603 - RNA, 1710 nt, Artificial Sequence
  derived and/or modified CDS sequence (opt11) from LASV(Lassa virus/H.sapiens-wt/NGA/2015/ISTH_0574;Clade II)__AVO03658__NP
augucagcguccaaagaggucaaauccuuccucuggacacaaucacuccgccgagaacuaagcggauacugcuccaacauaaaacuccaggucgucaaagacgcccaagcccuccuacacggacucgacuucagugaagucuccaacguacaacgccucaugcgaaaacagaaacgcgacgauagugaccuaaaaagacuacgagaccucaaccaagccguaaacaaccuaguagaacucaaaucgacacaacagaaaagcauucuucgcgucggaacacucacauccgacgaccuacuaacccuagccgcggaccucgaaaaacucaaaucaaaagucaucagaaccgaacggccacuaucuagcggcguauauaugggaaaccucucaacccaacaacucgaacaacgacgcgcccuucucaacaugaucggcauggucggcggcacccaaggcacccaacccggccgagauggcgucguccgugucugggacgucaaaaaccccgaccuccucaacaaccaauucggaaccaugcccucacucacccuagccugccucaccaaacaaggacaagucgaucucaacgacgccguacuagcccucacagaccucggccucaucuacaccgcaaaauacccaaacagcuccgaccucgaccgccuaucgcaaucccacccuauccuaaacauggucgacacaaagaaauccucacucaauauauccggcuacaacuucagccuaggagccgccgucaaagccggugccugcaugcuagacggcgggaacaugcucgaaaccauaaaaguaacaccccaaaccauggacgggauccucaaaagcauccuaaagguuaagaaaucacucggaauguucgucagcgacacccccggcgaacgaaaccccuacgaaaacauccuuuacaaaaucugccuaucaggugacggauggcccuacauagccucaagaaccucgauagucggcagagccugggagaacaccaccguagaccucgaaagcgaaggaaaaccacaaaaagucggcaccgccggaagcaacaaaucccugcaaucugccggauucccaaccggccucacauauucccaacugaugacccucaaagacucaaugaugcaacuagacccaucagccaaaaccuggauagacaucgagggacgacccgaagacccuguagaaaucgcacuauaccagccaauguccggcugcuacauccacuucuuccgagaaccaaccgaccuaaaacaauucaaacaagacgcuaaauacucccacggaaucgauguugcugaccucuuuccagcccaacccggucuaacuuccgccguaaucgaagcgcucccccgcaacaugguacuuacgugccagggcuccgacgacaucaaacguuuacucgacucccaaggccgccgcgacaucaaacucaucgacauaagccuuuccaaagcagacagccgacgcuucgaaaacgcagucugggaccaaugcaaagaccucugucacaugcacacaggcgucgucgucgaaaagaagaaacgcggcggcaaagaagaaauaacuccucacugcgcccuuauggacugcaucauguacgacgccgccguauccggcggccuaaacauccccguccuccgagcagugcucccacgcgacauggucuuccguaccuccucacccaaaguuguauuauag

SEQ ID NO: 9604 - RNA, 1710 nt, Artificial Sequence
  derived and/or modified CDS sequence (opt11) from LASV(Lassa virus/H.sapiens-wt/NGA/2015/ISTH_0682;Clade II)__AVO03626__NP
augagcgcguccaaggaaguaaaauccuuccucuggacccaaucacuccgacgcgaacuaagcggguauugcuccagcauaaaacuucaagucgucaaagacgcccaagcucuccugcacggacuagacuucuccgaaguauccaacguacaaagacucaugcgcaaacaaaaacgagacgacagcgaccuaaaacgauuacgagaccugaaccaagcagucaacaaccucguagaacucaaaaguacccagcaaaaauccguauuacgcgucggaacccuaaccuccgacgaccuccuaacccucgcagccgaccuagaaaaacucaaauccaaagucauacgcacagaacgcccucucuccagcggagucuacaugggcaaucuaagcacccaacagcucgaacaacgccgggcgcuccucagcaugaucgggaugguaggcggcacccaaggcacccaaccgggccgcgacggagucgugagagucugggacgucaagaaccccgaccuccuuaauaaccaauucggcacaaugcccucacuaacgcucgccugccuaaccaaacaaggacaagucgaccuaaacgacgccguccuagcgcugacggauuuaggacucaucuacacagcaaaauaccccaacagcucggaccuugacagacucucgcaaucccaccccauccuaaacauggucgacaccaagaaauccagccuuaauauaagcggauacaacuucucccugggcgccgcagucaaagccggggccugcaugcuagacggaggaaacaugcucgagacaaucaaagucacgccccagaccauggauggaauccucaaaucaauacucaaagucaaaaagucacugggcauguucguaagugacacacccggagaacgaaacccguaugaaaacauccuauacaaaaucugccucucgggcgacggcuggcccuacauagccagccgaacguccaucguaggccgagccugggaaaacaccacagucgaccuugaaucaaacggcaaaccccagaaaguaggcaccgcaggaagcaacaaaucccuccaaagcgcaggcuucccaaccggacucaccuacagccaacucaugacccugaaagauuccaugaugcaacuugaccccucagcaaaaaccuggaucgacaucgaaggacguccggaggaccccgucgaaaucgcccucuaccaaccaaugucgggcugcuacauccacuucuucagagaacccacagaccucaaacaauucaaacaagacgccaaauacucccacggcauugacgucgcagaccucuuccccgcacaaccaggccuaaccuccgccgucaucgaggcccucccacgaaacaugguccucacaugucaaggcagcgaugacauaaaaagacuccuagacucacaaggccgcagagauaucaaacucaucgacaucucccucagcaaggcagauucccgcaaauucgaaaacgcaguaugggaccaaugcaaagaccucugccacaugcacaccggagucguagucgagaagaaaaagcggggcggaaaagaagaaaucacaccacacugcgcacuaauggacugcaucauguacgacgccgccguaucaggaggccugaacaucccaguacuccgcgccguacucccgcgugacauggucuuccgaacgagcuccccaaaaguaguccuguaa

SEQ ID NO: 9605 - RNA, 1710 nt, Artificial Sequence
  derived and/or modified CDS sequence (opt11) from LASV(Lassa virus/H.sapiens-wt/NGA/2015/ISTH_0687;Clade II)__AVO03582__NP
augagcgccagcaaagaagugaaaucuuuccuauggacccagucacuccgccgagaacucucgggcuacuguucgagcaucaaacuccaaguagugaaagacgcgcaagcccuccuacacggucuagacuucagcgaagucagcaacguccaaaggcuuaugcgcaaacaaaagcgcgacgacucagacuuaaaacgacuacgagaccuaaaccaagcaguuaauaaccuagucgaacucaaauccacccaacaaaaauccauccuccgcguaggcacccucacauccgaugaccuccucacucuagcagccgaucucgaaaaacucaaauccaaagucauccggacggagcgcccucucuccuccggagucuauaugggaaaccuauccacccaacaacuagaacaacgccgagcccuacuaaacaugauaggcauggucggaggcgcccaauccacacaacccggcagagacggggucguacgcgucugggacgucaaaaacccagaccuccucaacaaccaauucggcacaaugcccucccuaacccucgccugccucaccaaacaaggccaagucgaccucaacgacgccguacuggcccuaacagaccucggacucaucuacacagcuaaauaccccaacagcucagaccuagaccgccucucccaaucccaccccauacucaacauggucgacaccaagaaaucaucacuaaauaucagcgguuacaacuucucccucggugccgcagucaaagcaggagccugcaugcuggacggcggcaacaugcuagaaaccauaaaaguaaccccacaaaccauggacgguauacucaaauccauacuaaaagucaaacgcagccucggcauguucguaagcgacaccccaggcgaacgcaaccccuacgaaaacauccucuacaaaauaugccucucaggcgacggcuggcccuacauagcaucccguacauccaucgucggccgagccugggaaaacaccaccgucgaccucgaauccgacggaaaaccccaaaaagucggcgccaccggcucaaacaaaucccuccagucggcaggcuuccccaccggacuaaccuacucccaacuaaugacccucaaggauuccaugaugcagcucgaccccuccgccaaaacauggaucgacaucgagggacgcccagaagaccccgucgaaauagcacucuaccaacccauaucaggaugcuacauccacuucuucagagaacccacagaccuaaaacaauucaaacaagacgccaaauacucccacggcaucgacgucgcagaccuauuccccgcccaacccggccuuaccuccgccguaaucgaagcauuaccccgcaacaugguccuaaccugccaagguagcgacgacauuaagagacuccucgacucccaaggacgaagggacaucaaacucaucgacaucgcacuaucaaaagcagacucacgccgcuucgaaaacgccgucugggaccaaugcaaggaccucugccacaugcacaccggagucguuguggagaaaaagaaacggggcgguaaagaagaaauaaccccacacugcgcccuuauggacugcauaauguacgacgccgcagucagcggcggccugaacauaccaguacuccgagccguccucccacgcgauauggucuuccgaaccagcucaccgaaagucguccucuaa

SEQ ID NO: 9606 - RNA, 1710 nt, Artificial Sequence
  derived and/or modified CDS sequence (opt11) from LASV(Lassa virus/H.sapiens-wt/NGA/2015/ISTH_0736;Clade II)__AVO03574__NP
augagcgccuccaaagaaguaaaaucuuuccucuggacccaaucacuccgccgcgaacucucaggcuacugcucaaacaucaaacuacaaguagucaaagacgcccaagcacuccuccacggccucgacuucuccgagguguccaacguccaaagacuaaugagaaaacaaaaacgcgacgacucagaccucaaacgacucagagaccucaaccaggccgucaacaaccucguagaacucaaaagcacacaacaaaaaucaguacuccgagucggaacacuaacaucugacgaccuccucacccucgccgcagaccuagaaaaacucaaaucaaaaguaauucgaaccgaacgcccacucuccucgggagucuacaugggcaaccuaagcacgcaacaacucgaacaccgacgggcacuccucaacaugaucggcaugguaggcggggcccaaggcacccagcccggcagagacggagugguccgagucugggacgucaaaaaccccgaccuccuaaacaaccaauucggcaccaugccaucgcuaacucucgcaugccuaacaaaacaaggccaagucgaccuaaacgacgccguacuugcacucacagaccugggccuuaucuacacagccaaauaccccaacagcuccgaccuagaccgccuaucccagucccacccaauacucaacaugguugacaccaagaaaagcucacucaauaucagcggauacaacuucagccuuggagccgccgucaaagccggagccugcaugcucgauggcggaaacaugcuagaaaccaucaaaguaaccccacaaaccauggacggaauacuaaaaucgauucucaaagucaaacgaucccucgggauguucgucucagacacccccggcgaacgcaacccauacgaaaacauacucuacaaaaucugccuauccggagacggguggccauacaucgcaucccgaacaagcauagucggcagagcaugggaaaacaccacagucgaccucgagucagacggaaaaccccaaaaagucggaaccgccggcuccaacaaaucccuccaaucagccggcuuucccacaggccucaccuacucccaacucaugacacucaaagauuccaugaugcaacucgacccaucagcgaaaaccuggauagacaucgaaggccgacccgaagaccccgucgaaaucgcgcuauaccaaccaaucuccggcugcuacauccacuucuuccgagaacccaccgaccucaaacaauucaaacaagacgcaaaauacucccacggcaucgacgucgccgaccuauuccccgcccaacccggauuaacauccgccgucauagaagcccucccccgcaacaugguucuuaccugccaaggcagcgacgacaucaaacgacuccucgacucucagggacgccgcgacaucaaacuaaucgacaucgcacucuccaaagccgacuccagacgcuucgaaaacgcugucugggaccaaugcaaagaccucugccacaugcauaccggaguagucgucgaaaagaagaaacgcggaggcaaagaagaaaucacaccccacugcgcccucauggacugcaucauguacgaugcagccguuuccggaggacucaacaucccaguccuccgagccguuuuaccccgugacaugguauuccgaacaucauccccgaaagucguccucuaa

SEQ ID NO: 9607 - RNA, 1710 nt, Artificial Sequence
  derived and/or modified CDS sequence (opt11) from LASV(Lassa virus/H.sapiens-wt/NGA/2015/ISTH_0789;Clade II)__AVO03552__NP
augucagcauccaaagaagucaaauccuuccucuggacccagucccuccgacgcgaacuauccggcuacugcuccaacaucaaacuccaagucgucaaagacgcgcaggcccuccuccacggacuagacuucagcgaaguuuccaacguucaaagacucaugcgcaaacaaaaacgagacgacggcgaccucaaacgccuccgcgaccucaaccaagccguaaacaaccuaguagaacucaaaucaacccaacaaaaaucuguacuccgggucggcacccuauccuccgacgaccuccucauacucgccgcagaccucgaaaaacucaaauccaaaguaauccgaaccgaacgccccuuaucuagcggcgucuacauggguaaccuaagcucacaacaacucgaccaaagacgagcccuacucaacaugaucggaaugaccggcggaggccaaggcgccaacgcagggagggacggcaucguccgcgucugggacgucaaaaacgccgagcuacucaacaaccaauucggcacuaugcccucacuaacccucgcaugccucaccaaacaaggacaaguagaccuaaacgacgccguacaagcacugaccgaccucggccuaauauacacagccaaauacccaaacagcucagaucuagaccgccucucccaaagccacccaauccuuaauaugaucgacacaaagaaaagcucccuaaacaucuccgguuacaacuucucacuaggggccgccgucaaagccggagccugcaugcucgacggcggcaacaugcucgaaacuaucaaaguaagcccccaaacaauggacgguauucugaaauccauccuaaaagucaaacgcucccuaggaauguucgucuccgacgcccccggugaaagaaacccauacgaaaacauccucuacaaaaucugccucucgggagacggcuggcccuacaucgcaucacguaccagcauaaucggacgagcaugggaaaauacaguaguagaccuagagagcgacaacaaaccccagaaacuuggcaacucaggcagcaaccgaucccuccaauccgccggcuaccccgccggccucacauacagccaacugaugacacucaaagacucaaugcuacaacucgacccaaacgccaaaaccuggauggacgucgagggccgccccgacgacccaguggaaauagcacucuaccagccaucauccggaugcuacauacacuucuucagagaaccaaccgaccuaaaacaguucaaacaggacgccaaauacucccacggcauagacgucggcgaccucuucgcagcccaaccaggacuaacaagcgcagucauagaagcacuaccccgaaacauggugaucacaugccagggauccgaggacauaaagaagcuccucgaaucccaaggcagaaaagacaucaaacucgucgacauaucaaugucaaagcucgacagcagaaaauucgaaaaugcagucugggaccaauacaaagaccuaugccacaugcacaccggaaucgucguugaaaagaagaaacgcggcggaaaagaagaaaucacgccccacugcgcccuaauggacuguaucauguuugacgcugccguugucggcggccucgacgccaaaauccuuagagccguccuuccccgggacauggucuuccgaaccucuaccccaaaaguaguacucuaa

SEQ ID NO: 9608 - RNA, 1710 nt, Artificial Sequence
  derived and/or modified CDS sequence (opt11) from LASV(Lassa virus/H.sapiens-wt/NGA/2015/ISTH_0821;Clade II)__AVO03642__NP
augucagccagcaaagaaguaaaaaguuuccuauggacacagucacuacgccgcgaacuaucagguuacugcuccaacaucaaacugcaggucguaaaagacgcccaagcacuccuccacgggcucgacuucagcgaagucagcaacguccaaagacucaugcgcaaacaaaaacgugacgacagcgaccugaaacgccugcgcgaucucaaucaagcagucaacaaucucguagaacucaaaagcacacaacagaaaagcauccucagaguaggcacacuaacauccgacgaccuacuaacccucgccgccgaccuggaaaaacucaaaucaaaagucauacgaaccgaaagaccccucucgagcggagucuacaugggcaaccuuuccacccaacaacucgaacaacgccgagcccuccucaacaugaucggcauggucggcggcgcacaaggcacacaacccggaagagacggcgucguacgaguaugggacgucaaaaaccccgaccuauuaaacaaccaauucggcaccaugccaucacuaacacuagccugccucacgaaacagggccagguagaccucaacgacgccguccucgcccucaccgaccuaggccugauauauacagccaaauaccccaauuccuccgaccuagacaggcucucccaaucccacccgauccuaaacaugguagacaccaagaaauccuccuuaaacaucucuggcuacaacuucucccuaggcgccgcaguaaaagcgggcgccugcaugcucgacggcggcaacaugcucgaaacaaucaaaguaacaccccaaaccauggacggcauacuaaaaucgauccucaaagucaaacgcagccucgguauguucgucucagacacccccggcgaacgaaacccauacgaaaacauccucuacaagauaugccucuccggagacggcuggcccuacauagcaucucgcaccucgauaguaggccgagccugggagaacaccaccgucgaccucgaaagcgacggcaaaccccagaaagucggcaucgcgggaagcaacaaaucacugcaauccgccgguuuccccaccggccugaccuauagccaacuaaugacccuaaaagacuccaugaugcaacuugacccguccgccaaaaccuggauagacauagagggacgaccagaagaccccgucgaaauagcccucuaccaacccaugucgggcuguuacauccauuucuuccgcgagcccacagaccucaaacaauucaaacaagacgccaaguacagccacggcaucgacgucgccgaccuauucccagcccaaccuggccuuaccuccgcaguaaucgaagcccucccacgcaacaugguccucacaugccaaggcuccgacgacaucaagaaacuacuugacucgcaaggccgaaaagacauaaaacugauagacaucgccuuauccaaagucgacucaagaagguucgaaaacgcaguaugggaccaaugcaaagaccucugccacaugcacaccggcgucguagucgagaaaaagaaacgaggcggaaaagaagaaauaacaccgcacugcgcucuaauggacugcaucauguacgacgcugccgucuccggcggccuaaacauccccguccucagagccguucucccccgcgauaugguauuccgaaccuccucccccaaagucgucuuauaa

SEQ ID NO: 9609 - RNA, 1710 nt, Artificial Sequence
  derived and/or modified CDS sequence (opt11) from LASV(Lassa virus/H.sapiens-wt/NGA/2015/ISTH_0831;Clade II)__AVO03546__NP
augagcgccuccaaagaaguaaaauccuuccucuggacccaaucccuacggcgcgagcucgccggcuacugcagcaacauuaaacuccaagucguuaaagacgcacaagcccuacuacacggacucgacuucuccgaagucuccaacguccaacgccugaugcgcaaacagaaaagggacgacuccgaucucaaacgccucagagaccuaaaccaagcagucaacaaccucgucgaauuaaaaagcacccaacaaaaauccaucuuacgcgucggcacgcuguccucugacgaccuccuaacgcuagcagccgaccucgaaaaacuaaaauccaaagucaucaggaccgaacggccccucuccagcggcguauacaugggaaaccucagcacccaacaacuagaccaacgucgcgcccuccugaacaugauuggcauggucggcggaucccaaggaaccagcgcaggccgcgacggaaucguacgagucugggacgucagaaaccccgagcuccuaaacaaccaauucggcacaaugcccucacucacccuugcaugccucacaaaacaaggacaagucgaccucaacgacgccguacaagcccucacagaccucggccucaucuacacggccaaauaucccaacaguuccgaccucgaucgacucagccagagccaccccauccuaaacaugaucgacacaaagaaauccagcaucaacaucuccgguuacaacuucagccucggcgcagcagucaaagcaggcgcuugcaugcucgacggaggcaacaugcucgagaccaucaaaguuuccccacaaucaauggacggcauccucaaauccauccucaaagucaaacgcagccuaggcauguucgucagcgacaccccaggagaacgaaacccuuacgaaaacauccucuacaaaaucugccuauccggcgauggcuggccauacaucgccucccgaaccucuaucacagguagagccugggaaaacacuguagucgaccuagaaagcgacaacaagccaaagaaacccggcaacaacgaaucaaaccgcucacuacaaagcgcuggcuucccagccggccuaaccuacucccaacuaaugacccugaaagacuccaugcuccaacucgacccuaacgccaaaaccuggauggacaucgaaggucggcccgacgaccccgucgaaaucgcacucuaucaaccaaacuccggaugcuacauccacuucuuucgagaaccaacagaccucaaacaauucaaacaagacgcaaaauacucacacggcauagacauaucagaccucuucgccgcccaacccggccuaacauccgcagucauagaagcccuaccccgcaacaugguaaucaccugucaaggcuccgaagacaucaagaaacuauuagaaucacaagggcgcaaagacauccgucuaguggacaucagccucuccaaagccgacagccgaaaauuugaaaacgcaguaugggaccaauacaaagaucuaugccacaugcacaccgggauaguaguagagaaaaagaagaaaggaggcaaagaagagaucacaccgcacugcgcccucauggacugcaucauguucgacgccgccgucaugaacggccuggacgcccgcguccuacgcgcaguccuaccacgagacaugguauuccgcacauccacaccccgaguuguccuauaa

SEQ ID NO: 9610 - RNA, 1710 nt, Artificial Sequence
  derived and/or modified CDS sequence (opt11) from LASV(Lassa virus/H.sapiens-wt/NGA/2016/ISTH_0009;Clade II)__AVO03572__NP
auguccgccuccaaagaagucaaauccuuccuguggacccaaucccuccgccgcgaacucuccggauacugcucuaacaucaaacuccaaguuguaaaagacgcacaagcgcuacuacacggccuagacuucuccgaaguauccaacguacaacgccucaugcgcaaacaaaaacgagacgacucagaccucaaacgucuccgcgaucucaaccaagccguaaacaaccuagucgaacucaaaaguacgcaacaaaaaucuauccuucgagucggcacacugacaagcgacgaccugcucacccucgccgccgaccucgaaaaacucaaauccaaaguaauccgaaccgaacgcccccucucuuccgggguauacaugggcaaccuuuccacccaacaacuagagcaacgccgcgcccuccucaacaugaucgggaugguagguggagcccaaggaacacaaccuggacgagacggggucguccgagucugggacgucaaaaaccccgaccuccucaacaaccaauucggcacaaugcccucccuaacucucgccugccucacaaaacaaggacaaguagaucucaacgacgccguccuagcucuaacagaccuaggacuuauauacaccgccaaguacccaaacuccucggaccucgacagacucucgcaaucacacccgauacuaaacauggucgacaccaaaaagucaucccugaacaucucgggcuacaacuucucucucggcgccgcagucaaggccggagccugcaugcucgacggcggaaacaugcucgagacgaucaagguaacaccacaaaccauggacggcauacucaaauccauccuaaaagucaagaaaagccucggaauguucgugagcgacacccccggcgaaagaaaccccuacgaaaacauacucuauaaaaucugccuaucuggcgacgguuggcccuacaucgcuagccgcaccuccaucgucggacgcgcaugggagaauacaacagucgaucucgaaagcgacggcaaaccccaaaaagucggcagcgccggaaguaacaaaucacuccaauccgccggcuucccaaccggccuaaccuacucccaacucaugacccucaaggacuccaugaugcaacuugaccccagcgccaaaaccuggaucgacaucgaaggaagaccugaagaccccgucgagaucgcacucuaccaacccauguccggcugcuacauccacuucuuccgcgaaccgaccgaccucaagcaauucaaacaagacgccaaauacagccacggcauugacgucgccgaccuauuccccgcacagcccggccuuaccucggccguaauugaagcccuuccacgcaacaugguccuaaccugccaagguuccgacgacaucaaacgccuccuugacucacaaggccgccgcgacauaaaacucauagacauagcccuaucgaaagcagauucacgacgauucgaaaacgccgucugggaccaaugcaaggaccuuugccacaugcacaccggcguagucguagagaaaaagaaaagaggcgggaaagaagaaaucacuccccacugcgcacucauggacugcauaauguacgacgcagccguuagcggcggccuuaacauaccaguucuacgagccguacucccccgagacaugguauuccgaaccucaagccccaaagucguccuuuaa

SEQ ID NO: 9611 - RNA, 1710 nt, Artificial Sequence
  derived and/or modified CDS sequence (opt11) from LASV(Lassa virus/H.sapiens-wt/NGA/2016/ISTH_0017;Clade II)__AVO03568__NP
augucagcaucaaaagaagucaaaucauuccucuggacccaaucacuacggcgcgaacucagcggcuacugcuccaguaucaaacuacaggucguaaaagacgcccaagcccuacuccacggacuagacuucucagagguuucaaacguacaacguuuaaugcguaaacagaaaagagacgacuccgaccucaaacggcuccgagaccucaaccaagccguuaacaaccuagucgaacucaagucgacacaacaaaaaucaauccuccggguaggcacacucaccucagacgaccuccucacccucgcugccgaccuagagaaacuaaaaucaaaagucauacgcaccgaacgaccucugucaucaggcgucuacaugggaaaccucagcacccaacaguuagaacaacgacgcgcccuauuaaacaugaucgguauggccggcggcgcccagggcacacaacccggucgagacggagucguacgagucugggacgucaagaaccccgaccuccucaacaaccaauucggaaccaugcccucgcucacccucgccugccugacaaaacaaggccaagucgaccucaacgacgccguccuagcacuaaccgaccuaggccuaaucuacaccgccaaguaccccaacuccuccgaccuagaccgcuuaagccaaucgcaccccauccucaacauggucgacaccaagaaaagcucccuaaacaucagcggcuacaacuucucacuaggcgcggccgucaaagcuggagccugcaugcuugacggcggcaacauguuagaaaccaucaaagucacaccccaaaccauggacggcauccucaaauccauacucaaagucaaacgcucccucggcauguucguaagcgacgcgccaggugaacgaaaucccuacgaaaacauccucuauaaaaucugccuaucaggcgacggcuggcccuacaucgccucccgcaccuccaucgucggccgagccugggaaaacacuaccgucgaccuugagagcgacggcaagccccaaaaagugggagccaccggaucgaacaaaucccuccaaagcgccggauucccgaccggccucaccuacagccaacucaugacacucaaagacagcaugaugcaacucgaccccuccgcaaaaaccuggaucgacauagagggacgcccggaagacccaguagaagucgcccucuaccaacccguauccggaugcuacauccacuucuuccgagaacccacggaucucaaacaguucaaacaagacgccaaauacagccacggcauagacguagccgaccucuucccugcccaacccggccucaccucggccgucaucgaagcgcucccccgaaacaugguccuuaccugccaaggcagcgaugacaucaaaaagcuccucgacagccaaggccgcaaagacaucaaacucaucgacaucgcccucucaaaagcagacuccaggcgauucgaaaacgcagucugggaccaaugcaaagaucuuugccacaugcacacgggcgucgucgucgaaaagaagaaacguggcggcaaagaagaaauuaccccacacugcgcccucauggacugcaucauguacgacgccgccgucucaggaggccucaacaucccaguccuacgcgcaguacucccaagagacaugguauuccgcaccuccucaccaaaaguaguccucuaa

SEQ ID NO: 9612 - RNA, 1710 nt, Artificial Sequence
  derived and/or modified CDS sequence (opt11) from LASV(Lassa virus/H.sapiens-wt/NGA/2016/ISTH_0035;Clade II)__AVO03620__NP
augagcgcauccaaggaaguaaaaucauuccuuuggacccagucacuacgcagagaacucagcggcuacugcagcucaauaaaauugcaagucguaaaagacgcccaggcacuccuccacggccuagauuucuccgaagucucaaacguacaacgccucaugcgcaaacaaaaacgagacgacagcgaucuaaaacgccuccgagaccuaaaccaggcagucaacaaccugguagaacuaaaaucuacacaacaaaaaucaauccuacgcguaggaacccuaaccagcgacgaccuccuaacacuagccgcagaccucgaaaaacuaaaaucaaaaguaauacgcacagaacgaccacuaucaagcggcgucuauauggggaaccuaagcucccaacagcuagaacaacgccgcgcucuccucaacaugauuggcaugguaggaggagcccagggcacccagccaggcagagacgguguuguccgcgucugggacgucaaaaacccagaccuccucaauaaccaauucggcaccaugcccucccuaacccuagcgugccuaaccaaacaaggccaagucgaccucaacgacgcaguccuggcccucaccgaccucggccucaucuacacagcaaaauaucccaacuccuccgaccuagaccgacucucccagucccaccccauccugaacauggucgacaccaagaaaagcagccucaacaucuccggcuacaauuucucccuaggcgccgccgucaaagccggagccugcaugcuagacggcggaaacaugcucgaaaccaucaaaguuaccccacaaaccauggacggcauccuaaaaucaauacugaaagucaaaagaucccucggaauguucgucagcgacacucccggcgaacgcaacccauacgaaaacauacuauacaaaaucugccucuccggcgacgguuggcccuacaucgcaucccgcacauccauagucggccgcgcuugggaaaacaccaccgucgaccucgaauccgacggcaaaccccaaaaaguaggcucagcuggauccaacaaaucccuccagucagcaggcuuccccaccggacuaaccuacucacaacuaaugacccuuaaagauagcaugaugcaacuagaccccuccgccaaaaccuggaucgacaucgaaggacgccccgaggaccccguugaaaucgcacucuaccaacccauuuccggaugcuacauucacuucuuccgugaacccaccgaccuaaaacaauucaaacaagacgccaaguacagucacggaaucgacgucgcagaccuuuucccagcucaaccaggacucaccagcgcagucauagaagcccuaccacgaaacaugguccuaaccugccaaggaagcgacgacauaaaacgacuccucgacucccaaggacggcgcgacaucaagcucaucgacaucgcacucuccaaagcagacagccgaagauucgaaaaugccguaugggaccaaugcaaagaccuaugccacaugcacaccgggguagucgucgaaaagaaaaagcgcggcggcaaagaagaaaucacaccacacugcgcccucauggacugcauaauguacgacgcagccgucuccggcggccuaaacauacccguccuacgcgcaguacucccccgcgacaugguguuccgcacuucguccccaaaaguaguccuauaa

SEQ ID NO: 9613 - RNA, 1710 nt, Artificial Sequence
  derived and/or modified CDS sequence (opt11) from LASV(Lassa virus/H.sapiens-wt/NGA/2016/ISTH_0104;Clade II)__AVO03632__NP
auguccgcaucgaaagaagucaagagcuuccuauggacccaaagccuaagacgggaacucagcggauauugcuccaacaucaaacuacaagucgucaaagacgcacaagcccuccuccacggccucgacuucucagaaguguccaacguccaacgucuaaugagaaaacaaaaacgugaugacucagaccuaaaacgacuccgcgaucucaaccaagcggucaacaaccuagucgaacuaaaauccacccaacaaaaaucaauccuucgaguaggcacgcuaaccuccgacgaccuacucacacucgcagcugaccuagaaaaacugaaauccaaaguaaucagaacagaacgcccacuuuccuccggcgucuacauggguaaccuauccacccaacaacucgaacaaagacgcgcacuacuaaacaugaucggcaugguaggcggcacccaaucaacacaacccggacgugacggggucguacgaguaugggacgucaaaaacccugaccuacucaacaaccaguucggcacuaugcccucccugacccucgcaugccugaccaaacaaggccaagucgaccuuaacgaugccguccucgcccuaaccgaccuaggccuuaucuacaccgcuaaauacccaaacuccucagaccucgaccgccucagccaaagccacccaauacuuaacauggucgacacaaagaaauccucacuuaacaucagcggauacaacuucucauuaggcgcagccguaaaagcuggcgcaugcaugcucgacgguggcaacaugcucgaaaccaucaagguaacaccacaaacaauggauggcauccucaaaucaauccuaaaagucaaaaggagccuaggcauguucguguccgacacccccggcgaacgaaacccauacgaaaacaucuuguacaaaaucugccucuccggagacggcuggccauacauagccucccgcacauccauaguaggccgcgccugggaaaacaccaccguggaccucgaauccgacggcaaaccccaaaaaguaggcacuacaggcuccaauaaaucccuacaaagcgcaggauucccaaccggacugaccuacucccagcuaaugacacucaaagacagcaugaugcaacuagaccccuccgccaaaaccuggaucgacaucgaaggacguccagaagaccccguagaaaucgcccucuaccaacccaugucagguugcuacauacacuuuuuccgcgaaccaacagaccucaagcaauucaaacaagacgcaaaauacucucacggcaucgacguagcagaccucuuccccgcccaaccaggcuuaaccuccgcugucauugaagcacucccccgaaacaugguccuaaccugccaaggcuccgacgacauaaagaaacuucuugacucacagggccgccgugacauaaaacuaaucgacaucagccucuccaaagccgacucccgcaaguucgaaaacgcagucugggaccaaugcaaagaccuaugucacaugcacaccggcgucguggucgagaaaaagaaacgcggcggcaaagaagaaaucacuccccacugcgcccuaauggauuguauaauguucgacgccgccguaagcggcggauuaaacaucccaguccuccgagccguccucccaagggacauggucuuccgcaccuccagcccaaaagucguccuauga

SEQ ID NO: 9614 - RNA, 1710 nt, Artificial Sequence
  derived and/or modified CDS sequence (opt11) from LASV(Lassa virus/H.sapiens-wt/NGA/2016/ISTH_0133;Clade II)__AVO03636__NP
augagcgccagcaaagaaguaaaaucuuuccucuggacccaaucgcuccgccgagaacucuccggauacugcuccaacauaaaacuucaggucgucaaagacgcccaggcacuucuccacggccucgacuucuccgaagucagcaacguacaacgacucaugcgcaaacaaaaacgagaugacagcgaccucaaacgacuacgagaccucaaucaagccguuaacaaccuugucgaacuaaaauccacccaacaaaaauccauccuacgagucggcacccucacauccgacgacuuacuaacccuagccgccgaccucgaaaaacuaaaaagcaaagucauccgaaccgaacgcccacugagcagcggcguuuacaugggaaaccugucagcgcaacaacuagaacaacgccgcgcccuccucaacaugaucggaauggucggagggacccaaggcacccagcccggcagagacggaguagugcgcgucugggacgucaaaaacccagacuuacucaauaaccaguucggaacaaugccgucccucacccucgcgugccugaccaaacaaggccaaguugaccuuaacgacgccguccucgcccuaaccgaccuaggccuaauauacaccgccaaauacccaaacgcaucagaccuagaccgacuaucacaaucccaccccauccuuaacauggucgacaccaagaaaucaucccuaaacaucuccgguuacaacuucucccucggcgccgccguaaaagcaggcgccugcaugcucgacggcggaaacaugcuagaaaccauaaaagucacaccccaaaccauggacggcauccucaaaagcguccucaaagugaaaaagagcuugggcauguucguaucagacacgccgggcgaaagaaaccccuacgaaaacauacuauacaaaaucugccuaagcggagauggauggcccuauaucgccucacgaaccuccaucguaggcagggcaugggaaaacaccacgguagaccuagagagcgacggcaaaccacagaaaaucggucccgccggcagcaacaaaucucuacaaagcgcaggauuccccgccggccuaaccuacucacaacuuaugacacugaaagacuccaugaugcaacuagacccgucagccaaaacauggauagacaucgagggccgcccagaagacccaguagaaauagcacucuaccagcccaugucaggcugcuacauccacuucuuccgugaacccacagaccucaaacaauuuaaacaagacgccaaauacucgcacggaaucgacgucacagaccuguucagcgcacagcccggccucaccuccgcugucaucgaagcacucccccgcaacaugguauuaacgugccaaggcagcgacgacauaaaacggcuacuagacucacaaggacgaagagacauaaaacucauagacaucucgcucuccaaagucgauucccgccguuucgagaacgcagucugggaccagugcaaagaccucugccacaugcacaccgguguaguaguagagaaaaagaaacgcggcggaaaagaagaaaucacaccccacugcgcccucauggauugcaucauguacgacgccgcagucucaggcggccucaacauaccaguacuccgagcaguccucccccgagacaugguauuccgcaccucgagcccaaaagucguacuauaa

SEQ ID NO: 9615 - RNA, 1710 nt, Artificial Sequence
  derived and/or modified CDS sequence (opt11) from LASV(Lassa virus/H.sapiens-wt/NGA/2016/ISTH_0146;Clade II)__AVO03634__NP
auguccgcaagcaaagaaguaaaaucauuccucuggacccaaucacuccgacgcgagcuuuccggauacugcuccaauauaaaacugcaaguaguaaaagacgcacaagcccuacuccacggccuggacuucucagagguauccaacguacaacgacucaugcguaaacaaaaacgcgacgacucagaucucaaacgccuccgagaccuaaaccaagccguaaacaaccucguagaacucaaauccacccaacagaaaucaauacuccgcgucggaacacuaacauccgacgaccuccucacccucgccgcagaccucgaaaaacuaaaauccaaaguaauacgaaccgaaagaccccuauccucaggcguauacaugggcaaccucuccgcccaacaacuagagcagcgcagagcacuccucaacaugaucggcauggcaggcggagcacaauccacccaacccggacgcgacggaguaguacgagucugggacgucaaaaaccccgaccuacuaaacaaccaauucggcaccaugcccucgcuaacccuagccugccucaccaaacaaggacaaguagaccucaacgacgcaguacucgcucucaccgaccucggccucaucuauaccgccaaauauccaaacuccuccgaccucgaccgccuaucucaaucgcaccccauacucaacauggucgacaccaagaaaucaucccuaaacaucagcggcuacaacuucucccucggggcugccgucaaagcaggcgccugcaugcucgacgguggcaacaugcuggaaaccaucaaaaucacaccacaaaccauggacggcauacucaaaagcauccucaaaguaaaacguagccucggcauguucgucuccgacacccccggggaacgcaaccccuacgaaaacauccucuacaaaauaugccucuccggagacggcuggcccuacaucgccagccgaacguccaucgucggccgugcgugggaaaacacuaccgucgaccucgagucagacggcaaaccacaaaaagucggcaccaucggcagcaacaaaagccuccaaagcgccggauuccccaccggucugacauacucacaacucaugacacuaaaagacuccaugaugcaacuagaccccucagccaaaaccuggaucgacaucgaaggcagaccugaggaccccguugaaaucgcacucuaccaaccaaugagcggcugcuacauccacuucuuccgcgaacccaccgaccucaaacaauuuaaacaagacgccaaauacagccaugggauagacgucgccgaucucuuccccgcacagcccggccugaccucagccguaaucgaagcccucccccgcaauauggucuuaaccugccaaggcagcgacgacauuaaacgacuccucgacucucaaggccggcgcgacauaaaacucaucgacaucgcccucucuaaagccgacuccagaagauuugagaacgcagugugggaccaaugcaaagaccucugccacaugcacacaggaguagucgucgagaaaaagaaacguggaggcaaagaagaaaucacaccccacugcgcccucauggacugcaucauguacgacgcagccgucuccggcggccucaacaucccgguccuccgagccguccuaccccgcgacaugguauuccgcaccuccuccccaaaagucguacuauaa

SEQ ID NO: 9616 - RNA, 1710 nt, Artificial Sequence
  derived and/or modified CDS sequence (opt11) from LASV(Lassa virus/H.sapiens-wt/NGA/2016/ISTH_0187;Clade II)__AVO03550__NP
auguccguauccaaagaaguaaaauccuucuuauggacccaaagccuccggcgugaacucagcggcuacugcucgaacaucaaacuccaagucguaaaagacgcccaggcccucuuacacggacucgacuucucagaaguuaguaacguccaacgccucaugcgaaaacaacgccgcgacgacggagaccuaaaacgccugcgagaccucaaccaagccgucaacaacuuagucgagcucaagagcacccaacaaaaaucaguacugcgcguuggcacccuauccagcgacgaccuauuaguccuagccgccgaccucgagaagcucaaaucaaaagucauccgcaccgaacgcccacucucauccggcgucuauaugggcaaccucagcagccagcagcuagaccaaagacgcgcccuccucaacaugaucggcaugacaggcggcaacagagguggcuccgccuccucggacggaaucguucgcguaugggacgucaaaaacgcagaauuacucaacaaccaauucggcaccaugcccucacucacccuagccugcuuaaccaaacaagggcaagucgaccucaacgacgcaguccaagcccucacagaccuaggccucaucuacaccgccaaauaccccaacagcagcgaccucgaucgacuagcacaaucacacccaaucuuaaacaugauagauacaaagaaauccagccucaacauuuccggauacaacuucucgcuaggggcugccguaaaagcaggcgccugcaugcuagacgggggcaacaugcucgaaacaaucaaagucucaccccagaccauagacggcauccuaaaaaccauccucaaaguaaagaaaucccucggcauguucauauccgacguaccaggcgaacgaaaccccuacgaaaacauacuguacaaaaucugccucuccggcgacgguuggcccuacaucgcguccagaacuuccaucguaggcagggccugggagaacaccguugucgaccuagaaagcgacaacaaaccccagaaaacaggcaacggcggcuccaauaaaucccuacagagcgcaggcuucgccgccggauuaacauauagccagcucaugacccuuaaagacuccaugcuccaacuggacccaaacuccaaaacauggauggacaucgaaggccgacccgaagaccccgucgaaaucgcucucuaccaaccauccuccggcugcuacauccacuucuucagggaacccaccgaccucaaacaauucaaacaagacgcaaaauacagccacggcaucgacguaaccgaccucuucgcagcccaacccggccuaaccucagcagucaucgaagcccucccccgaaacaugguaauuaccugccaaggcagcgaagacauucgcaaacuacuugaaucccaaggccgacgugacauuaaacucaucgacauaucgcucaacaaagccgacucccgaaaauucgaaaacgccgucugggaccaauucaaagacuuaugccacaugcacacaggcgucgucguagaaaagaagaaacgcggcggcaaagaagaaaucacaccucacugcgcacucauggacugcaucauguuugacgccgccgugucaggaggacuugacaccaaaguccucagggcaguacuaccccgcgacaugguauuccgcaccuccaccccaaaaguaguacucuaa

SEQ ID NO: 9617 - RNA, 1710 nt, Artificial Sequence
  derived and/or modified CDS sequence (opt11) from LASV(Lassa virus/H.sapiens-wt/NGA/2016/ISTH_0419;Clade II)__AVO03540__NP
augucggccuccaaagaagucaaauccuuccucuggacacaaucacuccgucgcgaacucuccggauacugcucaaacaucaaacuccaggucguaaaagacgcccaggcccuccuccacggacuggacuucucagaaguaagcaacguacaacgacucaugcguaaacaaaaacgcgacgacggagaccuaaaacgacuccgagaccucaaccaagccgucaacaaccucgucgaacucaaaagcacacaacaaaaauccguccuccgcgucggcacgcucuccuccgacgaccuacucacacucgccgccgaccucgaaaaacucaaaagcaaagucauacgcaccgaacgaccacuauccucaggaguuuacaugggaaaccucuccagccaacaacuagaccaaaggcgcgcccuccucaacaugaucgguaugacaggaggcggacagggagcaagcgcuggacgggacgggauaguacgcguaugggacgucaagaacgccgaacuacuaaacaaccaauucggcacaaugcccucccucacacucgcaugccucaccaaacaaggccaggucgaccuaaacgacgcgguacaagcccucacagaccuaggacucaucuacaccgccaaauacccaaacagcuccgaccucgaccgccuaucacaaucacaccccauccucaauaugaucgacacaaagaaaucaucccuuaacauaagcggcuacaacuucucacucggagccgccgucaaagcaggcgcaugcaugcucgacgggggaaauaugcucgaaaccauacgcgucaguccccaaaccauggacggcauccucaaaagcauacucaaagugaaaagaucgcucggcauguucgucucggacauccccggcgaacgcaaccccuacgaaaacauccucuacaaaaucugccucaguggggacggcuggcccuacaucgcaucucgcacgucgaucacaggccgagccugggagaacaccaucgucgaccucgaaucagacuccagaccacaaaaacccggcaacuccggcuccaaccgcucccugcaaagcgccggauuccccgcaggacuaacuuacagccaacucaugacccucaaagacuccaugcuacagcuggaucccaacgcaaaaaccuggauggacauugaaggccgccccgacgaccccgucgaaaucgcccuauaccaaccgagcuccggcugcuacauacacuuuuuccgggaaccaaccgaccuaaaacaauucaaacaagacgcaaaauacagccacggaaucgacgucggagaccucuucacagcacaacccggacuaaccuccgccguccuugaagcacucccccgaaacauggucauaaccugccaagggucagaagacaucaagaaacuacuagaaucgcaaggccguaaagacauaaagcuagucgacauaucaauguccaaaccugacucgcguaaauucgaaaaugcugucugggaccaauacaaagauuuaugccacaugcacacaggaaucguggucgaaaagaagaaaagaggaggcaaagaagaaaucaccccacacugcgcccuuauggacugcaucauguuugaugcggccgucgucggcggacuugacgcuaaaauccuccgcgcaguacuccccagagacaugguauuccgaacaagcaccccaaaagucguacuuuaa

SEQ ID NO: 9618 - RNA, 1710 nt, Artificial Sequence
  derived and/or modified CDS sequence (opt11) from LASV(Lassa virus/H.sapiens-wt/NGA/2016/ISTH_0447;Clade II)__AVO03560__NP
augagcgcauccaaagaagugcgauccuuccucuggacacagucacugcgacgcgaacuauccggcuacugcuccucaauaaaacuacaaguaguaaaagacgcccaagcccuccuccacggccucgacuuuuccgaagucuccaacguucaacgccucaugagaaaacaaaaacgagacgacuccgaccuaaaacgacuccgggaccucaaucaagccgucaacaaucuagucgaacucaaauccacccaacaaaaauccauccuacgcguuggaacccuuacgucagacgaccuacucacacucgcggcagaccuagaaaaacucaaauccaaaguuauacgaacagaacgaccccucucgucaggcgucuacaugggaaacuuauccagccaacagcucgagcaacgcagagcccuccuaaacaugaucggaauggucggaggcgcacaaggcacacagccaggaagagacggaguaguaagaguaugggacgucaagaacccggaccuccuaaacaaccaauucgguacuaugccuucacucacacuugcaugccucaccaaacaaggccaggucgaccucaacgacgccguacuagcgcucaccgaccuaggccucauauacaccgccaaauacccaaacuccuccgaccuggaccgacucucccaaucccaccccauccucaacaugguagacaccaagaaauccagccucaacauuuccggauacaacuucucccuaggcgccgccgucaaagcaggcgcaugcaugcuggacggcggaaacaugcuggaaacaaucaaagucaccccacaaaccauggauggcauccucaaauccauccucaaagucaaacgaagccucggaauguucgucucggacaccccaggcgaacgcaacccauacgaaaacauacucuacaaaauuugccuaucuggagacggcuggccauauaucgcauccagaaccagcauagucggccgagccugggaaaacaccaccgucgaccucgaaucugacgggaagccacaaaaagucggcgcagccgguuccacaaaaucacuccaaagcgccggcuuccccaccggacucacauacucccaacuaaugacgcuuaaagacuccaugaugcagcuugaccccucagccaaaacuuggaucgacauagaaggaagacccgaagacccugucgaaauagcacucuaccaacccauguccggcugcuacauacacuucuuccgcgaaccuaccgaccucaagcaguucaaacaagacgccaaauacucccacggaaucgacgucgcugaccucuucccagcccaacccggacucaccuccgccguuaucgaagcauuaccccgcaacaugguccuuaccugccaaggaucagacgacaucaaacgccuacucgacagccaaggccgacgcgacaucaaacucaucgacauagcacuaucaaaggucgauuccagaagguucgaaaacgccgucugggaccaaugcaaagaccucugccauaugcacaccggcgucguagucgaaaagaagaaacgaggaggaaaagaagaaauaaccccucacugcgcccucauggauugcauaauguaugaugcugcagucucuggaggccuaaauauccccgugcuccgagccguccuaccccgagacaugguguuccguaccuccucccccaaagucguccucuag

SEQ ID NO: 9619 - RNA, 1710 nt, Artificial Sequence
  derived and/or modified CDS sequence (opt11) from LASV(Lassa virus/H.sapiens-wt/NGA/2016/ISTH_0543;Clade II)__AVO03596__NP
augucugcauccaaagaaguaaagagcuuccucuggacccaaagccucagacgcgaacuauccggcuacugcucaaacaucaaacuccaaguagucaaagacgcccaagcacugcuacacggccucgacuucuccgaagucuccaacguccaaagacucaugcgaaaacaaaaacgggacgacggcgaccuaaaacgccuccgcgaccugaaccaagccgucaacaaucucgucgaacucaaaucaacacaacaaaaauccguucuccgcgucggcacacuaaccagcgacgaccuacucauccucgcagccgaccuagaaaaacucaaauccaaagucauacgaacggaacgaccacucagcucaggaguauacaugggaaaccuaagcacccaacaacuugaacaacgcaaagcccuccucagcaugaucggaaugguaggcggcgcccaagggacccaacccggccgcgacggcguaguacgagucugggacgucaaaaaccccgaccuccuaaacaaccaauuuggaacaaugccaucccucacccucgccugccucacaaaacagggccaaguagauuuaaacgacgcaguacucgcccucaccgaucuaggccuuauauacaccgcaaaauaccccaacuccucagaccuagaccgccucucacaaagccaccccauacucaacauggucgacacgaagaaauccucacucaacaucuccgguuacaacuuuucccuaggcgccgccguaaaagcaggcgccuguaugcucgacggaggcaacaugcucgaaaccaucaaagucaccccacaaacuauggacggcauacuaaaauccauucucaaagucaaacgcucccucggaauguucguaagcgacacccccggcgaacgcaaccccuacgaaaacauccucuacaaaaucugccucuccggggacggcuggcccuacaucgccucccgaaccuccaucgucggccgugccugggaaaacaccacggucgaccucgaauccgacggaaaaccgcaaaaagucggaaccgccggauccaacaaaucacuccaguccgccggcuucccaacaggccuaaccuacucgcaacucaugacacucaaagacuccaugaugcaacucgaccccuccgccaaaaccuggaucgacauagagggccgccccgaagaccccgucgagauagcccucuaccagcccauguccggaugcuacauccacuucuuccgcgaacccaccgaccucaaacaauucaaacaggacgcaaaguauucccacggcauugacguaacagaccucuucuccgcccaacccggacucaccagcgcaguaaucgaggcccuaccccgcaacaugguccuaaccugccaaggaagcgacgacauaaagaaacuccucgacucccaaggccgccgagacauaaaacuaaucgacaucagccuaagcaaagccgacucccgacgauucgagaacgccgugugggaucaaugcaaagaccuaugccauaugcacaccggcgucgucguagaaaagaagaaacgaggcggcaaagaagaaaucacaccccacugugcacucauggauugcaucauguucgacgccgcgguauccggcggccucaacauuccaauccuccgcgcaguccuuccccgcgacaugguauuccgcaccaguagcccuaaagucguccucuaa

SEQ ID NO: 9620 - RNA, 1710 nt, Artificial Sequence
  derived and/or modified CDS sequence (opt11) from LASV(Lassa virus/H.sapiens-wt/NGA/2016/ISTH_0565;Clade II)__AVO03638__NP
auguccgccuccaaagaagucaaauccuuccucuggacccaaagccuacgccgagaacucagcggcuacugcuccaacaucaaacuccaagucgucaaggacgcccaagcacuccuccacggccuagacuucuccgaagucagcaacguccagcggcucaugcgaaaacagaaaagagacgacggagaccugaaaagacucagagaccuaaaccaagccgucaacaaccuagucgaacuaaaaagcacacaacaaaaauccguacuccgcgucggcacgcucaccagcgacgaccuccuuacacuagccgcggaccucgagaaacucaaauccaaaguaauacgcacugaacguccccuaucgaguggagucuacaugggcaaccucucaacccaacaacucgaacaacggaaggcccuccuaucaaugaucggcauggucgguggagcacaaggcacccaacccggccgagacggaguaguaagaguaugggacguuaaaaacccagaccuacucaacaaccaauucggaacaaugcccucccuaacccuagccugccucaccaaacaaggccaaguagaucucaacgacgcaguacuagcgcuuaccgaccuaggccucaucuacacggccaaguaccccaacucaucagaccucgaccgccugagccaaucccacccaauacuaaacauggucgacacaaagaagucaucacucaacaucuccgguuacaacuucagccuaggugccgccgucaaagcgggugcaugcaugcuagacggcggaaacaugcucgaaaccauaaaaguaacaccccaaaccauggauggaauccucaaaagcauccuuaaagucaagcgaucccuaggcauguucgucuccgacacccccggcgaacgcaaccccuacgaaaacauccuauacaaaaucugccucuccggagacggcuggccauacaucgcaucccgaaccagcaucgucggccgagcaugggaaaacacaacaguagaccucgaaagcgacgggaagccacaaaaaguaggcaccgccggcuccaacaaaucucuccagucagcuggauucccaacaggccuaacuuacucacaauuaaugacccucaaagacuccaugaugcaacuugaccccagcgccaaaaccuggaucgacaucgaaggucgcccugaagaucccgucgaaaucgcccuauaccaaccaaugucaggcuguuacauacacuucuuccgcgaacccaccgaccugaaacaauucaaacaagacgcaaaauauucccacggaauagacguuaccgaccucuucucggcccaaccgggccuaaccuccgcgguaaucgaagcccuacccagaaacaugguccuaaccugccaaggcuccgaugacauaaagaaacuccuagacucccaaggccgccgcgacaucaaacucauagacaucagccucucaaaagccgacuccaggcgcuucgaaaacgcagucugggaccaaugcaaagaccucugccauaugcacaccggagucguaguagaaaagaagaaacgcggcggaaaagaagaaaucacuccccacugcgcccucauggacugcauaauguucgaugccgccguauccggcggacuaaacauaccgaucuuacgagcaguacuaccucgcgacauggucuuccgcaccuccagcccuaaaguagugcuauaa

SEQ ID NO: 9621 - RNA, 1710 nt, Artificial Sequence
  derived and/or modified CDS sequence (opt11) from LASV(Lassa virus/H.sapiens-wt/NGA/2016/ISTH_0610;Clade II)__AVO03586__NP
augucagccuccaaagaagucaaaucguuccucuggacccaaagccuccgccgcgaacucucaggcuacugcagcaacaucaaacuacaaguaguaaaagacgcccaagcccuacuacacggacucgauuucucagaagugagcaacguacaacgacuaaugcguaaacaaaaacgcgacgacucagaccucaaacgacugagagaccucaaucaagccgucaacaaccucguggaauuaaaaucuacacaacagaaaagcguccuacgcgucggcacacucaccagcgacgaccuacuaacacuggccgccgaccucgagaaacugaaaagcaaagucaucagaacggaacgcccacuguccucaggcgucuacaugggcaaccucagcgcacaacaacuagaacaacgucgagcucuacucaauaugaucggaauggucggcggagcccaaggcacacaaccgggccgcgacggagucgucagagucugggacgucaaaaacccagaccuccuaaacaaccaauucggcaccaugccaucccucacucuagcaugccucaccaaacaaggacagguggaccugaacgacgucguccuugcacuaaccgaccuaggccugaucuacacagcaaaauacccaaacucaucugaccucgaccgccucucgcaaagccacccaauccucaacauggucgacacgaagaaaucaucccucaacaucuccggcuacaacuucagccucggcgccgccgucaaagccggcgccugcaugcucgacggaggcaauaugcucgaaacaauaaaagucacaccccaaaccauggacggaauacucaaaaguauacugaaaguaaagaaaucacuaggcauguucguaucagacacccccggagaacgaaauccuuacgaaaauauacuauacaaaaucugccucucuggagacggauggcccuacaucgccagccgcaccuccauaaugggcagagcaugggaaaacaccacgguagaccuagaaucagacggcaaaccccaaaaaguaggcacggccggaagcaacaaaagccuacaaucagcaggcuuccccacaggacucacauacucccaacucaugacacuaaaagacagcaugaugcagcucgaccccuccgcaaaaacauggaucgacaucgaaggccgaccagaagaucccgucgaaaucgcccucuaccaaccaaugucugguuguuacauccacuucuuccgcgaacccaccgaccucaaacaauucaaacaagacgcuaaauacucacacggaaucgacgucaccgaccucuucucggcacaaccaggacucaccuccgcugucauagaagccuuaccccgaaacaugguccuaaccugccaaggcagcgacgacaucaaacgacuccucgacucccaaggacgccgcgacauaaaacuuauagacauagcgcucagcaaagcagacucccgccgguucgaaaacgccguuugggaccagugcaaagaccuuugccacaugcacacaggcgucgucguggaaaagaagaaacguggaggcaaagaggaaauaacaccccacugcgcgcuaauggacugcaucauguacgacgcagcagucuccggcggccucaacauacccguucuccgggccguccucccucgggacauggucuucagaaccucuucaccaaaagucguccucuaa

SEQ ID NO: 9622 - RNA, 1710 nt, Artificial Sequence
  derived and/or modified CDS sequence (opt11) from LASV(Lassa virus/H.sapiens-wt/NGA/2016/ISTH_0621;Clade II)__AVO03544__NP
augucagcaaguaaagagguaaaaucuuuccucuggacccaaucccuaaggcgcgaacucuccggcuacugcucaaacaucaaacuccaagucgucaaagacgcccaagcacuccuacacggccucgacuucuccgaaguaucaaauguacaacgccugaugagaaaacaaaaacgugacgauggugaccuaaaacgccugcgcgaccugaaccaggcagucaacaaccucguagaacuaaaaagcacucaacaaaaauccguccuccgggucggcacccucucauccgacgaccuacucauacuagcagccgaccucgaaaaacucaaaucuaaagucauccgcaccgaacguccccuaucuagcggcguuuacauggguaaccuauccucccagcaacucgaccaaagacgcgcccuccuaaauaugaucgggaugacaggcggaucacaaggcaccaacacaggacgcgacgggauaguccgaaucugggacgucaaaaacgcagagcuucuaaacaaccaauuuggcacaaugccaucccuaacccucgcaugucucacgaagcaaggccaagucgaccuuaacgacgcaguucaggcacucacagaccugggacuaaucuacaccgcaaaauaccccaacucaucagaccucgaccgguugagccaaagccacccaauccuaaacaugaucgacacuaaaaaguccagccuaaacauauccggcuacaacuucagccucggagccgcagucaaagcaggggccugcaugcucgacggcgggaacaugcucgaaacaaucaaaguauccccacaaacaauggacggaaucuugaaauccauacuaaaagucaaaaagagccucggcauguucgucagcgacacacccggcgaacgcaauccguacgaaaacauacuauacaaaaucugccucuccggagacggauggcccuacaucgcaucuagaaccuccaucaccggacgcgccugggaaaacaccaucguagaccucgaaaccgacaacaaaucacaaaagcccggaaacuccggaucaaacagaucacuccaauccgccggcuuccccgcaggccuaaccuacucacaacugaugacccugaaagacuccaugcuucaacuagaccccaacgcaaaaacauggauggacaucgaaggccgacccgacgacccaguagaaauagcccuuuaccaaccauccagcggcugcuacauccacuucuuccgcgagccaaccgaccucaaacaauucaaacaagacgccaaguacucacacgguauagaugucuccgaccuauucgcugcccaacccggccuaacaucugcggucaucgaagcccucccccgcaacauggucauaaccugccaaggcuccgaagacauccgcaagcuacucgaaagccaaggucgccgagacaucaaacucguagacaucucccucagcaaaucggacucccgcaaauucgaaaacgucgucugggaccaauucaaagaccucugccacaugcacacaggaguagucgucgaaaagaaaaagaaaggcggaaaagaagagauaacaccccacugcgcccuaauggacugcaucauguucgaugcagccgucaugggaggccucgacgccagaguacuccgcgccguacuaccacgcgauauggucuuccgcacaagcacacccaaagucguccucuag

SEQ ID NO: 9623 - RNA, 1710 nt, Artificial Sequence
  derived and/or modified CDS sequence (opt11) from LASV(Lassa virus/H.sapiens-wt/NGA/2016/ISTH_0701;Clade II)__AVO03630__NP
augagcgcgagcaaagaaguaaaauccuuccucuggacccaaucccugcgaagagaacuauccggcuacugcuccaacauaaaacuccaaguugucaaagacgcccaagcacuacuccacggacucgacuucagcgaggucuccaacguacagagacuaaugcgcaaacaaaaacgcgacgacucagaccucaaacgacuccgagaccuaaaccaagcaguuaauaaccucguagaacuaaaauccacacaacaaaaaucgauacugcgagucggaacccugaccagcgacgaccuacucauccucgccgccgaccucgaaaaauuaaaauccaaggucauccgaacagaaagaccccucuccuccggaguauacaugggaaaccuaucaacccaacaacuagaacagcgacgcgcucuccucaaccuaauuggaauggucggcggcgcccaaggcacccaaccaggucgagacggagucguccgagucugggacgucaaaaacccagaccuccuuaacaaccaauucggcaccaugcccucacuaacccuagccugccugacaaaacaaggacagguagaccucaaugacgccguacuagcccucaccgaccuaggccuaaucuacacagccaaauaccccaacagcuccgaccucgaccgccuaucucaaagucaccccauacucaacaugguagacaccaagaaaagcagccuaaacauaagcggcuucaacuucagccuaggggccgccguaaaagccggcgcauguaugcuagauggcggcaacaugcucgaaacaauaaaagucacaccccagaccauggacggaauccucaaaucaauccucaaaguaaaacgaagccuuggcauguucgucuccgacacccccggggaaaggaaccccuacgaaaacauccuguacaaaaucugccucuccggggacggguggccuuacaucgccagccgaacauccaucgucggccgcgccugggaaaacaccaccguagaccuagaaagcgacggcaaaccccacaaagucggaacagccggaagcaacaaaucacuccaaagcgccggauuccccacuggccucacguauagccaacugaugacccucaaagacucaaugaugcaacucgacccaagcgcuaagaccuggaucgacauagaaggccgcccagaagacccagucgaaaucgcacuauaccaaccaaugagcggcugcuacauacacuucuuccgugaaccaaccgaccucaaacaauucaagcaagacgccaaauacucccacggaaucgacgucgccgaucucuuccccgcacaaccaggccucacauccgcagucaucgaagcccuaccccgcaacaugguacuaacaugccaaggcagugacgacauaaaacggcuacuagacucucaaggccgaagagacaucaaacucaucgacauagcacucagcaaagccgacucacgucgcuucgaaaacgccguaugggaccaaugcaaggaccugugccacaugcacaccggcgucgucguagaaaagaagaaacgcggcggcaaagaggaaauaacaccccacugcgcccucauggauugcauaauguacgacgcagcagucagcggcggccucaacauacccguucuccgcgcgguccucccccgggacauggucuuccgcaccuccagccccaaagucguccuguaa

SEQ ID NO: 9624 - RNA, 1710 nt, Artificial Sequence
  derived and/or modified CDS sequence (opt11) from LASV(Lassa virus/H.sapiens-wt/NGA/2016/ISTH_0702;Clade II)__AVO03558__NP
augagugcuucuaaagaggucaaauccuuccucuggacccaaagccuccgaagagagcuaagcggauacugcucaaacauaaaacuacaaguaguaaaagacgcgcaagcccuacuccacgggcucgacuucuccgaagucagcaacguccaaagauuaaugcgaaaacaaaaacgcgacgacuccgaccuaaaacgacuaagagaccuaaaccaagccgucaacaaccucgucgaacuaaaauccacacaacagaaaagcauccuccgcgucggcacccucaccucggacgacuuacucacacuugcagcggaccucgaaaaacucaaaucaaaaguaauacgaacugaacgcccccucagcuccggagucuacaugggcaaccuauccacccaacaacucgaacaacgccgagcccugcucuccaugaucggaaugguaggcggcacacaaggaacccaacccggacgagacggagucguaagagucugggacgucaaaaaccccgaccuccuaaacaaccaauucggcaccaugcccucccuaacacuagccugccuaacaaaacaaggccaagucgaccucaacgacgccgugcuggcccucacagaccuaggccucaucuacacagccaaauacccaaacagcuccgaccucgaccggcucucacagucccaccccauccugaacaugguagacaccaagaaauccucccucaacauaagcggcuacaauuucucacucggcgcagcagucaaagccggcgccugcaugcucgacggaggcaauaugcucgaaaccaucaaagucacaccccaaaccauggacggcauccucaaaagcauacucaaagucaagaaaagccuggggauguucguaucagacacccccggcgaaagaaaccccuaugaaaacauacucuacaaaauaugucucagcggagacggcuggcccuacauagccucccgcaccucaaucgucggcagagcgugggaaaacaccaccgucgaccuagaaagcgacggcaaaccccaaaaaguaggaacagccggaucaaacaaaucccuacaaucggccgguuuccccacaggacugacauacucccaacucaugacccucaaagacuccaugaugcaacucgaccccucagccaaaaccuggauagacaucgaaggacgacccgaggaccccgucgaaaucgcacucuaccaaccgaugagcggaugcuacauccauuucuucagagagcccacggaccuaaaacaguucaaacaagacgcaaaauacucccacggcaucgacgucgccgaccuauuccccgcacaacccggacucaccagcgccguaauagaagcacucccuagaaacauggucuuaacgugccaaggguccgacgacauuaaacgccuacuagacucacaaggccgcagagacaucaaacuuaucgacauaucccuauccaaggccgacuccagacgcuuugagaacgcaguuugggaccaaugcaaagaccucugccacaugcacaccggcguaguagucgaaaagaagaaacgcggcggaaaagaagaaaucacaccccacugcgcccucauggauugcaucauguacgacgccgccguuucaggcggacucaacauccccguccuccgugcuguacuaccacgagacauggucuucagaaccagcuccccaaaaguaguccucuga

SEQ ID NO: 9625 - RNA, 1710 nt, Artificial Sequence
  derived and/or modified CDS sequence (opt11) from LASV(Lassa virus/H.sapiens-wt/NGA/2016/ISTH_0717;Clade II)__AVO03548__NP
auguccguaagcaaagaaguaaaaucguuccuauggacccaaucccuccgccgggaacuaagcggcuacugcucaaacaucaaaguacaaguagugaaagacgcccaggcacuccuccacggccuugacuucucagaagucucaaacguccaacgccuaaugagaaaacaaaaacgcgacgacggagaccucaaacgccuacgcgaccuaaaccaggcagucaacaaccucgucgaacuaaaaucaacccaacagaaauccguccuccgagucggcacacucucauccgacgaccuccucguacuugcagccgaccucgaaaaacuaaaaucgaaagucauacgaaccgaacgcccgcucucuagcggcaucuacaugggcaacuuauccucccaacaacucgaccaacgaaaagcccuccuaaacaugaucggcaugacaggcggcaacgucggccgaaacacaaccggcgacggcgucguccgcgucugggacgucaaaaaugcagaacugcucaacaaccaauucgguacaaugcccagccucacucucgcaugccugaccaaacaagggcaagucgaccuaaacgacgccguccuugcacucacagaccucggccucauauacaccgccaaauacccgaacagcucagaccuugaccgacucgcacaaucgcacccaauccugucgaugaucgacacaaagaaaagcucccucaacauaagcggauacaacuucagccuaggagccgcaguaaaagcuggcgcauguaugcuagauggcggcaacaugcuagaaacgaucaaagucaguccacaaaccaucgacggaauccucaaaucaauacucaaaguaaaaagaucccucggcauguucauaagcgacaccccaggagaacgaaaccccuacgagaacauccuguacaaaaucugucucucaggagacggauggcccuacaucgcaagccgcaccuccaucguaggacgcgcuugggaaaacaccguaguugaucucgaauccgacaacaaaccccagaaaacaggaaacggcggcuccaacaaaucacuacaaagcgccggauucgcagccggccucaccuacucacaacucaugacacucaaagacagcaugcuccaacucgaccccaacgcaaaaaccuggauggacaucgaaggacgacccgaagaccccgucgaaaucgcccucuaccaaccgagcuccggcugcuacauccacuucuuccgggaaccaaccgaccucaagcaauucaaacaagacgccaaauacucccacggaauagacgucaccgaccuauucgccgcgcaaccgggcuuaaccuccgccgucaucgaagcacuacccagaaauauggucauaaccugccagggcagcgaagacauccgcaaacuccucgaaucccaaggccgacgggacaucaagcuaaucgacaucagcuuaucaaaagucgacucacgcaaauucgaaaacgcaguaugggaccaauucaaagaccucugccacaugcacacaggaaucgucgucgaaaagaagaaaagaggcggcaaagaagaaaucacaccccacugcgcacugauggacugcaucauguucgacgccgcaguaucaggcgggguagacgccaaaguucuccgcgccguacuaccccgcgauauggucuucagaaccucuaccccuaaaguaguccuguaa

SEQ ID NO: 9626 - RNA, 1710 nt, Artificial Sequence
  derived and/or modified CDS sequence (opt11) from LASV(Lassa virus/H.sapiens-wt/NGA/2016/ISTH_0753;Clade II)__AVO03610__NP
augucagcaucgaaagaagucaagagcuuccuauggacccagucccucagacgcgaacuuucaggauauugcuccucaaucaaacuccaagucguaaaagacgcacaggcccuccuccacggccucgacuucuccgaagucucaaacguacaacgacuaaugagaaagcaaaagcgagacgacagcgaccuaaaacgccuaagagaccucaaccaagccguaaacaaccuugucgaacucaaaucaacccaacaaaaauccauccuccgcgugggcacacucaccagugacgaccuacucacacucgcagccgaccucgaaaaacucaaaagcaaaguaauccgaaccgaaagaccccucuccucaggaguauauaugggaaaccuaucaacccaacaacucgaacaacgccgagcccuccucaacaugaucggaauggucggcggagcucaagggacccaacccggccgcgacggcgugguccgugucugggacgucaaaaacccagaccuacuaaacaaccaauucggcaccaugcccucccucacacuugccugccucacaaagcaaggccaagucgaccucaacgacgccguccucgcccuaaccgaccucggccucauauacacagccaaauaccccaacucauccgaccucgaccgacuaucccagucccacccuauacugaacauggucgacaccaagaaaagcucgcucaacauauccggcuacaacuucucccucggcgccgccgucaaagccggcgccugcaugcucgacggaggcaacaugcuagaaacaauaaaagucacaccccaaaccauggacggcauacuaaaaaguguccucaaggucaaacgcucccuagguauguucguuuccgacacgccaggcgagcggaaucccuacgaaaacauccucuacaaaaucugccuauccggagacggcuggccuuacaucgccucccgaaccagcauagugggccgagcaugggaaaacacaaccguggaccuugaaucagauggcaaaccccaaaaggucggagccgccggcuccaacaaaagucuccaauccgccggauucccaacaggccugaccuacucacaacuaaugacccucaaagacagcaugaugcaacucgaccccuccgccaaaacauggauagacauugagggccgccccgaagacccagucgaaaucgcccucuaccaacccaugagcggcugcuacauacacuucuuccgagaaccaaccgaccuaaaacaauucaagcaagacgccaaauacucccacggcauagacgucgcagacuuauucccggcacaaccagggcucaccagcgccguaauagaagcacucccacgaaacaugguccucacuugccagggauccgacgacaucaaacgacuacucgacucccaaggccgccgggacaucaaacucauagacauagcccucagcaaagcagacucccgccgcuucgaaaaugccgucugggaccaaugcaaagaccuaugccacaugcacacaggcguaguaguggaaaagaagaaacguggaggcaaagaagagaucacaccccacugcgcccucauggacugcaucauguacgacgccgcaguauccggcggccuaaacauaccaguacugcgagcaguccucccccgcgacaugguauuccgaaccagcucgcccaaaguaguccuauaa

SEQ ID NO: 9627 - RNA, 1710 nt, Artificial Sequence
  derived and/or modified CDS sequence (opt11) from LASV(Lassa virus/H.sapiens-wt/NGA/2016/ISTH_0759;Clade II)__AVO03594__NP
augagcgcgucgaaagaagucaaaucauuccuuuggacccagucacuccgccgugaauugagcggcuacugcucaucaauaaaacuccaaguagugaaagacgcucaagcccuacuccacggccucgauuucuccgaagucagcaauguccagcgacucaugagaaaacaaaaacgcgacgauuccgaucucaaacgauuacgcgaccucaaccaagcggucaacaaccucgucgaacucaagucuacacaacaaaaaucaauccuccgaguaggaacccucaccucagaugaccuccuaacacucgccgccgaccucgaaaaacucaaauccaaagucacccgcaccgaacgcccccucuccuccggcgucuacaugggcaaccucucaacccaacaauuggaacaaagacgcgcccuauuaaacaugauagguauggucggcggagcccaaggaacacagccaggacgggacggaguuguccgugucugggacgucaagaaccccgaccuacuaaauaaccaauucggaaccaugcccucacuaacccucgccugccucaccaagcaaggacaagucgaccucaacgacgcaguccucgcccucaccgaccucggccucaucuacacagcgaaauaccccaacagcuccgaccuagaccgacucucacagucccacccuauccuaaauaugguagacaccaagaaaucaucacucaacauauccggcuauaauuucucccucggcgcggccgucaaagcaggcgccugcaugcuagacggaggcaacaugcucgaaacuaucaaaguaacaccccaaaccauggacggcauacuaaaaucaauccugaaaguaaaacgaagucuaggcauguuuguuuccgacgcacccggcgaacgcaaccccuacgaaaauauacucuacaaaauaugccuuuccggcgacggcuggccauacauagcaucccguaccucaaucguaggccgcgcaugggaaaacaccacgguagaccucgaaagcgacggcaaaccacaaaaagucggaaccgccgguucaaacaaaucccuccaauccgccggauuccccaccggccucaccuauucccaacuaaugacccucaaagacuccaugaugcaacuagacccauccgcgaaaacauggaucgacaucgaaggucgaccagaagaccccgucgaaaucgcacucuaccagcccaugucagguugcuacauccacuucuuccgcgaaccaacagaccucaagcaauucaaacaagacgcaaaauacucgcacggcauagacgucgcagaccucuuucccgcccaacccggacuaaccuccgccgucauugaagcccucccaagaaacaugguccuaaccugccaggguuccgacgauauaaagaaacuccucgacagccaaggccgccgagacauaaaacucauugauaucgcacucuccagagcugacucucgacgauucgagaacgcagucugggaccagugcaaagaucucugccacaugcacaccggagucgucgucgagaaaaagaaacgcggagguaaggaagaaaucacaccccacugcgcauuaauggacugcaucauguacgacgccgccgucagcggcggucugaacauacccguccucagagccgugcuuccacgugacaugguauuccgaaccucaagcccaaaaguuguccucuaa

SEQ ID NO: 9628 - RNA, 1710 nt, Artificial Sequence
  derived and/or modified CDS sequence (opt11) from LASV(Lassa virus/H.sapiens-wt/NGA/2016/ISTH_0777;Clade II)__AVO03616__NP
auguccgcauccaaagaagucaaaucauuccucuggacccaaagccuacgcagggaacucucuggauacugcucaaacaucaaacuccaagucgucaaagacgcccaagcccuacuccauggccucgacuucuccgaagucucaaacguacaacgccuaaugagaaaacaaaagcgugacgacggagaccucaagcgacuccgcgaccucaaccaagccguaaacaaccuagucgagcucaaauccacacaacaaaaaucuguccuucgcguaggcacacucacauccgacgaccuccuuacccuagccgcagaccucgaaaagcucaaauccaaagucauccgcacugaacgcccccucucauccggcguauacaugggcaaccuaucaacccaacaacuugaacaacgcaaaguacuccucuccaugauaggaaugguaggaggcacccaacgcgcccaacccggcaaagacggaguaguccgaguaugggacguaaagaaccccgaccuccucaacaaucaauucggcaccaugccaucccucacccucgcaugccucacaaaacaaggccaagucgaccucaacgacaccguacuagcccucacagaccucggccucauauacaccgccaaauaccccaacuccucagaccucgacagacuaucacaaucacaccccauccucaacauggucgacaccaagaaauccucauuaaacaucagcggauacaacuucucucugggcgcagcaguaaaagcaggagccugcaugcuagacggaggcaacaugcuugaaacaauaaaagucacaccccaaaccauggauggaauccucaaauccauccuaaaagugaaacggagucuaggaauguucgucuccgacacaccaggugaacgcaacccauacgagaacauacucuacaaaaucugccucuccggcgacggauggcccuacaucgccucgagaacaucaaucguaggacgagcgugggagaacacaacagucgaucucgaaagcgacggcaaaccucaaaaaguaggaaccgcaggcucuaacaaaucccuccaaagcgccggauucccaaccggccucaccuacucccaacucaugacacuaaaagacuccaugaugcaacucgaccccuccgcaaagaccuggaucgacauagagggccggcccgaagaccccguagagaucgcccuauaccaacccgucagcggaugcuacauccacuucuuccgcgaacccaccgaccucaaacaauuuaaacaagacgcaaaguacucacauggaaucgacgucacagaccucuucucggcccaaccaggacucaccuccgcagucaucgaagcacugccccgcaacaugguccuaaccugccaaggaucagacgacaucaagaaacuccucgacucccaaggccgaagagacauaaaacucaucgacauuagccuaucuaaguucgacagccgaaaauucgaaaacgcugucugggaccaaugcaaagaccucugccacaugcacacagguguggugguggaaaagaagaaacgaggcggaaaagaagaaauaacaccccacugcgcacucauggacugcaucauguucgacgcugccguguccggaggccucaacauaccaauacuccgagcaguccucccucgcgauauggucuucagaaccuccucaccaaaagucguccuauga

SEQ ID NO: 9629 - RNA, 1707 nt, Artificial Sequence
  derived and/or modified CDS sequence (opt11) from LASV(Lassa virus/H.sapiens-wt/NGA/2016/ISTH_0779;Clade II)__AVO03656__NP
uccgucuccaaagaaguaaagagcuuccucuggacccagucacuacgacgagaacucagcggauacugcagcaacaucaaacuacaagucgucaaagacgcacaagcccugcuacacggccucgacuucagcgaaguaucaaacguacaaaggcucaugcgcaaacaaaaacgagacgacaacgaccuaaaaagacuccgagaccuaaaccaagccgucaacaaccuuguagaacugaaaucaguacaacaaaaauccauccuccgcguaggcacacucuccucagacgaccuauugauccucgccgccgaucucgaaaaacucaaauccaaagucaucagaaccgaacgcccccuauccagcggcgucuacaugggcaaucugucuucgcaacaacucgaacaacgaaaagcccuccucaauaugaucggaaugacaggaggcucacaaggagcacaaccugggcgcgacggagucguccgaguaugggacgucaaaaacuccgacuuacuaaacaaccaauucggcaccaugccaucccucacccucgcaugucucaccaaacaaggccaggucgaccucaacgacgccguccucgcccucaccgaccucggccucaucuacacugccaaauaccccaacacgagcgaccuagaccgccucagccaaucacacccaauccuaaacaugguugacaccaagaaauccucccucaacaucagcggcuacaacuucucccuaggagccgccgucaaagcaggcgccugcaugcucgauggaggaaacaugcucgaaaccauaaaaguaacaccccagaccauggacggaauccucaaauccauucuuaaaguaaaaagggcacucggaauguucgucucggacacccccggcgaaagaaacccuuacgaaaacauacucuacaaaauaugccuuuccggagaaggcuggcccuacauagccucaagaaccuccaucaccggacgcgcaugggagaacaccaucgucgaccucgaaagcgacuccaaaccccagaaaaugggaacaaccggcucaaacaaaucccuacaaucagcaggauuccccgcaggccucaccuacucacaacucaugacgcuaaaagacuccaugaugcaacucgacccauccgcgaaaaccuggaucgacaucgaaggccgcccggaagaucccgucgaaaucgcacucuaccaacccaucuccggaugcuacauccacuucuuucgagagcccacggaccuaaaacaauucaaacaagacgcaaaauacucccacggcaucgacguugccgaccucuucucagcccaacccggacuaacgucugcagucaucgaagcccucccccgaaacaugguccuaaccugccaaggcucggaugacaucaagaaacuccuagacucacagggccgccgcgacauuaaacuuauagacauaucccucaacaaagccgacucaagaagauucgaaaacgcagucugggaccaaugcaaagaccucugccacaugcacacaggcgucguagucgaaaagaagaaacguggaggcaaagaagaaaucacaccccacugcgcgcucauggacugcauaauguucgacgccgccguaucgggcggacugaauauccccauacuccgcgcaguacugccccgugacauggucuuccgaaccucguccccuaaaguaguacucuaa

SEQ ID NO: 9630 - RNA, 1710 nt, Artificial Sequence
  derived and/or modified CDS sequence (opt11) from LASV(Lassa virus/H.sapiens-wt/NGA/2016/ISTH_0917;Clade II)__AVO03536__NP
auguccgcaaguaaagaaguaaaaucguuccuuuggacccaaucccucagacgagaacucuccggcuacugcucaaacaucaagcuacaagucguaaaagacgcucaagcccuccuccacggacuagacuucucagaagucucaaacguacaacgacugaugcgcaaacagaaacgggacgacuccgaccucaaacggcuccgcgaccucaaucaagcugucaacaaccucgucgaacuuaaauccacacaacaaaaaucuauccuccgcgucggcacccuguccagugacgaccuccucacgcucgccaccgaccuagaaaaauugaaaucaaaagucaucagaacagagcgcccccucagcaguggaguauacaugggcaaccucucaacccaacaacuagaccaacgacgcgcacuccucaacaugauaggaaugguaggcggcucacaaggcaccagcgcuggacgagacggcauaguacgaguuugggacguccgaaacccggaauuacucaacaaccaauucggaaccaugcccucacugacacuagcaugccucaccaaacaaggccaaguagaccuaaacgacgcaguccaagcacuaaccgaccuaggccucaucuacaccgcaaaguaccccaacagcucagaccucgacaggcucagccagucccaccccauccucaacaugauagacaccaagaaaagcagcaucaacaucucagguuacaacuucucccucggggccgcugucaaagccggggccugcaugcuagacggaggcaacaugcucgaaaccaucaaagucucaccccaaagcaucgacggaauccucaaauccauacuuaaagugaaacggacacucggaauguucgucucagacacacccggcgaacgcaacccguacgagaacauccucuacaagauaugccucucaggcgacggcuggcccuacauagccucccgcacguccaucacaggccgcgcgugggaaaacaccguagucgaccucgaauccgaugacaaaccaaagaaacccggaaacaacgaguccaaccgcucccuccaaagcgccggcuuccccgcaggccucacguacucccaacucaugacgcuuaaagacucaaugcuacaacuagacccgaaugccaaaacauggauggacaucgaaggacgccccgacgacccaguagaaaucgcccuguaccaacccaacuccggcugcuacauccacuucuucagagagcccaccgaccuaaaacaauucaaacaagacgcaaaauauagucacggcaucgacaucggagaccucuucgccucccaaccaggucugaccuccgccguaauagaagcacucccccgcaacaugguaaucacaugccaaggcagcgaagacaucaaaaaguuacucgaaucgcaaggccgcaaggacauccgccuaguagacaucucccuaucgaaagccgacucccgcaaauucgaaaacgccguaugggaccaauacaaggacuuaugccacaugcacacaggcaucguaguugagaaaaagaaaaagggaggaaaagaagaaaucacgccccacugcgcccucauggacugcauaauguucgacgccgcaguuaugggcggccucgacgcaaaaguacuuagggccguccucccccgcgacauggucuuccgcaccucaaccccaagagucguccucuaa

SEQ ID NO: 9631 - RNA, 1710 nt, Artificial Sequence
  derived and/or modified CDS sequence (opt11) from LASV(Lassa virus/H.sapiens-wt/NGA/2016/ISTH_0919;Clade II)__AVO03660__NP
auguccgccucaaaagaagucaaauccuuccuauggacccaaucacuucggcgagaacuaucaggauacugcucaaacaucaaacuccaaguagucaaagacgcucaagcccuucugcacggccuagacuucagcgaaguauccaacguacaacgccucaugcgcaaacaaaaacgagacgacuccgaccucaaacgacuucgagaccugaaccaggccgucaacaaccucguagaacucaaauccacacaacagaaaagcauacuucgcgugggcacccucaccuccgacgaccuccucacacucgccgcugaccuagagaaacuaaaauccaaaguaauccgcacagaacgaccccucuccuccggcgucuacaugggcaaccuauccacccaacaacucgaacaacgccgcgcccucuuaaaccuaauaggaaugguugguggcgcccaaggcgcccaacccggacgcgacggagucguccgcgucugggaugucaaaaacccagaccuccuaaacaaccaauuuggaaccaugccaucccuaacacucgcgugccucaccaaacaaggacaaguagaccuaaacgacguaguccucgcacucacagaccuaggccugaucuacacagcaaaguacccaaacuccagcgaccucgaccgccuuagccaaagccaccccauccugaauauggucgacaccaagaaaucauccuuaaacauaucaggauucaauuucucacucggagccgcagucaaagccggugcaugcauguuagacggcggcaacaugcuagaaaccaucaaagucacgccacagaccauggacggcauacucaaaucuauacuuaaagucaagaaaagccuagguauguucgucuccgacacccccggcgaacgaaaccccuacgaaaacauccucuacaaaauaugccuuucuggugacggcuggccauacaucgcauccagaaccucaauaguaggucgcgccugggaaaacaccaccgucgaccuagaauccgacggcaaaccacacaaaguuggcaccgccggauccaacaaaucccugcaaagcgccggcuuuccaacgggccuaaccuacucccagcuaaugacccugaaagacagcaugaugcaacuagaccccagcgccaaaaccuggaucgacaucgagggccgccccgaggaccccguagaaauagcccuauaccaacccauguccggcugcuacauacauuucuuucgagaaccaacagaccuaaaacaauucaaacaggacgcaaaauacucccacggcaucgacgucgccgaccuauucccggcacagccaggccuaaccagcgccgucaucgaagcccuccccaggaacaugguccucacaugucaaggcagugacgacauaaagcgccuccucgacucccaaggccgccgcgacauaaaacucaucgacaucgcccuaucaaaggccgacagccgccgauucgaaaacgccguuugggaccaaugcaaagaccucugccacaugcacaccggaguagucguagaaaagaagaaaagagggggcaaagaagaaaucacaccccacugcgcccuaauggacugcauaauguacgacgccgcuguauccggcggccuaaacaucccaguccuccgagcaguccucccuagggacauggucuuccguaccucaagcccaaaaguagugcuauaa

SEQ ID NO: 9632 - RNA, 1710 nt, Artificial Sequence
  derived and/or modified CDS sequence (opt11) from LASV(Lassa virus/H.sapiens-wt/NGA/2016/ISTH_1006;Clade II)__AVO03644__NP
augucagccuccaaagaagucaaaucauuccuauggacccagagcuuacgcagggaacucucaggcuacugcagcaacaucaaacuccaaguaguaaaagacgcccaagcccuccugcacggccuggacuuuuccgaaguaucaaacguccaacgccucaugcgaaaacaaaaacgcgacgacuccgaccucaaaagacuacgagaccuaaaccaagccgucaauaaccucgucgaacuuaaaucaacccaacaaaaaucaauccuccgcguaggcacccuaacaucagacgaccuacucacccuugcagccgaccucgaaaaauuaaaauccaaagucauccgcaccgaacgaccccuauccuccggcgucuacauggguaaucucucgacccagcaacuagaacaacgcagggcacuuuuaaacaugaucggcaugguaggcgguacccaagggacucaacccggcagagacggagucguacgcgucugggacgucaagaaccccgaccuccuuaacaaccaauucggaaccaugcccucccucacccucgcaugccuuaccaaacaaggccaagucgaccucaaugacgcaguacuagcccugacugaccucggccucaucuacaccgccaaguacccaaacuccucagaccucgaccgccucucgcaaucccaccccauccuaaacauggucgacaccaagaaaucaucacucaacaucuccggauacaacuucagccugggcgcagcagucaaagccggcgcaugcaugcucgacggaggcaacaugcuggaaaccaucaaagucaccccgcaaacgauggacggcauccucaaauccauccucaaaguaaagaaaucccucggcauguuuguauccgacacucccggcgaaagaaaccccuacgagaacauacucuacaaaaucugccucuccggcgacggauggcccuacauagcaucucgaaccuccaucgucggccgcgccugggaaaacacaaccgucgaccuugaaagcgacggcaaaccacaaaaagucggcaccgcuggaucaaacaaaagccuacaauccgcaggguucccaaccggccuuaccuacucccagcuaaugacccuaaaagacuccaugaugcaacuagacccauccgcgaagaccuggauagacauagaaggacgacccgaggacccagucgaaaucgcacucuaccaaccaauguccgggugcuacauccacuucuuccgcgaaccaacagaccucaaacaauucaaacaagacgccaaguacucccauggcaucgacgucgccgaccucuuccccgcccaaccaggacuaacauccgcagucauagaagcgcuuccuagaaacaugguacuaaccugccagggcucagacgacaucaaaagacugcuugacucccaaggcagacgagacaucaaacuaauugacaucucccucucaaaagcagacagccgacgcuuugaaaacgccgucugggaccaaugcaaagaccucugccacaugcacaccggcguagucguagaaaagaagaaacgcgguggcaaagaagaaauaacuccccacugcgcccucauggacugcaucauguacgacgccgcagucucuggcggacuaaacaucccaguccuccgugccguccuaccccgugacaugguuuuccgaaccuccagccccaaagucguacuuuag

SEQ ID NO: 9633 - RNA, 1710 nt, Artificial Sequence
  derived and/or modified CDS sequence (opt11) from LASV(Lassa virus/H.sapiens-wt/NGA/2016/ISTH_1026;Clade II)__AVO03590__NP
auguccgccagcaaagaagucaaaucauuccucuggacccaaagccuccgccgagaacuaucaggcuacugcucaaacaucaaacuacaaguagucaaagacgcccaggcccuccuccacggccucgacuucagcgaagucagcaacguacaacgacucaugcgaaaacaaaaacgagacgacucagaccucaaacgccucagagaccucaaccaagccgucaacaauuuaguggaacucaaauccacacagcaaaaauccauccuccgcgugggaacccuaaccucagacgaccuucuaacccucgcagccgaccucgaaaaacuaaaauccaaaguuauccgcaccgaacgaccccuguccagcggcgucuacaugggaaaccuuagcgcccaacagcuggaacaacggcgcgcgcuacucaaccucaucgggauggucggcggcgcccaaggaacccaacccggccgggauggcguaguccgcgucugggacgucaaaaaccccgaccugcuaaacaaccaauucggcacaaugccaucauuaacucucgcaugcuuaacuaaacaaggacagguagacuuaaacgacgccguccuagcccuaacagaccuaggacucaucuacacugccaaauaccccaacucauccgaucucgaccgacucucgcaaucccaccccauccucaacauggucgacacaaagaaauccucccuaaacauauccggcuucaacuucucccucggagcggccgucaaagccggcgccugcaugcuggacggcggcaacaugcuagaaaccauuaaagucaccccacaaaccaucgacggcauacucaaaagcauccucaaagucaagaaaucccucggcauguucguuucagauaccccaggcgaacgcaaccccuacgaaaacauccucuacaaaaucugccucuccggcgacggcuggccuuacaucgccagcagaaccucaaucguaggccgcgccugggaaaacaccaccgucgaccucgaauccgacggcaaaccccacaaagucggcaccgccggaagcaacaaaucucugcaaagcgccggcuucccaaccggacuaaccuacucccaacucaugacccucaaagacuccaugaugcaacucgacccaucagccaaaacuuggauagacaucgaaggccgaccagaagacccagucgaaauagcacuguaccaaccaaugucaggcugcuacauccacuucuuucgcgagcccaccgaccugaaacaauucaaacaagacgccaaauacucccacggcauagauguugccgaccuguuccccgcgcaacccggccuaaccuccgccgucaucgaggcacuacccagaaacaugguccuaacaugccaaggcuccgacgacaucaaacgacuccuagacucccaaggccgcagagacaucaaacuaaucgacaucgcgcucuccaaagccgacagucgacguuucgaaaacgccgucugggaccaaugcaaagaccucugccacaugcacaccggagucgucgucgagaaaaagaaacgcggcggcaaagaagaaaucacaccccacugcgcacucauggacugcauaauguaugacgcugcaguauccggaggucucaacauaccaguccuccgcgcaguccucccaagagacauggucuuccgaaccuccucucccaaagucguccuauaa

SEQ ID NO: 9634 - RNA, 1710 nt, Artificial Sequence
  derived and/or modified CDS sequence (opt11) from LASV(Lassa virus/H.sapiens-wt/NGA/2016/ISTH_1070;Clade II)__AVO03652__NP
augagcgccuccaaagaaguuaaaucauuccuuuggacccaaucucuccgacgagaacuaucugguuacugcuccaacauaaaacuccaaguaguaaaagacgcccaagcccugcuccacggccucgauuuuagcgaaguauccaacguccaacggcucaugcggaaacaaaaacgggacgacggcgaccuaaaacgccuccgcgaccuuaaccaagcaguaaacaaccucgucgaacuaaagagcacccaacaaaaaucaguccuacgcguaggaacacucaccagcgacgaccuccuaacccuugccgccgaccuagaaaagcucaaauccaaagucauccgcacagaacguccccucuccuccggcguauacaugggcaaccuauccacccaacaacuugaacaacgacgcgcccuacuaagcaugaucggcauggucgggggagcacagggcacccaaccaggcagagacggcgugguacgagucugggacgucaaaaacccagaccuacucaacaaccaauuuggcaccaugcccucccuaacccuagccugccucaccaaacaaggccaagucgaucucaacgacgugguacucgcccuaaccgaccuaggccuaauauacaccgccaaauaccccaacagcuccgaccuugaccgacugagccaaagccacccaauccucaacauggucgacaccaagaaauccagccucaacauaucaggauacaacuucucucucggagccgccgucaaagccggcgccugcaugcucgacggcggcaacaugcucgaaacaaucaaaguaacaccccaaaccauggacggaauccuaaaaucuauacucaaggucaagaaaagccucggcauguucguaucagacaccccaggagaacgcaaccccuacgaaaacauacuauacaaaaucugccugucgggcgacgguuggccauacaucgcaucccgcacggccauaguaggacgcgccugggaaaauacaacagucgaccucgaaucugacggcaaaccacaaaaaguaggagccaccggaucaaacaaaucucuccaaucagccggcuucccaacaggccucaccuacagccagcucaugacccuaaaagacuccaugaugcaacucgaccccucagccaaaaccuggauagacaucgaaggucgaccggaagaccccgucgaaaucgcacucuaccaaccuauguccgggugcuacauccacuucuuccgcgaacccaccgaucucaaacaauucaaacaagaugccaaauacagccacggcaucgacguaaccgaccucuucagcgcacaacccggccucaccuccgccgucaucgaagcgcuccccaggaacauggucuuaacaugccaaggcucagacgacauaaagcgccuucuagacucccagggucgacgcgacaucaaacucauagacauagcacucagcaaagccgauuccagacgauucgaaaacgcagucugggaccaaugcaaagaccucugccacaugcacacgggaguaguggucgagaaaaagaaacgaggcggcaaagaagaaaucacgccccacugugcccuaauggacugcauaauguacgacgcagcagucagcggcggacuaaacauacccguccuccgcgccguccuaccacgcgacaugguguucagaaccucaagcccaaaaguuguccucuaa

SEQ ID NO: 9635 - RNA, 1710 nt, Artificial Sequence
  derived and/or modified CDS sequence (opt11) from LASV(Lassa virus/H.sapiens-wt/NGA/2016/ISTH_1150;Clade II)__AVO03628__NP
augagcgccuccaaagaaguaaaaucauuccuuuggacccaaucccuucgccgagaacucucgggauacugcagcuccaucaaacuacaagugguaaaagaugcacaagcucuccuacacggccuagacuucuccgaggucuccaacguacaacgacucaugcgcaaacaaaaacgagacgacuccgaccucaaacgccuaagagaccucaaccaagccgucaacaaccucguagaacucaaaagcacacaacaaaaaucgauacuccgcgugggcacacuaaccucugacgaccuacucacccuagcagcagaccucgaaaaauuaaaauccaaagucauccgcacagaacgcccccuuuccagcggaguauacaugggcaaccucagcacccagcagcucgaacaacgccgagcccuccuuucaaugaucgguaugguaggcggagcccaaggcacccaacccggcagagacggcgucgucagaguaugggacgucaaaaaccccgaccuccuaaacaaccaauucggaacaaugcccucccuaacccucgccugccucaccaaacaaggccaaguagaccuaaacgacaccguccucgcccuaacagaccuuggccuuaucuacaccgccaaauaccccaacucaucugaccucgaccgacucucccaaucccaccccauacuaaacaugguggacaucaagaaauccagccuaaacaucuccggcuacaacuucagccuuggcgcagccgucaaagccggcgccugcaugcucgauggaggaaacaugcucgaaacaauaaaaguuacaccccagaccauggacggcauccuaaaaucaauccuuaaagugaaacgaucacucggcauguuugucagcgacaccccaggagaacgcaaccccuacgaaaauauccucuacaaaauaugccucuccggcgacggcuggccauacaucgcuuccagaacaucgaucgucggccgagccugggaaaacacgaccguagaccuggaauccgacggcaaaccacaaaaagucggaaccgccggcucaaacaaaucccuacaaagcgccggcuuccccacaggccuaacauacucccaacucaugacccuuaaagacagcaugaugcaacucgacccauccgcaaaaaccuggauagacaucgaagggcgcccagaagacccaguagaaauugcccuauaccaacccaugucaggaugcuacauucacuuuuuccgcgagcccaccgaccucaaacaauucaaacaagacgccaaauacucacacggcaucgacgucaccgaccucuucucagcucaaccaggccucaccagcgccgucauagaagcccucccccgcggcaugguccuaaccugccaaggcucugacgacaucaagaaacuccuagacagucaaggucgccgagacaucaaacucaucgacauaucccuaucgaaagcagacucucgccgguucgaaaacgcagucugggaccaaugcaaagaccucugccacaugcacaccggaguaguagucgagaagaagaaacgaggcggcaaagaagaaaucacaccccacugcgcacuaauggacugcaucauguucgacgccgcaguuucuggcggccuaaacauacccauccuacgcgccguccucccccgagacauggucuuccgcaccuccucccccaaaguaguacuguga

SEQ ID NO: 9636 - RNA, 1710 nt, Artificial Sequence
  derived and/or modified CDS sequence (opt11) from LASV(Lassa virus/H.sapiens-wt/NGA/2016/ISTH_1174;Clade II)__AVO03556__NP
auguccgcgagcaaagaaguuaaauccuuccuauggacgcaaucccucagacgcgaacuuuccggauacugcuccaacauaaaacuacaagucgucaaagaugcccaagcacuauugcacggacuagacuucagcgaagucuccaacguccaacgacucaugagaaaacagaaaagagacgacuccgaccucaaacgacuacgcgaccuaaaccaagcaguaaacaaccucgucgaacucaaauccacccaacaaaaaucuauacuaagaguaggcacccuaaccuccgacgaccuacucacucucgccgcagaccuugaaaaacuuaaaucaaaaguaauacgaaccgaacgcccacucuccuccgguguauacaugggcaaucucucgacccagcaacucgaacaacgccgagcccuccuaaacaugaucggcauggucggaggggcccaauccacccagccaggccgcgacggcgucguucgcguaugggacgucaaaaaucccgaccuucucaacaaccaauucggaacaaugccaucucucacccuagccugccuuaccaaacagggccaaguagaccuaaaugacgcaguacucgcacucacagaccuuggacucaucuacacagcaaaauaccccaauucuagcgaccucgaccgccucucucaaucccacccaauccucaacauggucgacaccaagaaauccucccucaacaucucaggcuacaacuucucacucggggccgcagucaaagccggagccugcaugcucgacggcggcaacaugcucgaaacaauuaaaaucacaccccaaaccauggacggcauacuaaaauccauccucaaagucaaacgcucacucgggauguucgucuccgacaccccgggggagagaaaccccuaugaaaacauccuguacaaagucugccucuccggcgacggcuggcccuacaucgcaucccgcaccucaaucguaggcagagccugggaaaacaccaccgucgaccucgaguccgacggcaaaccucagaaaguaggaacagucgggaguaacaaaucccuccaaucggccggcuuccccaccggacuuaccuacagccaacucaugacacugaaagacagcaugaugcaacucgauccauccgccaaaacauggaucgacaucgaaggccgccccgaagacccaguggaaauagcccucuaccaacccaugucaggaugcuacauacacuucuuucgagaaccaaccgaucucaaacaauucaaacaagacgccaaguacagccacggaaucgacgucgcagaccuguucccggcccagccaggccuaacauccgcgguaaucgaagcccuaccccgcaacaugguacuaaccugccaagguuccgacgacauaaaacgccuccucgacucccaaggacgccgugacaucaaacucauagacaucgcccuaucuaaagccgacuccagacgauucgagaacgcagucugggaccaaugcaaagaccuaugucacaugcacacuggaguaguaguagaaaagaagaaacgaggcggaaaagaagaaaucacaccacacugugcucucauggacugcaucauguaugacgcagcagucuccggaggacucaauauccccgugcugcgcgccguacuucccagagacaugguauucagaacaucaagccccaaaguaguccucuga

SEQ ID NO: 9637 - RNA, 1710 nt, Artificial Sequence
  derived and/or modified CDS sequence (opt11) from LASV(Lassa virus/H.sapiens-wt/NGA/2016/ISTH_1207;Clade II)__AVO03600__NP
augucagccucaaaagaagucaaaucauuucuauggacccaaucccuccgacgagaacucaguggcuacugcucaaacaucaaacuucaggucgucaaagacgcccaagcacuccuccacggccuagacuucucagagguaucaaacguccaacgucuuaugcgcaaacagaaacgcgacgauagcgaccuaaaacgacuccgcgaccucaaccaagcagucaauaaccucgucgaacucaaaagcacccagcagaaaagcauacuucgaguuggaacccuaaccagcgacgaccuacucauccucgccgccgaccuagaaaagcucaaaucaaaaguaaucagaaccgaacgcccccucucauccggagucuacauggguaaccuaagcacgcaacaacuggaacaacgccgagcccuccuaaacaugauuggaauggucgacggcgcacaaggcacacaaccaggacgcgacggcgucguaagagucugggacgucaaaaaccccgaccuccuaaacaaccaauucggaaccaugcccucucugacacuagcuugccucaccaaacaaggccaagucgaucuaaacgacgcaguacuagcccucaccgaccucggccugauauacaccgcaaaauaccccaacagcuccgaccucgaccgacucucccaaucccaccccaucuuaaacaugguagacacgaagaaauccagccucaacaucuccggcuacaacuucagccugggagcagccguuaaagcaggcgcauguauguuagacggagggaacaugcucgagaccauaaaaguuacaccccaaaccauggacggaauccuaaaauccauacugaaaguuaagaaaagccuuggcauguucgucuccgacacacccggcgaaagaaacccauacgaaaacauccucuacaaaaucugccucagcggcgacggcuggcccuacauagcaucccgcaccuccauagucggccgugcaugggaaaauaccacagucgaccuagaaucagacggaaaaagccaaaaaguuggcaccgccggcagcaacaaaucacuccaaucagccggcuucccaacuggccuuacuuacucccaacuaaugacacucaaagacuccaugaugcaacucgaccccagcgcaaaaaccuggaucgacaucgaaggcagaccagaagacccagucgaaauagcccucuaccaacccaugagcggaugcuacauccacuucuuccgcgaaccaaccgaccuaaaacaauucaaacaagacgccaaauacucccacgguaucgacguagcagaccucuuucccgcacaaccaggacuaaccuccgccgucauugaagcccucccccgaaacaugguacucaccugucaaggaagcgacgacaucaaacgccuccuagacucccaaggccggcgcgacaucaaacuaauagacaucgcacuaucaaaagcagacagccgccgauucgaaaacgccgucugggaccagugcaaagaccucugccacaugcacaccggaguagucgucgaaaagaagaaacgcggcggaaaagaagaaaucacaccccacugcgcccuaauggacugcaucauguacgacgcagccgucagcggaggccucaacauacccguacuccgcgccguacuuccccgcgacaugguauucaggaccuccucacccaaagucguguuauga

SEQ ID NO: 9638 - RNA, 1710 nt, Artificial Sequence
  derived and/or modified CDS sequence (opt11) from LASV(Lassa virus/H.sapiens-wt/NGA/2016/ISTH_1306;Clade II)__AVO03624__NP
augucagccucaaaagaagucaaaucauuccuuuggacccaaucccuacggcgcgaacucuccggauacugcuccaacauaaaauuacaaguaguaaaagacgcacaagcgcuccuccacggacucgacuucucagaaguaucaaacguccaacgucuaaugcgcaaacaaaaacgcgacgacggcgaccuaaaacgccuccgcgaccucaaccaggcagucaacaaccucgucgaacucaaaagcacccaacagaaauccauccuccgcguaggcacacuaacuagcgacgaccuucuaacacucgcagccgaccucgaaaaacucaaaagcaaagucauacguaccgaacgcccacucucguccggcgucuacaugggcaaucucuccacccaacaacuagagcaacgacgagcucuccucaacaugauagguauggucgggggagcacaaggaacccaaccuggccgagacggcgugguuagaguaugggacgucaaaaaccccgaccuccucaacaaccaauucggaaccaugccaagccucacccucgccugccuaaccaaacaaggucaagucgaccucaacgacgcaguacucgcgcucaccgaccucggucucaucuacaccgccaaauaccccaacagcucagaccuugaccgccucagccaaagccaccccauccucaacaugguagacaccaagaaaagcagccucaacauauccggcuacaacuucucccucggagccgccguuaaagccggcgccugcaugcucgacggcggcaacaugcucgagaccauaaaagucacaccccaaaccauggacggaauccuaaaauccauccugaaaguaaagaaaagccucggcauguucguauccgacacccccggagaacgcaaccccuacgaaaacauccuauacaaaaucugccucucuggcgacggcuggccauacaucgcaagccgcaccuccaucgucggccgcgccugggaaaacaccacagucgaucuagaauccgacggaaaaccccagaaagucggcacugccggaucaaacaagagccuccaaagcgccggcuuccccaccgggcucaccuacagccaacuaaugacgcugaaagacucaaugaugcaacucgaccccucagccaaaaccuggaucgacauagaaggacgccccgaagaccccgucgaaauagcccuauaccaacccaugucaggcugcuacauacacuucuuccgagaaccaacugaccucaaacaauucaagcaagacgccaaauacucccacggaauagacguugcagaccuauucccagcccaaccuggucucaccagcgcagucaucgaagcacuucccagaaacaugguauuaacaugccaaggauccgacgauaucaaacgccuccucgacucacagggacgccgagacaucaaacucaucgacaucgcccucucaaaagcagacucacgccgcuucgaaaacgccgucugggaccaaugcaaggaccuaugucacaugcacaccggagucguugucgagaaaaagaaacgaggcggcaaagaagaaaucaccccacacugcgcccucauggacugcauuauguacgacgccgccguaucaggaggccuaaacaucccaguacuccgcgccguucucccccgggacaugguauuccgcacuuccagccccaaagugguacucuga

SEQ ID NO: 9639 - RNA, 1710 nt, Artificial Sequence
  derived and/or modified CDS sequence (opt11) from LASV(Lassa virus/H.sapiens-wt/NGA/2016/ISTH_1311;Clade II)__AVO03576__NP
augucagccucuaaagaagugaaauccuuccucuggacccaaucacuccgccgcgagcucucaggguacugcagcaacaucaaacuacaagucguaaaagacgcacaagcccuccuccacggccucgacuucagcgaaguauccaacguucaacggcuaaugcgaaaacagaaaagagacgacggagaccucaagcgccuccgcgaccucaaccaagccgucaacaaccucguggagcuaaaauccacccaacaaaaauccguccuccgcguuggaacccucacaagcgacgaccuccucauccuagcagccgaccucgaaaaacuaaaauccaaagucauccgaaccgaacgaccccugagcagcggcguuuacaugggcaaccucuccacccaacaacuagaacagcgccgcgcacucuuaucuaugaucggcaugguagggggugcacaaggcacccaaccaggacgcgacggagucguacgugucugggacgugaaaaaccccgaucuacucaacaaccaguucgguaccaugccuucauugacccucgcaugccuaaccaaacaaggccaagucgaccuaaacgacgccguacucgcacuaacagaucucggacucaucuacaccguaaaauacccaaacagcuccgaccuagacagacucucccagagccaccccauccucaacauggucgacacuaagaaauccucccuaaauaucagcggcuacaacuucucccuaggcgccgccguaaaagcaggcgcaugcaugcucgacggaggcaacaugcuugaaaccaucaaagucacaccccaaaccaucgacggcauucucaaauccauccucaaagucaaacgcucacucggcauguucgucagcgacacccccggcgaacgaaacccauaugagaacauccucuacaaaauaugccucucaggcgacggcuggcccuacauagcaagccgcacauccaucgucggccgcgccugggaaaauaccaccguagaccucgaaagcgacggcaaaccccaaaaagucggcgccgccgguucaaacaagagccuccagucagccggcuucccaaccgggcuaaccuacucacaacugaugaccuuaaaagacucgaugaugcaacuugacccaagcgccaaaaccuggauagacaucgaaggacgcccagaagaucccguugagaucgccuuauaccaaccaauguccggcugcuacauccacuucuuccgcgagcccaccgaccugaaacaauucaaacaggacgccaaauacucccauggcauugacguaaccgaccuauucucagcgcaacccggccucaccagcgccgucaucgaagcccucccaagaaacaugguccuaaccugccaaggcagugacgauaucaaaaagcuccucgacagccaaggaagacgcgacauaaaacucaucgacauaagccugaacaaaaccgacucacgccgcuucgaaaacgccgucugggaccaaugcaaagaccucugccacaugcacacaggcguaguaguggaaaagaagaaacggggaggcaaagaggaaaucacgccacacugcgcccucauggacugcaucauguucgacgcagccguauccggcggccuuaacauucccauccuacgggccguccucccacgugacaugguauuccgaaccucuucaccuaaagucguccucuag

SEQ ID NO: 9640 - RNA, 1710 nt, Artificial Sequence
  derived and/or modified CDS sequence (opt11) from LASV(Lassa virus/H.sapiens-wt/NGA/2016/ISTH_1423;Clade II)__AVO03578__NP
auguccgccuccaaagaaguuaagagcuuccucuggacccaaagccuacgccgcgagcuaucuggcuacugcucaaacaucaaacuccaaguagucaaagacgcccaagcacuccuccacggacucgacuucuccgaaguaucaaauguccaacgacucaugcguaaacagaagcgagacgacucagaccucaaacgccuccgcgaccucaaccaagcagucaacaaccuagucgaacucaaauccacccaacaaaaaucaauccuccguguuggcacacuuacaucagacgaccuccucacccucgccgcagaccucgaaaaacucaagagcaaagucauccgcacagaaagaccccuauccuccggcguauacaugggcaaccucucgacccaacaacucgaacaacggcgcgcccuccugaacaugaucggaauggucucaggaacacaaggaacccaacccggacgagacggcguaguccgcgucugggacgucaaaaacccagaccuccucaacaaccaauucggcacaaugcccucccuaacacuggccugccuaaccaaacaaggucaaguagaccuuaacgacgcaguacuagcacucaccgaccuaggguugaucuauacagcaaaauaccccaacucauccgacuuagacagacuaucccaaagccaccccauccucaacaugguagacaccaaaaagucuucacucaacaucuccgguuacaacuucagccucggcgcagcaguaaaagcaggagccugcaugcuagacggagguaacaugcucgaaaccaucaaaguaacaccccaaacaauggacggcauacuaaaaagcauccuaaaagucaagaaaagccucggcauguuugucuccgacacacccggagaacgaaaccccuacgaaaacauauuauacaaaaucugccucuccggcgacggauggcccuacauagccucgcgcacuucaaucgucggcagagcuugggaaaacacaacaguggaccuagaaagcgacggaaaaccccagaaaaugggcacagccggcucaaacaaaagccuacagucagccggauucccgaccggccucacauacucacaacucaugacacucaaagacucaaugaugcaacucgacccaagcgcaaaaaccuggaucgacaucgaaggucgccccgaagacccaguagaaaucgcacucuaccagcccauguccggaugcuacauccacuuuuucagagaaccuaccgaccuaaaacaauucaaacaggacgccaaauacucacacggaaucgacgucgcggacuuauuuccugcacaaccaggccucacauccgccgucaucgaagcccucccgagaaacaugguccugaccugccaaggcucagacgacauaaagaaacuccucgacagccaaggccgccgcgacaucaaacucaucgacauagcacucagcaaagccgacucccgcagauucgaaaacgccgucugggaucaaugcaaagaccucugccacaugcacaccggcgucgugguggagaagaagaaacgaggcggcaaagaagaaaucacaccccacugcgcgcuaauggacugcauaauguacgacgcugccgucuccggaggacucaacaucccaguacuacgugccguccucccccgagacauggucuuccgaacaucaaaccccaaagucguccuguag

SEQ ID NO: 9641 - RNA, 1710 nt, Artificial Sequence
  derived and/or modified CDS sequence (opt11) from LASV(Lassa virus/H.sapiens-wt/NGA/2016/ISTH_1472;Clade II)__AVO03606__NP
auguccgccuccaaagaagucaaaucauuccuauggacgcaaucacuccgccgcgaacuauccggauacugcucaaacauuaaacuacaagucgucaaggacgcacaagcacuccuacacggucucgauuuuucugaaguaagcaauguccaacgccucaugcgaaaacaaaaacgagacgacagcgaccuaaaacgccuacgcgaucucaaccaagccgucaacaaccucguagaacucaaaagcacccaacaaaaauccauccucagagucggcacccucaccuccgacgaucuacucacccucgccgcagaucucgaaaaacucaaauccaaaguaauacgcaccgaacguccgcuauccucuggcgucuacaugggcaaccucuccacccaacaacucgaacaacgucgcgcacuacugaacaugauaggcauggucggcggcauacagggcacccaacccggccgcgacggagucguaagagucugggaugucaaaaaccccgaccuacucaacaaucaauucggaaccaugccaucacucacccucgccugccucacuaaacaaggccagguagaccucaacgacaccguacaggcccugaccgaccuaggccucaucuacacagccaaauaccccaacucauccgaccuagaccgacucucccaaucacaccccauccuaaauauggucgacaccaagaaaucuucccugaacauauccggcuacaauuucagccucggagcugccgucaaagccggagccugcaugcucgacgggggcaacaugcuagaaaccaucaaaguaacaccccagaccauggacggcauccucaaaucaauacucaaagugaagaaaucccucgggauguucgucucagacacccccggagaacgcaaucccuacgaaaacauccuauacaaaaucugccuaucaggcgauggcuggccauacaucgccucacgcaccuccaucgucggccgagccugggaaaauaccacaguggaccucgaauccgacggcaaaccccaaaaagucggcaccgccggcuccaacaaaucacugcaaucagcaggcuuucccaccggccuaaccuacagccaacuuaugacccucaaagacucaaugaugcaacuagaccccuccgccaaaaccuggauagacauagaaggccgucccgaggaccccguagaaaucgcacucuaucaaccaaugagcggcugcuacauccauuucuucagagaacccaccgaccuaaaacaauucaaacaagacgccaaauacucacauggcauagacguagccgaccuuuuucccgcacaacccggacucacgagugcagucaucgaagcccuuccccgcaacaugguccucacaugccaaggauccgacgacaucaaacgucuccucgacucucaaggccgacgagacauuaaacuaaucgauaucucccuguccaagacagacagcagacgguucgaaaacgcagucugggaccaaugcaaagaccugugccacaugcacaccggcgucgucgucgagaaaaagaaacggggaggcaaagaagaaaucacaccccacugcgccuuaauggacugcaucauguacgacgccgccgucuccggcggccuaaacauccccguccuccgcgccguacucccccgcgacauggucuuccguacguccucccccaaagugguacuauag

SEQ ID NO: 9642 - RNA, 1710 nt, Artificial Sequence
  derived and/or modified CDS sequence (opt11) from LASV(Lassa virus/H.sapiens-wt/NGA/2016/ISTH_1474;Clade II)__AVO03614__NP
augagcgcauccaaagaagucaaauccuuccucuggacacaaucccuacgccgcgaauuaucgggcuacugcuccaacauaaaacuccaggucgucaaagacgcccaagcacugcuucacggacuggacuucagugaaguaagcaacguccaacgccuuaugcgcaaacaaaaacgagacgacagcgaccuaaaacgccuacgcgaccucaaccaagcagucaacaaccuagucgaacucaaauccacccaacaaaaauccauccuacgcgucggcacacucacauccgacgaccuccuaacccucgccgcggaccuagaaaaacuuaaauccaaagucauccgcaccgagcgcccccucuccagcggagucuacaugggaaaccucucaacacaacaacuagaacaacggcgagcccuccucaacaugaucggcauggucgguggcauccaaggcacccaacccggcagagacggcgucguccguguuugggacgucaaaaaccccgaccuccucaacaaccaauucggcacaaugcccucacucacccucgcgugccuaaccaaacaaggacaagucgaccucaaugauacgguccaagcccugacagaccugggccugaucuacaccgccaaauacccaaacuccagcgaccucgaccgccucucccaaucacaccccauacuaaacauggucgacaccaagaaaagcagccuaaacauauccggauacaacuucucccuaggcgccgccguaaaagcgggcgcaugcaugcucgacggcggcaacaugcucgaaaccaucaaaguaaccccucagaccauggacgggauucuaaaaucaauacuaaaaguaaaacgcagcuuaggcauguucguauccgacacccccggagagagaaaccccuacgaaaacauccuauacaaaaucugccucuccggcgacggcuggccauauaucgccuccagaaccucaaucgucggacgcgcaugggaaaacaccacagucgaccuagaaagcgacggcaaaccccaaaaagucggaaccgcaggaucaaacaaaucccuccaauccgcaggcuuccccaccggacuaacauauucucaacucaugacccugaaagacagcaugaugcaacuagaccccuccgcaaaaacguggaucgacauugaaggacgcccagaagacccagucgaaauagcacucuaucagcccauguccggaugcuacauccauuucuuuagagaaccuaccgaccucaaacaauucaaacaagacgcaaaauacucccacgguauagacgucgccgaucucuuccccgcgcaaccaggccucaccagcgcugucaucgaagcacuaccacgaaacaugguuuuaacaugccaaggcuccgacgacaucaaacgccuccucgacucccaaggccgacgagacauaaaacucaucgacauagcccucagcaaagcagacucaagaagauucgagaacgccgucugggaccaaugcaaagaccuaugccacaugcacaccggcgucgucgucgagaaaaagaaaagaggcggcaaagaagaaauaaccccgcacugcgcauuaauggauugcaucauguacgacgccgcaguaagcggaggacuaaacauacccguccuccgagccguacucccccgcgacauggucuuccgcaccucauccccaaaaguaguccuauaa

SEQ ID NO: 9643 - RNA, 1710 nt, Artificial Sequence
  derived and/or modified CDS sequence (opt11) from LASV(Lassa virus/H.sapiens-wt/NGA/2016/ISTH_1496;Clade II)__AVO03580__NP
augucagccucaaaagaaguaaaauccuuccuauggacacaaucacucaggcgcgaacuauccggcuacugcuccaauaucaaacuccaagucguuaaagacgcccaagcacuacuacacggccucgauuucuccgaaguauccaacguccaacgccucaugcgaaaacagaaacgagacgacuccgaccucaaacgccuacgagaccucaaccaagccgucaacaaccucgucgaacuaaaaagcacacaacaaaaauccauccugaaagucgguacccucacauccgacgaccuccuuacccucgcagccgaccuagaaaagcucaaguccaaaguaauccgcaccgaacgcccccuuagcuccggcgucuacaugggcaaccucagcacccaacaacucgagcaacgccgcgcacuacucaacaugaucgguauggucggcggagcccaaggcacccaaccaggucgcgacggagucguacgagucugggacgucaaaaaccccgaccuacuaaacaaccaauucggcacaaugccgucccucacccuagcaugccucaccaaacaaggacaggucgaccucaacgaugcaguccuggcccuaacggaccucggucucauauacaccgccaaauacccaaauuccucagaccucgaccgacuaagccaaagccacccgauccuuaacauggucgacacaaagaaauccagccugaacaucagcggcuacaacuucucacucggugccgccguaaaagcaggggcaugcaugcucgacggaggaaacaugcuagaaaccaucaaagucacaccccaaaccauggacgguauccucaaauccauacucaaagugaaacgcagccuaggaauguucguaucagacacccccggcgaacgcaacccauaugaaaacauccucuacaaaauaugccucucaggcgacggcuggcccuacauagccucccgcaccucaauaguaggccgagcgugggaaaacaccaccgucgaccuggaaagcgacggcaaaccccaaaaaguaggaaccauaggaagcaacaaaucccuccaaucagcaggcuuuccaaccggccucaccuacucgcaacuaaugacccuaaaagauagcaugaugcaacuagacccaagcgcuaaaaccuggaucgacauagagggccgcccagaagaccccgucgaaauugcccuauaccaacccaugagcggaugcuacauucacuucuuccgcgaacccaccgaccuaaaacaauucaaacaagacgccaaauacucacacggaauagacguagccgaccucuucccggcccaacccggccuaacuagcgcaguaaucgaagcccucccccgcaacaugguccugaccugccaaggcucagacgacauaaaacgacuccucgacucccaaggcagacgagacaucaaacucaucgacaucgcacucucaaaagcagauagccgacgcuucgaaaacgcaguaugggaccaaugcaaagaccuaugccacaugcacacaggcgucgucgucgagaagaaaaagcgcggaggcaaagaagaaaucacaccgcacugcgcucuaauggacugcaucauguacgacgccgcuguaucgggaggacuaaacauaccaguccuacgagcaguccucccccgcgacaugguuuuccgcaccagcagccccaaaguuguccuauaa

SEQ ID NO: 9644 - RNA, 1710 nt, Artificial Sequence
  derived and/or modified CDS sequence (opt11) from LASV(Lassa virus/H.sapiens-wt/NGA/2016/ISTH_1541;Clade II)__AVO03554__NP
augucagcaucaaaagaagucaaauccuuccuuuggacccaaucccuacgcagagaacucuccggcuacugcagcaacauuaaacuacaagucguaaaagacgcacaagcccuccuccacggccuagacuucucugaagucucaaacguccaaagacucaugcgaaaacagaaacgcgacgacggagaccuaaagcgccuacgcgaccugaaccaagccgucaauaaucucgucgagcucaagagcacccaacaaaagucgauccuccgugugggcacccuaucaagcgacgaccuccugauacucgccgccgaccuagaaaagcucaaauccaaagucauccgcacagaacgaccacuauccagcggcguauacaugggcaaccucuccucacaacaacuagaccaacgccgcgcccuccuaaacaugaucggcaugaccggcggaaaccaaggcgcauccacuggacgcgacggcauaguccgcgucugggacgucaaaaacgccgaacuccuaaacaaccaauucggaacaaugccaagccucaccuuggccugccucaccaaacaaggacaaguagaccucaacgacgccguacaagcccucaccgaccucggucucaucuacacugcaaaauaccccaacuccucagacuuagacagacucucgcaaucccaccccauccuaaacaugaucgacacaaagaaaucaucccuaaacaucagcggauacaacuucucgcucggcgccgcagucaaagccggcgcgugcaugcucgacggcggcaacaugcuagaaacaaucaaagucuccccacagacgauggacggcauccucaaaucaauacucaaagucaagaaaucacuaggcauguucgucagcgacacccccggagaacggaacccguacgaaaacauccucuacaaaaucugccucucaggcgacggcuggcccuacauagccagcagaacuucgauuaucggcagagcaugggaaaacaccaucgucgaccuagaagccgacaacaaaccgcagaaauccggaaacaacggcagcaaccgcagccuccaauccgcagguuucccguccggacucaccuacucccaacucaugacccucaaagacagcaugcuccaacuggaccccaaugccaaaacauggauggacaucgaaggacgacccgacgaccccguagaaauagcccuguaucaacccuccuccggaugcuacauccacuuuuuccgggaaccgacagaccucaaacaguucaaacaagaugccaaauacucccacggcaucgacgucucagaccuauucgccgcccaaccaggucucaccuccgccguaauagaagcacucccacgcaacaugguaauaaccugccaaggcuccgaagacaucaagaaacuacuagaaucacagggacgaaaagacauaaagcuagucgacaucucccuuucuaaacucgacagcaggaaauucgaaaacguugucugggaccaauacaaagaccucugccacaugcacaccggcaucgucguagaaaagaagaaacgaggcggcaaagaggaaauaaccccacacugcgcccucauggacuguaucauguucgacgccgcagucaugggaggccuugacgcccgaguccuccgagccguacuccccagagacaugguauuccgcaccagcacaccaaaaguaguccucuaa

SEQ ID NO: 9645 - RNA, 1710 nt, Artificial Sequence
  derived and/or modified CDS sequence (opt11) from LASV(Lassa virus/H.sapiens-wt/NGA/2016/ISTH_1546;Clade II)__AVO03538__NP
augagcgccucaaaagaaguuaaauccuuccuuuggacccagucccuccgccgagaacuuucaggcuauugcucuaacaucaaacuccaagucgucaaagacgcgcaagcccuacuucacggacucgacuucagcgaggucucaaacguacaacgucucaugcgaaaacaaaaacgggacgauggcgaccuuaagcgccuccgagaccuaaaccaagccgucaacaaccuagucgaacugaaaucgacacaacaaaaaucuguacucagaguaggcacacuauccuccgacgaccuacuaauccucgccgccgaccucgaaaaacucaaauccaaagucauacgcacagaacggccucucucauccggaguauacaugggcaaccucuccucccaacaacuggaccagcgccgugcacuccucaacaugaucgggaugaccggaggaaaccaaggaaccaacgcaggccgcgacggaaucguccgaauaugggacgucaaaaacgccgaacuccuaaacaaccaauucggcacaaugcccucacucacccucgcaugccuaacaaaacaaggccaaguggaccuaaacgacguaguacaagcccucaccgaccucggccucauauacacagccaaauacccuaacuccagcgacuuagaccgccucagccaaucccaccccauccuaaacaugauagacaccaagaaaagcagccucaacauaagcggcuacaacuucucccucggcgccgccgucaaagcaggagccugcaugcucgacggcggcaacaugcucgaaacaauaaaagucucuccccagacgauggacggcauccucaaaucaauccucaaaguaaaacgcagccucggcauguucgucuccgacaccccgggcgaacgcaacccauacgagaacauccuauacaaaaucugccuguccggcgacggauggcccuacaucgccuccagaacgagcaucaucgggagagccugggaaaacaccaucgucgaccuagaaacaaacaacaaaccgcaaaaacccggaaacaacggcagcaacagaucccuccaauccgccggauucccagccggccugacauacagccaacucaugacccucaaagauaguaugcugcaacuggacccaaaugccaaaaccuggauggacauagaaggccgcccagacgaccccgucgaaaucgcccucuaccaacccucauccgggugcuacauccacuuuuuccgagaacccacagaucuaaaacaauucaaacaagacgccaaauacucccacggaauagaccucuccgaccucuucgccgcccaacccggacuuaccuccgcaguuaucgaagcacucccccgcaacauggucaucacaugccaaggcuccgaagacauaaugaagcugcucgagucucaaggccgcaaagacaucaaacucgucgacaucucccuaagcaaaagcgacucacgaaaauucgaaaacgccguaugggaccaguacaaagaccucugccacaugcauaccggaauaguaguagagaaaaagaagaaaggcggaaaagaagaaauaacaccacacugcgcccucauggacugcaucauguucgacgcagccgucaugggaggccucgacgccaaaguucuacgcgccguucuacccaaagacaugguauuccgcacgucaacuccaaaagucguccucuga

SEQ ID NO: 9646 - RNA, 1710 nt, Artificial Sequence
  derived and/or modified CDS sequence (opt11) from LASV(Lassa virus/H.sapiens-wt/NGA/2016/ISTH_1568;Clade II)__AVO03562__NP
auguccgcaagcaaagaagucaaaucuuuccuauggacacaaucacuccgacgagaacuaagcggauacugcucaucuauaaaacugcaagucgucaaagacgcucaagcccuccuucacggccuggacuucucugaaguaagcaacguccaacgacucaugcgaaaacagaaacgcgacgacuccgaccuaaagcgccuucgagaccuuaaccaagcagucaacaaccucgucgagcucaaaucaacacaacaaaaaucaauccuccgcgucggcacacucacgagugacgaccuccuaacacuagcugccgaucucgaaaagcuaaaauccaaaguaauccgcaccgaacgcccacuaagcagcggcguauacaugggcaaccuuucaucgcaacaacucgaacaaagacgcgcccuacuuaacaugauaggcaugguaggaggcgcacagggcacacagcccggccgcgacggcgucguacgcguuugggaugucaaaaaccccgaccuacugaacaaccaauucggaaccaugcccucccucacccucgccugccuaaccaaacagggccaaguagaccucaacgaugcgguccucgcacugaccgaccucggacuaauauacaccgccaaauaccccaacucuagcgaccucgaccgccucucccaaucacaccccauacucaacaugguagacacaaagaaaucaucccuaaacauauccggauacaacuucucccucggcgccgccguaaaagccggagccugcaugcucgacggcgguaacaugcuagaaacaaucaaagucacaccccagacaauggauggcauccucaaguccauacucaaagugaagcgcagccuaggcauguucgugagcgacaccccaggugagcgcaacccauacgaaaacauacuguacaaaaucugccucagcggcgauggcuggcccuacauagccagcaggacaucaauaguagggagagccugggaaaacacaaccguagaccuagaaagcgauggcaaaccccaaaaagucggccccgccggcuccaacaaaagccuacaaagcgccgguuuccccaccggccuaacauacucacagcugaugacccuaaaagacagcaugaugcaacucgacccauccgcaaaaaccuggauugacauagagggacgccccgaggaccccguagaaaucgcccucuaccaaccaauuuccggcugcuacauacacuucuuccgcgaaccaaccgaccucaagcaauucaaacaagacgcgaaauacucccacggaaucgacgucgccgaccucuuccccgcccaaccaggccuaacuuccgccguuaucgaggcucucccccguaacaugguccucacaugccaaggcagcgacgacauaaaacgccuacucgauagccaaggacgccgggacauaaaacuaaucgacauagcccuaucaaaggcggacucacgcagauucgaaaacgccgucugggaccaaugcaaagaccugugccacaugcacaccggagucguagucgaaaagaagaaacgcggaggcaaagaagaaauaacaccacacugcgcacuaauggacugcaucauguacgacgccgccguauccggcggccucaacauccccguccuaagagccguccugccccgugacaugguauuccgcacaagcucccccaaagugguccucuaa

SEQ ID NO: 9647 - RNA, 1710 nt, Artificial Sequence
  derived and/or modified CDS sequence (opt11) from LASV(Lassa virus/H.sapiens-wt/NGA/2016/ISTH_1591;Clade II)__AVO03648__NP
auguccgcaagcaaagaaguaaaauccuuccucuggacacaaucccuacgaagagagcuauccggcuacugcucaucaaucaaacuucaaguaguaaaagacgcccaagcccuacuacacggccuagacuucucggaagucaguaacguacaacgccuaaugcgaaaacaaaaacgagacgacagcgaccucaaacgcuugcgcgaccucaaccaagcaguaaacaaccucgucgaacucaaaagcacacaacaaaaaucgauccuacgcgucgguacacucacguccgacgaccuacucacccucgccgccgaccuagaaaaacuaaaauccaaaguaauaaggaccgagcgcccccuaagcuccggagucuacaugggcaacuuauccucccaacaacucgaacagcgacgggcccuacuaaacaugauaggaaugguaggcggcgcacagggaacacaaccgggccgcgacggcgucguccgcguuugggacgucaaaaacccugacuuacuaaacaaccaauucggaaccaugcccucgcuuacccuagccugccuaaccaaacaaggccaggucgaccucaacgacgccguccucgcgcucaccgaccucggccucaucuacacagcgaaauacccaaacagcucagacuuagaccgacuaucccaaucccaccccauccucaacauggucgacaccaagaaaucgagccuuaacauaagcggcuacaacuucucccucggcgccgccguuaaagcaggcgcuugcaugcucgacggcggcaacaugcuugaaaccauaaaagucacaccccagaccauggacggcauccucaaaucgauccucaaaguaaaacggagccucggcauguucguaucagacaccccgggcgaacgcaaccccuacgaaaacauccucuacaaaaucugccucucaggagacggcuggcccuauauagcaagccgaacaagcauagucggccgagccugggaaaacacaacagucgaccucgaauccgacggcaaaccacaaaaaguaggaucggccgguuccaacaaaucacuucaaagcgccggauucccuaccggcuuaaccuacagccaacucaugacccucaaagacagcaugaugcaauuagacccauccgccaaaacauggaucgacauagaaggacggcccgaggaccccgucgaaauagcccucuaccaaccaauguccggcuguuacauccacuuuuuccgcgaacccaccgaccuaaagcaauucaaacaggacgccaaauacucccacggaaucgacgucgccgaucucuucccagcacaaccaggcuuaaccucagcagucauagaggcccucccccgaaacaugguccuaaccugucaaggcucagaugacgucaaacgacuucuagacucgcaaggacgacgagacauaaagcuaaucgacaucgcgcucuccaaagcagauucacgacgauucgaaaaugcagucugggaccaaugcaaggaccugugccacaugcacacaggcgucguugucgaaaagaagaaaagaggcgggaaagaagaaaucacaccccacugcgcccucauggauugcaucauguacgacgccgccguauccggcggucucaacauacccguccuccgagcaguccucccacgcgacauggucuuccgcaccucaaguccaaaaguaguacuguag

SEQ ID NO: 9648 - RNA, 1710 nt, Artificial Sequence
  derived and/or modified CDS sequence (opt11) from LASV(Lassa virus/H.sapiens-wt/NGA/2016/ISTH_1604;Clade II)__AVO03542__NP
augagcgcaagcaaagaagucaagagcuuccucuggacccaaucacuccgccgcgaacucucaggauacugcuccaacaucaaacuacaaguugucaaagacgcccaggcgcuccuccacggacucgacuucucagaagucagcaacguccagagacucaugcgaaaacagaaacgcgacgacggcgaccuaaagagacuccgcgaccuaaaccaagcagucaacaaucuggucgaacuuaaaaguacccaacagaaguccauucuccgagucggaacgcuaucguccgacgaccuccucacccucgcagccgaccucgaaaaacucaaaagcaaagucauccgcacggaaagaccccucagcagcggagucuacaugggcaaccucuccacccaacagcuugaccaaaggcgcgcacuacucaacaugaucggaaugguaggcgggucccaaggaacaagcgccggcagggacggaauaguacgcgucugggacguacgcaacccggaacuacuaaacaaccaauucggcaccaugcccucccucacccuagcaugccucaccaagcaaggccaaguggaccuaaacgacgcgguacaagcccucacagaccucggucucaucuacaccgcgaaauacccaaauagcucagaccucgaccggcuaucccaaucccacccaauccuaaacaugaucgacacaaagaaguccagcaucaacauauccggcuacaacuucucccucggcgcugcagucaaagccggcgcaugcaugcucgacggaggcaacaugcucgaaaccauaaaggucucaccacaaagcauggacggaauccucaaaucaauccugaaagucaaaagaucccuaggcauguucgucagcgauacgcccggcgaacgaaauccauacgaaaacauccuguacaaaaucugccuauccggagacggcuggccauacaucgccucccgcacauccauaaccggacgagccugggaaaacacuguagucgaccuagaaucugacaacaaaccaaagaaacccggcaacaacgaguccaaccgaucacuccagucagccggcuuccccgccggccucacauacagccagcuaaugacccucaaagacucuaugcuacaacuagauccaaacgccaaaacauggauggacaucgaaggccgccccgacgaccccguggaaauagcccuguaccaaccaaacaguggcugcuacauccacuucuuccgcgaaccgacugaucuaaaacaauucaaacaagacgcaaaauacucacauggcaucgacaucuccgaccucuucgcagcacaaccgggccucaccagugccgucaucgaagcccugccccgcaacauggucauaaccugccaaggauccgaagacgucaagaaacuacucgagucgcaaggacgcaaagauauccgccuggucgacaucucccucuccaaagccgacucacgcaaguucgagaacgccguaugggaccaauacaaagaccucugccacaugcacaccggaaucgucgucgagaaaaagaaaaagggaggcaaagaagaaaucacaccccacugcgcacucauggacuguaucauguucgacgccgcagucaugaacggacucgacgccagaguacuccgggccguacuaccccgcgacaugguguuccgcaccuccacuccccgcguaguacucuaa

SEQ ID NO: 9649 - RNA, 1710 nt, Artificial Sequence
  derived and/or modified CDS sequence (opt11) from LASV(Lassa virus/H.sapiens-wt/NGA/2016/ISTH_1609;Clade II)__AVO03662__NP
auguccgcauccaaagaggucaaauccuuccuguggacccaaucccuacgacgcgaacucagcggcuacugcuccaacaucaaacuacaaguaguaaaagacgcacaagcccuucuccacggacucgacuucucagaagucuccaacguccaacgccucaugcggaaacagaaaagagacgacggagaccuuaaacgacuccgcgaccucaaccaagccgucaauaaccucgucgaacucaaauccacccagcaaaaauccauacuuagaguaggcacccuauccagcgacgaccuccucauacuagccgccgaccuagaaaaacucaaauccaaaguaauccgcacagaacggccucuuuccagcggcguauacauggguaaccuauccucccaacaacuagaccaacgcagagcacuacucaacaugaucggcaugaccggaggaaaccaaggcaccaacacaggccgcgacggcauaguccgcguaugggacgugaagaacgccgaacugcuaaauaaccaauucgggaccaugccaucccucacacucgccugccucacgaaacaaggacaagucgaccugaacgacgcaguccaagcccucaccgaccuaggccucaucuacaccgccaaauaccccaacuccuccgacuuagaccgccucucccaaucccaccccauccuaaacaugaucgacaccaagaaaucgucacucaacauauccggcuacaacuuuagccucggcgccgccguaaaagccggagcaugcaugcuugaugguggcaacaugcucgaaaccauaaaaguaucgccccaaaccauggacggcauccucaaauccauacucaaagucaagaaaucccuaggcauguucguaagcgacacccccggagaaagaaaccccuacgagaacauccucuacaaaaucugccucucaggcgacggcuggccauauauagcaucaagaaccucaaucaccggaagggcaugggagaacacgaugguagaccucgaaacaaacaacaaaucccaaaaaccaggcaacaacggaagcaaccgcucccuacaguccgcaggcuuccccgccggccugacuuacucgcaacuaaugacccucaaagacucaaugcugcaacuagaccccaacgcaaaaacuuggauggauaucgaaggccgaccagacgaccccgucgagaucgcacuguaccagcccuccuccggcugcuacauccauuucuuccgcgaacccaccgaccuaaaacaguucaaacaagacgcaaaauacucacacggcaucgacaucuccgaccuauucgccgcacaacccggacucaccuccgccguaaucgaaguacucccacgcaacaugaccauaaccugccaaggcagcgaagacauaaagaaacuccuggagucacaaggacggaaagacaucaaacuugucgacaucagccucucaaaacucgacucuagaaaauucgaaaacgccgucugggaccaauucaaagacuuaugccacaugcacaccgguaucgucgucgaaaagaagaagaaaggcggcaaagaagaaaucacaccccacugcgcacucauggacugcaucauguucgacgcagcugucaugggaggccucgacgcaaaaguccugagagccgucuuaccccgcgacaugguauuccgcaccagcaccccaaaaguaguccucuaa

SEQ ID NO: 9650 - RNA, 1710 nt, Artificial Sequence
  derived and/or modified CDS sequence (opt11) from LASV(Lassa virus/H.sapiens-wt/NGA/2016/ISTH_1610;Clade II)__AVO03604__NP
auguccgcauccaaagaaaucaaaucguuccucuggacccaaagccuacggcgcgaacucuccggcuacugcuccuccaucaaacuacaagucgucaaagacgcccaagcccuccugcauggccuugacuucucagagguauccaacguccaacgacucaugagaaaacaaaaacgcgacgacuccgaccucaaaagacuccgcgaccucaaccaggcugucaacaaccuggucgaacucaaaaguacccaacaaaaauccauacuccgcgucggaacccuaaccagcgacgaccuacucacccuugccgccgaccuagaaaaacucaaauccaaaguaauucgaaccgaacguccccucagcuccggagucuacaugggaaaccuaucaacccaacaacucgagcaacgacgcgcccuacuaaacaugauaggcauggucggaggugcccaaggcacacaaccaggaagagacggaguaguacgcgucugggacgucaaaaaccccgaccuacuaaacaaccaguucggaaccaugcccucccuaacacucgccugccucaccaaacaaggacaagucgaccucaacgacgccguccuagcccuuacggaccucggacuaauauacaccgcaaaauaccccaacucauccgaccuagaccgacugucccaaucacacccaauccuaaacauggucgacaccaagaaaagcagccuaaacauaucaggauauaauuucucacucggcgcugcaguaaaggccggcgcauguaugcucgacggaggcaacaugcuagagacaauaaagguaacaccccaaaccauggacggcauccucaaauccauccuuaaagugaaacgcucucuggggauguucguguccgacacccccggagagcgaaaccccuacgaaaacauccucuacaaaaucugccuauccggagacggcuggcccuacaucgccagcagaaccagcauagucggcagagccugggaaaacacaacagucgaccuagaaucagacggaaaaccccaaaaaguaggaaccgcaggcucaaacaaaucccuacaguccgccggauuccccacaggccuaacauauucucaacuaaugacauuaaaagacuccaugaugcaacucgauccaagcgcaaaaacauggauagacaucgaaggacgccccgaagaccccgucgaaaucgcccuauaccaacccaugucaggcugcuacauccacuucuuccgagaacccaccgaccugaagcaauucaagcaggacgccaaauauagccacggaaucgacguugccgaucuauuccccgcucaaccaggccucaccucagcuguaaucgaggcccuacccagaaacaugguccucaccugucagggaagcgacgacauaaagaaacuccucgacucgcaagggcgacgcgacaucaaacucauagacauagcacuaagcaaaaccgacucccgucgcuucgaaaaugcagucugggaccaaugcaaagaccucugccacaugcacaccgggguugucgucgaaaagaagaaacgaggcggcaaagaagaaaucacaccccacugcgcccuaauggauugcaucauguacgacgcagccgucuccggcggccucaacauuccaguacuaagagcaguucucccccgcgacaugguauuccgaaccuccucucccaaagucguacucuaa

SEQ ID NO: 9651 - RNA, 1710 nt, Artificial Sequence
  derived and/or modified CDS sequence (opt11) from LASV(Lassa virus/H.sapiens-wt/NGA/2018/ISTH_0541;Clade II)__AVV65114__NP
augucagcaagcaaagaaguaaaauccuuccuuuggacacaauccuuacgccgcgaacuaagcggauacugcucaagcaucaaacuccaagucgucaaagaugcacaagcacuccuccacggccucgacuucuccgaagucuccaacguccaacgccugaugcgaaaacaaaagcgagacgauucagaucucaaacgacugcgcgaccucaaccaagcagucaacaaccuagucgaacucaaaucaacacaacagaaaagcauccucagaguaggaacccucaccagugacgaccuccucacccuggcagcagaccucgaaaaacucaaauccaaagucaucagaaccgaacgaccccuaucauccggagucuacauggguaaccuaucaacccaacaacuggaacaaagacgagcccuccucaacaugaucggaauggucgguggcgcacaaggaacacaacccggccgcgacggagucguccgcguaugggacgucaaaaaccccgaccuccuaaacaaccaauucgguacgaugccuucccucacccuagccugccucaccaaacaaggccaaguagaccucaacgacgccguucuagcguuaaccgaccucggccucaucuacaccgcaaaguaccccaacuccucugaccuagaccgccuaucgcaaucccaccccauccucaacauggucgacacaaagaaaucaucccuaaacaucuccggcuacaacuucagccuuggcgcagcagucaaagcaggcgccuguaugcucgacggaggaaacaugcucgaaaccauuaaagucacaccccaaaccauggacggcauccucaaauccauacuaaaagucaaacgcucccuuggcauguuuguaucagacaccccaggcgaacgcaaccccuacgagaacauccucuacaaaauuugccuaagcggggacggcuggcccuacauagcaucacguacaucaaucgucggccgagccugggagaauacaacugucgaucucgaaagugauggcaaaccacaaaaaguaggaguggccgguuccaacaaaagccuccaauccgcaggcuucccuacaggccucaccuacucccaacuuaugacacuaaaagacagcaugaugcaacucgacccauccgcaaaaaccuggauagacaucgaaggccgccccgaggaccccguggaaaucgcacuuuaccaaccaaugucaggaugcuacauccacuucuuuagggaaccaaccgaccucaaacaauuuaaacaagacgcgaaauucagccacggcaucgacgucgccgaccuuuucccagcccaacccggccucaccucggcagucaucgaagcccuaccacgcaacaugguccuaaccugccaaggcucagacgacaucaaacgacuccucgacucccaaggucgccgagacaucaaacucaucgacaucgcacucucaaaagccgacucccgccgauucgagaacgccgucugggaccaaugcaaagacuugugccacaugcacacaggcgucguaguagagaaaaagaaacguggcggcaaagaggaaaucaccccgcacugcgcccucauggacugcaucauguacgacgccgccguuuccggaggacucaacauaccaguccucagagcaguacucccccgagacauggucuucagaaccuccagccccaaaguaguacucuaa

SEQ ID NO: 9652 - RNA, 1710 nt, Artificial Sequence
  derived and/or modified CDS sequence (opt11) from LASV(Lassa virus/H.sapiens-wt/NGA/2018/ISTH_0664;Clade II)__AVV65096__NP
augagcgccuccaaagaagucaaauccuuccucuggacccaaucccuacgccgagagcucuccggauacugcuccucaaucaaacuacaaguagucaaagacgcccaagcucugcuacacggccucgacuucucagaaguaagcaacguccaacgccucaugcgcaaacaaaaacgugacgauuccgaccucaaaagacuccgggaccugaaccaagccgugaacaaccuugucgaacucaaaucaacccagcaaaaaucuauccuccgcgucggcacacuaaccucugacgaccuacuuacacucgccgccgaccucgaaaaacucaaauccaaaguaauccgcacagaacgaccccucuccagcggcgucuacauggguaaccucagcacacaacaacuagaacaaagacgagcacugcuaaacaugauaggcaugguaggcggcacccaaggcacccaacccggacgagacgggguaguccgcgucugggacgucaaaaacccagaccuccucaacaaccaauucggcaccaugcccucccuaacccuagccugccuaaccaaacaaggccaagucgaccuaaacgacgccguccucgcccucacggaccuuggacuuaucuacaccgcaaaauaccccaauagcucagaccucgaccgccuaagccaaucgcacccaauccuaaacauggucgauaccaagaaaucaucacuaaacauuuccggcuacaacuucucacucggcgccgccgucaaggcaggagccuguaugcuagacggaggcaacaugcuagaaaccaucaaagucacaccccaaaccauggacggcauccucaaaucuauccugaaagugaagaaaagccucggaauguucgucuccgacacccccggcgaaagaaaccccuacgaaaacauccuuuacaaaaucugccucucaggcgauggauggcccuacaucgcaagcagaacaagcaucguaggccgagccugggaaaacaccacuguagaccuagaacccgacggaaaacugcaaaaagucggcaccguaggcuccaacaaaagucugcaaucagcaggcuucccaaccggccucaccuacucacaacucaugacccuaaaagacuccaugaugcaacuagaccccuccgccaaaacauggaucgacauagaaggacgacccgaagacccaguagaaaucgcccucuaccaaccaauguccggcugcuacauacacuucuuccgcgaacccaccgaccucaaacaguucaaacaggacgcaaaauacucccauggaaucgacguagccgaccucuuccccgcccagccaggacuuaccucagcagucaucgaagcacucccucggaauauggucuugaccugucaaggcuccgacgacaucaagcgccuacucgacucacaaggacgacgugacaucaaacucaucgauauaucccuaucaaaagccgacucucgccgcuucgagaaugcugucugggaccaaugcaaagaccucugccacaugcacacaggcgucgucguggaaaagaagaaacgcggaggcaaagaagaaaucacaccccacugugcccuaauggacugcaucauguacgacgcagcaguuuccggcggccuuaacaucccaguacuacgcgccguccucccccgcgacaugguuuuccguaccuccuccccaaaagucguccuauaa

SEQ ID NO: 9653 - RNA, 1710 nt, Artificial Sequence
  derived and/or modified CDS sequence (opt11) from LASV(Lassa virus/H.sapiens-wt/NGA/2018/ISTH_0959;Clade II)__AVV65100__NP
augucagccucaaaagaaguaaaauccuuccucuggacacaaucgcuucgccgcgaauuauccggguauuguucaaacauaaaacuacagguagucaaagacgcacaagcacuccuccacggccucgacuucuccgaagucuccaauguacaacgacucaugcgcaaacaaaaacgugacgacuccgaccucaaacgacuccgagaccucaaccaagcagucaacaaccuaguagaacucaagucaacccaacaaaaauccauccuacgaguaggaacccuaaccagcgacgaccuccuaacacucgcagccgaccucgaaaaacucaaaagcaaagugauacgcaccgaacgaccccucagcagcgguguauacauggguaaucucucaacccagcaacucgagcaacgccgcgcccuacuaaaccugauaggaaugguaggcggggcccaagggacccaaccaggacgcgacggcguaguccguguaugggacgucaaaaaccccgaccuccucaauaaccaauucggcaccaugccaagccuaacccucgcgugccuaacaaagcagggccaagucgaccuaaacgacguaguacucgcccuaaccgaccucggccucauauacaccgccaaauaccccaacagcucagaccuugacagacuaagccagucacaccccauacucaacaugguagacaccaagaaaagcagucucaacauaucaggcuucaacuucucgcuaggagcagccguuaaagcaggagccugcaugcucgacggcggcaacaugcuagaaaccaucaaggugacaccccaaaccauggacggcauccucaaaagcauccuaaaggucaagaaaucccuaggcauguucguuagcgacaccccaggcgagcgcaacccauacgaaaacauccucuacaaaaucugccucagcggagacggcuggcccuacauagcaucaagaaccuccauaguugggcgugccugggagaacaccacuguagaccucgaaagcgauggcaaaccacacaaagucggcaccgcaggcucuaacaaaucacuacaauccgcgggcuucccaacaggccugaccuacucccaacucaugacacucaaagacuccaugaugcagcucgaccccuccgccaagacauggaucgauauagaaggacgaccagaagacccagucgaaauagcacucuaccagccaaugucagggugcuacauccacuucuuccgcgaaccaaccgaucuaaaacaguuuaaacaagacgccaaauacagccacggcaucgacgucgccgaccucuuccccgcgcaacccgggcuaacguccgccgucauagaagcccucccgcgcaacaugguacucacaugccaaggaucggacgacauaaaacgacuccucgacagccaaggcagaaaagacaucaaacucaucgacaucgcccugagcaagacggacucccgacgcuucgaaaacgcgguaugggaccaaugcaaggaccucugccacaugcacacaggugucgucgucgaaaagaagaaacgaggagguaaagaagaaauaacaccccacugcgcccuaauggacugcaucauguacgacgcagcagucagcggaggccucaacauccccguucuccgggccguccuaccacgcgacaugguauuucgaacauccagccccaaaguaguccuguag

SEQ ID NO: 9654 - RNA, 1710 nt, Artificial Sequence
  derived and/or modified CDS sequence (opt11) from LASV(Lassa virus/H.sapiens-wt/NGA/2018/ISTH_1024;Clade II)__AVV65106__NP
auguccgccuccaaagaaguuaagagcuuccuauggacccaaagccuacgccgugaacuaucuggauacugcuccuccaucaaauuacaagucgucaaagacgcacaagcccuacuacacggccucgacuucagcgaagucuccaacguacaacgccucaugcguaaacagaaacgagacgacuccgaccucaaacgccuacgagaccuaaaccaagccgugaacaaccucgucgaacucaaaucaacacaacagaaaagcguacuccgagucgggacacuauccucagacgaccuccuaacacuggccgccgaccucgaaaaacucaaauccaaagucauacgcaccgaacgcccccucucuucaggcgucuacaugggcaaccuauccacccaacaacuagaacaacgccgcgcccuccucaacaugaucggaauggucggcggcgcccaaggcacccaaccaggacgcgacggcgucguccgagucugggacgucaaaaaccccgaccuccuaaacaaccaauucggcacaaugcccucgcucacccuagcaugccucacaaaacaaggccaaguagaccucaacgacgcgguucucgcccuaaccgaccucggacuaauauacaccgcuaaauaccccaauuccuccgaccuagaccgucuaagccaaucccaccccauacuaaacaugguggacacaaagaaaagcucacucaacaucuccggcuacaacuucucccucggagccgcaguaaaagccggagccugcaugcucgacggcgggaacaugcucgaaacaauaaaagucacaccccaaaccauagacggcauacucaaaucaauccucaaagucaagaaaagccucggaauguucgucagcgacacccccggcgagagaaacccauacgaaaacauccuauacaaaauuugccucaguggcgacggauggcccuacauagcaucaaggaccuccauagucggccgcgccugggaaaacaccaccguugaccucgaauccgacggcaaaccccaaaaaguaggaacagccggcuccaacaaaucacuacaauccgccggauucccaaccggccucacauauucccaacuaaugacgcuaaaagacuccaugaugcaacuagauccaucagccaaaacauggauagacauagagggccgccccgaagaccccgucgaaaucgcccuauaccaacccaugagcggcuguuacauucacuucuuccgagaaccaaccgaccucaaacaauuuaaacaagacgccaaauacagccauggcauagacgucgucgaccuguuccccgcccaacccggacuuaccucggcagucaucgaagcccucccccgcaauaugguccuuaccugucaaggcucagacgacaucaaacgucugcucgacucacagggccgucgagacaucaaacuaauagacauagcccucagcaaagccgacucccgacgauucgaaaacgcuguaugggaccaaugcaaagaccuaugccacaugcacacuggaguggucguugaaaagaagaaaagaggcggcaaagaagaaaucacaccacacugugcucucauggacugcaucauguacgacgcagcgguaucaggcggacucaacauacccgucuuaagagccguccuacccagagacaugguauuccgcaccuccuccccaaaagucguucucuga

SEQ ID NO: 9655 - RNA, 1710 nt, Artificial Sequence
  derived and/or modified CDS sequence (opt11) from LASV(Lassa virus/H.sapiens-wt/NGA/2018/ISTH_1079;Clade II)__AVV65108__NP
augucagccagcaaggaagucaaaucauuccuauggacccaaucccuccgacgagaacuaucaggcuacugcaguaacaucaaacuccaagucguaaaagacgcccaagcccuacuccacggccuagacuucagcgaaguaucaaacguccaacgccucaugcgcaaacaaaaacgugaugacagcgaucucaaaagacuccgagaccucaaccaagcaguuaacaaccuugucgaacuaaaaagcacacaacaaaaauccauccuccgcguaggcacccucacaucagacgaccuacuaacccuugcagccgaccuagaaaaacucaaaagcaaggucauccguaccgagcguccccucuccucaggcgucuacaugggaaaccuguccacccaacaacuggaacaacgacgcgcccuccuuaacaugaucggcaugguugguggcacccagggcacccaacccggccgagacggagugguccgcgucugggacgucaagaacccagaccuucucaacaaccaauucggcaccaugcccucacucacgcuagccugccugaccaaacaagggcaaguggaccuaaacgaugcaguccucgcacuaaccgaccuaggucucauauacacagcuaaauaccccaacucaucugaccucgaccgccuaagucaaucccaccccauccucaacauggucgacacaaagaaaagcucacuuaacaucuccggauacaacuucucacuaggcgcagccgucaaagcuggcgcaugcaugcucgacgguggcaacaugcuagaaacaaucaaaguuacaccacaaaccauggacggcauauuaaaaucaauacuaaaagucaagaaaucacucggaauguucguauccgacacccccggcgaaagaaaccccuacgaaaacauccucuacaaaaucugccuuucaggcgacggcuggccauacauagcaucaaggacauccaucgucggacgcgcaugggaaaacaccaccguggaccucgaauccgacggcaaaccacaaaaaguagggaccgccggcagcaacaaaucucuccaauccgccggauuccccaccggacucacguacucccaacuaaugacccuaaaagacucaaugaugcaacuugacccaucagccaaaacauggaucgacaucgaaggccgcccagaagaccccguagaaaucgcccucuaccaaccaauaagcggaugcuacauccacuucuucagagaacccaccgaccucaaacaauucaaacaagacgcuaaauacagccacggcauagacguagcagaccuauuccccgcccaacccggccuaaccagcgccgucaucgaagcccucccccgcaacaugguacuaaccugucaaggaagcgacgacaucaaacgccugcucgacucccaaggacgacgcgacauaaagcucauagacauaucccucucaaaggccgacucccgaagauucgagaacgcuguaugggaccaaugcaaagaccucugccacaugcacacgggcgucguagucgagaaaaagaaacgcggcggcaaagaagaaauaacaccacacugcgcccucauggacugcaucauguacgacgccgcaguauccggcggccucaacaucccaguccuuagggccguacucccacgcgacaugguauuccgcaccuccucccccaaaguaguacucuga

SEQ ID NO: 9656 - RNA, 1710 nt, Artificial Sequence
  derived and/or modified CDS sequence (opt11) from LASV(Lassa virus/H.sapiens-wt/NGA/2018/ISTH_1375;Clade II)__AVV65116__NP
augucagccucaaaagaagugaaauccuuccucuggacccaaucucuccggcgcgaacucuccggauacugcagcaacaucaaacuacaagucguaaaagacgcccaagcccuccuacacggacuagauuucagcgaagucagcaauguccaacgccuaaugcggaaacaaaaacgcgacgacuccgaccuaaaacgccuccgcgaccucaaccaagccguaaacaaccucguugaacucaaaagcacacagcaaaaauccauccuccgcgucggaacccuaacaagcgacgaccuccucauacucgccgccgaccucgaaaaacuaaaaucaaaaguaauacgaacagaacgcccccucucaagcggagucuauaugggcaaccucucaacccaacaacucgaacaaagacgggcacuucuaaaccucaucggaaugguaggcggcgcgcaaggcacccaacccggccgcgacggcgucguccgcgucugggacgucaaaaauccagaccuccucaacaaccaauucgguaccaugcccucacuaacccucgcaugccuuaccaaacagggccaggucgaccucaacgacgccguccuagcacucaccgaccucggccucaucuacaccgcuaaauacccuaauuccucagaccuagacagacucucccaaagccacccaauccucaacauggucgauaccaaaaagucaucacugaacauaagcggcuucaacuucucacuuggcgccgcagucaaagccggcgcaugcaugcucgacggcgguaacaugcuugaaaccaucagaauaacaccacagaccauggacgguauccuaaagucaauccucaaagucaaaaagagucucggaauguucguaucagacacccccggggaacgcaacccauacgagaacauacucuacaagauaugccuaagcggcgacggcuggccauacauagccucacgcacuuccauaguaggacgugcaugggaaaacacuacagucgaccuugaaagcgauggcaaaccccacaaagucggcaccgccggaagcaacaagagccuccaaucagccggcuuccccaccgggcucaccuacucccaauuaaugacacucaaggacagcaugaugcagcucgaccccuccgcuaaaacauggaucgacauagaaggacgccccgaagaccccgucgaaaucgcccuauaccaaccgaugucaggaugcuacauccauuucuuccgagaaccaaccgaccuaaagcaauuuaaacaagacgcaaaauacucccauggaaucgacgucgccgaccucuucccagcccaaccaggccuuaccucagccgucaucgaggcccucccacguaacaugguacucacaugccaaggcuccgacgacauaaaacgccuccuagacucgcagggacggcgggacaucaaacucauagacauagcccuaucaaaagcggacagccgcagauucgaaaaugccgucugggaccaaugcaaagaccucugccacaugcacacaggagucguugucgagaaaaagaaaagaggaggaaaagaagaaauaacaccccacugcgcccucauggacugcaucauguacgacgccgccguaagcgguggacucaacauacccguacuaagagcaguccucccacgcgacauggucuucagaaccucauccccgaaagucguccuauga

SEQ ID NO: 9657 - RNA, 1710 nt, Artificial Sequence
  derived and/or modified CDS sequence (opt11) from LASV(Lassa virus/H.sapiens-wt/NGA/2018/ISTH_1381;Clade II)__AVV65112__NP
augagcguguccaaagaagucaaauccuuccucuggacccaaucucuaagacgggaacucagcggauauugcuccagcauaaaacuccaagucguaaaagacgcccaagcucuacugcacggacucgacuucagugaaguauccaacguccaacgccuuaugcgaaaacaaaaacgcgacgauucagaccuaaaacgccuucgggaccuaaaccaagccgucaacaaucuagucgaacucaaguccacacaacagaaaaguauacuaagagucggcacccucaccagcgacgacuuacuaacccucgccgccgaccucgaaaagcucaaauccaaagucauccgcaccgaacgaccacucuccucaggaguauacaugggcaaccuaaguacccaacaacucgaacaacgccgcgcccuccucaacaugaucggcauggccggcggagcacaaggcacucaaccaggacgagauggagucguccgaguaugggacgucaaaaaccccgaccuacuaaacaaccaauucggcaccaugcccucgcuaacccuagcaugcuuaaccaaacagggccaaguagaccucaacgacgccguucucgcacucacugaccuaggccuuaucuacacagccaaauaccccaacuccucagaccucgaccgccucagccaaagccacccaauacucaacaugguagauacaaagaaauccucccucaacauaagcggcuacaacuucucccuaggcgccgcgguaaaagccggagccugcaugcuggacggggguaauaugcuggaaaccauaaaagucacaccccaaaccauggacggcauacucaaaucuauacucaaaguaaaacgaucacucggaauguucguauccgacacucccggagaaagaaacccauacgaaaauauccucuacaaaaucugccugucaggagacggcuggcccuacaucgcaagccguacgagcaucgucggccgcgcaugggaaaacaccaccguggaccucgaaagugauggcaaaccacagaaaauaggcaacaccggcucaaacaaaucgcuccaauccgccggcuuccccaccggccucaccuacagccaacuaaugacccucaaagauuccaugaugcaacuagacccuucagcaaaaacguggauagacaucgaagggcgccccgaagaccccgucgaaaucgcacucuaccaaccaaugucagguugcuacauccacuucuuccgcgaaccaaccgaucuaaaacaauucaaacaagacgcaaaauacucacacggcauagacguagcagaccuuuuccccgcgcaacccggccucacaagcgcagucaucgaagcccucccccgcaacaugguucuaaccugucaaggcucagacgacaucaaaagacuacucgaaucccaaggccgccgcgacaucaaacucaucgacaucgcccuauccaaagccgacucccgccgauucgagaaugcagucugggaccaaugcaaagaccucugccacaugcacaccggcguaguaguagagaaaaagaaacgcggcggcaaagaagaaaucacgccccacugcgcccucauggacugcauaauguacgacgccgcagucuccggcggccucaacauccccguccuacgcgcaguacucccacgcgacaugguauuccgaacaucaucacccaaaguaguccuauaa

SEQ ID NO: 9658 - RNA, 1710 nt, Artificial Sequence
  derived and/or modified CDS sequence (opt11) from LASV(LASV003-NIG-2008;Clade II)__AIT17581__NP
augucagccuccaaagaaguaaaauccuuccucuggacccaaucccugcgcagagaacugucaggauacugcuccucaaucaaacuacaagucgucaaagacgcccaagcacuacuacacggacucgacuucagcgaagucucaaacguccaacgacuaaugcgcaaacaaaaacgagacgauucugaccuuaaacgccuccgcgaucucaaccaggccgucaacaaccucgucgaacuaaaauccacccaacaaaaauccguccugcgagucggaacccucaccuccgacgaucugcucacccucgccgccgaucucgaaaaacuaaaauccaaagucauccgaaccgaaagaccacucucauccggcgucuacauggguaaccucuccgcacaacaacucgaacaacgccgaacccuccuaaauaugaucggcauggucgguggggcucagggcacccaacccggccgugacggcgucgucagaguaugggaugucaaaaaccccgaccuucuaaacaaccaauucggaacgaugcccucucucacacuagccugccuaacaaaacaaggccaaguagaccucaacgacgucguacucgcccucacagaucuagggcucauauacacagcaaaauaccccaacuccagcgaccucgacagacucagccaaucacaccccauccucuccaugguggacacgaagaaaagcagccugaacaucuccggcuacaacuucucccuaggcgcagcagucaaagcuggugcaugcaugcucgacggaggcaacauguuagaaaccaucaaagucacaccccaaaccauggacggcauccucaaauccauccucaaaguaaagaaaucccucggcauguucgucucagacacucccggcgaacgcaaccccuacgaaaacauacuauacaaaauaugccucuccggcgacggauggcccuacaucgccucgcguaccuccauagucggccgagccugggaaaacaccaccgucgaccuugaauccgacgguaaaccccaaaaagucggcacagccgguaguaacaaaucacuccaauccgccggcuuccccaccggccucaccuacucacagcucaugacacuaaaagacagcaugaugcaacucgaccccucagccaaaaccuggauagacauagagggccgaccagaagaccccgucgaaauagcccucuaucaaccgaugagcggaugcuacauccacuucuuccgggaaccaaccgacuuaaaacaguuuaaacaagacgccaaauacagccacggaaucgauguuacugaccucuucccagcccaaccgggccuaaccuccgcugucaucgaagcacuaccccgaaacaugguccuaaccugccaaggcuccgacgacaucaagagauuacuagacucccagggccgucgcgacaucaaacucaucgacaucgcccuguccaaagccgacucccgccgcuucgaaaacgcagucugggaccagugcaaagaccuaugucacaugcacaccggcgucguagucgaaaagaagaaacgcggaggcaaagaagaaaucacgccccacugcgcccuuauggacugcaucauguacgacgcagccgucucaggcggccucaacauacccguccuacgugccguacucccccgugacaugguauuccgcaccucgucacccaaaguaguacuuuaa

SEQ ID NO: 9659 - RNA, 1710 nt, Artificial Sequence
  derived and/or modified CDS sequence (opt11) from LASV(LASV035-NIG-2009;Clade II)__AIT17589__NP
augagcgcaucaaaagagguuaagagcuuccucuggacccagucacuccgacgugaacucuccggauacuguuccuccaucaaacuccaaguagucaaagacgcacaagcccuucuccacggccucgacuucucagagguaagcaacguccaacgccuuaugcgcaaacagaaacgagacgacucagaccucaaacgacuacgcgaccuaaaccaagccgucaacaaccucguggaacucaaaucaacccaacaaaaaucuauccuaagagucggcacccucaccagcgacgaccuccucacacucgcagcagaccuagaaaaauuaaaaucuaaagucauccgaacagaaagaccccucucaucagguguauacauggguaaccuguccgcgcaacaacucgaacaacgccgcgcccuacucaacaugaucggcauggugggcggcgcacaaggaacacaacccggccgcgacggcguaguacgagucugggacguuaagaaccccgaccuccucaacaaucaauucggcaccaugcccagccucacccucgccugcuuaacaaaacaaggacaaguagaccuaaacgacgcgguccuagcccucacagaccuaggacucauuuacacagcaaaauacccaaacuccucugaucuagaccgacuuucacaaucacacccaauccuaaacauggucgacaccaaaaagagcucccucaacauaucgggcuacaacuucagccugggcgcggcagucaaagcaggcgcaugcaugcucgacggcggcaacaugcucgaaaccaucaaagucacuccccaaaccauggacggcauccucaaaucgauacuaaaagucaaacggagccucggcauguucguauccgacacuccaggcgaacgcaauccauacgaaaacauacuuuacaaaaucugccucuccggagacggauggcccuacaucgccuccagaaccucaauagucggccgagccugggaaaacaccaccguagaccuagaaagcgacgggaagccccaaaaggucgguacaacaggcuccaacaaaucacuccaauccgcuggcuuccccaccggccugaccuacucacaacuaaugacccucaaagacucaaugaugcaacuagacccauccgcaaaaaccuggauagacauagaaggccgccccgaagaucccgucgaaauagcccuguaccaaccaauguccggaugcuacauucacuucuuccgcgagccuaccgaccucaaacaauucaaacaagacgcgaaauacucccauggaaucgacguagccgaccucuucccagcacagccuggucucacaucagccgucaucgaggcucuaccccgcaacaugguccuaaccugccaaggcucagacgacaucaagaaacuccucgacagccaaggacgccgcgacaucaaacuaaucgacauugcccuauccaaagcugacagccgaaaauucgagaacgcagucugggaccaaugcaaagaucuaugccacaugcacaccggagucgucgucgaaaagaagaaacgcggaggcaaagaagaaaucacaccccacugcgcccuaauggacugcaucauguacgacgccgcugucagcggcggccuaaacaucccuguccuccgagccguacucccccgcgacauggucuuccggaccagcagccccaaaguaguccuuuaa

SEQ ID NO: 9660 - RNA, 1710 nt, Artificial Sequence
  derived and/or modified CDS sequence (opt11) from LASV(LASV042-NIG-2009;Clade II)__AIT17593__NP
auguccgccagcaaagaaguuaaaucauuccucuggacccaaucccuccgaagggaacugagcggcuacugcuccagcaucaaacuccaagucguaaaagacgcccaggcccugcuucacggccucgacuucucagaagucucaaacguccaacgccugaugcgaaaacaaaagcgcgacgacggggaccuuaagagacuccgcgaccucaaccaagcagucaacaaccuaguagaacucaaaagcacacagcaaaaauccauacuuagagucgguacacucacauccgacgaccuccucacccucgcugccgaccucgaaaaacucaaauccaaagucauccgcaccgaacgcccccuaucuuccggcgucuacaugggaaaccugagcagccaacaacucgagcaaaggcgcgcccuccucaacaugauaggcaugguaggcggugcccaaggaacccaacccggaagagacggcgucgucagagucugggacgucaaaaaccccgaccugcucaacaaccaauucggcacaaugccaucccuaacccucgcaugucucaccaaacaaggacaaguagaccuaaacgacgccguacucgcccucaccgaccuaggacuaaucuacacggccaaauaccccaacucaagcgaccuggaccgccucucccagagccaccccauccucaacaugguagacacuaagaaauccucccuaaacaucuccgguuacaacuucucccucggagcagccgucaaagcaggcgccugcaugcucgacggcggaaacaugcucgaaaccaucaaagugacaccccaaaccauggacggcauacucaaauccauacuaaaagucaaaagaucacuaggaauguucgucagcgacacgccaggagaacguaaccccuaugaaaacauacucuacaaaaucugccuauccggcgacggguggcccuacaucgccucgcgcaccuccaucguaggucgcgcaugggaaaacacgacaguagaccuggaauccgacggcaagccacaaaaagucggcgccgcaggcucaaccaagucacuacaaagcgccggcuuccccaccggcuuaaccuacucccaacuaaugacccuuaaagacagcaugaugcaacuugaccccuccgcuaaaacauggauagacaucgaaggccgccccgaagaccccgucgaaaucgcccucuaccagcccaugaguggaugcuacauacacuucuucagagagcccaccgaccuaaaacaauucaaacaagacgccaaguacucccacggaaucgacguagcagaucucuucccggcccaacccggccugaccagcgcaguuaucgaagcccucccaagaaacaugguccuaacaugccaaggguccgacgacaucaagcgccuacucgacucacaaggccgucgugacaucaaauuaauugacaucgcccucuccaaaguugacucccgccgauucgaaaacgcugucugggaccaaugcaaagaccucugccacaugcacacaggagucguaguagaaaagaagaaacguggaggaaaagaagaaauaaccccacacugcgcacucauggacugcaucauguacgacgccgccgucagcggcggccucaacaucccaguacuacgcgccguacuaccucgcgacaugguauuccgaacgucuucacccaaaguaguccucuaa

SEQ ID NO: 9661 - RNA, 1710 nt, Artificial Sequence
  derived and/or modified CDS sequence (opt11) from LASV(LASV049-NIG-2009;Clade II)__AIT17605__NP
auguccgccagcaaagaagucaaaucauuccucuggacucagucucuccgacgcgaacuuucuggcuacugcuccucaauuaaacuccaagucguaaaagacgcacaagcauuacuacacggccucgacuucucagaagucuccaacguacaaagacuaaugcgcaaacagaaaagagacgacagcgaucucaaaagacuacgcgaccucaaccaagcagugaacaaccucguggaacucaaaagcacccaacaaaaaucuauccuccgaguaggcacccuaaccagcgacgaccuccuuacucucgcagccgaccuagaaaaacuuaaaucaaaagugauccgaaccgaacgcccgcucuccagcggcgucuacaugggcaaucuaucaacccaacaacucgaacaaagacgugcccuccuaaacaugaucggcauggcuggcggggcacagggcacccagccaggccgcgauggagucgugcgcgugugggacgucaaaaaccccgaccuucuuaacaaccaauucgguaccaugccaucccucacccuugccugccuuacaaaacaaggccaaguagaccuaaacgacgccgucuuagcacuaacagaccucggccuaauauacaccgccaaauaccccaacagcucagaccucgaccgccucucccaaucucaccccauccuuaacaugguagacacaaagaaaucaucccuaaacaucagcggauacaacuucucccucggcgccgccgucaaagccggcgccuguaugcucgacggcggcaacaugcuggaaaccauaaaagucacaccccagaccauggacggcauccucaaaucaauccucaaaguaaagaaaucccuaggcauguuugucagugacacccccggcgagcgaaaccccuacgaaaacauacuauacaaaauaugccuaagcggcgauggcuggcccuacaucgcaagccgcacaucaauugucgggcgcgccugggaaaacaccaccgucgaccucgaaucagacggcaaaccccagaaagucggcaccgccggaucaaacaaauccuuacaauccgccggauucccgaccggccugacauacucacaacucaugacccucaaagauagcaugaugcaacuugacccauccgccaaaaccuggaucgacaucgaaggccgccccgaggaccccgucgagaucgcccucuaucaacccauguccggcugcuacauacacuucuuccgcgaaccgaccgaccucaaacaauucaaacaagacgccaaauacagccacggaaucgacgucgccgaccucuucuccgcccaacccggccugacaagcgcaguaauagaagcacuaccccgcaauaugguauuaaccugccaaggaagcgacgacauuaaacgccuccucgacagccaaggccgacgcgacaucaaacucaucgacaucgcacugucaaaagccgacucacgcagauucgaaaacgcagucugggaccaaugcaaagaccuuugccacaugcauacaggaguaguugucgaaaagaagaaaagaggaggaaaagaagaaaucaccccacacugcgcccucauggacugcaucauguacgacgccgcagucucaggcggacucaacauccccguacuccgcgccguccucccccgcgacauggucuuccgaaccucaucccccaaagucguccuauaa

SEQ ID NO: 9662 - RNA, 1710 nt, Artificial Sequence
  derived and/or modified CDS sequence (opt11) from LASV(LASV052-NIG-2008;Clade II)__AIT17609__NP
augucagccuccaaagaaguaaaaucauuccuauggacccaaucccuccgccgagagcuaucgggauacugcucaagcaucaaacuacaagucgucaaagacgcacaggcccuucuccacggacuagacuucuccgaagucucgaacguacaacgccucaugcgcaaacaaaaacgcgacgacuccgaccuuaaacgccuccgcgaccuaaaccaagcagucaacaaccucguggaacuaaaaucaacccaacaaaaauccauauuacgagucgggacacucacaucagacgaccuucucacccuggccgcagaccucgaaaaacuaaaaucaaaagucauacgaacggagcgaccccucucaucaggcguauacaugggcaaccucuccacccagcaauuagaacaaagacgagcccugcuuaacaugaucggcauggcaggcggagcgcaaggaacccagcccggacgcgacggcguuguccgagucugggacguuaaaaaccccgaccuucucaacaaccaauucggcaccaugcccucacugacacucgccugccucaccaaacagggccaagucgaccucaacgacgccguacucgcccucacagacuuaggccuaauauacacagccaaguaccccaacuccucagaccuagaccgcuuaucccaaucccacccaauccucaacaugguggacacuaagaaaagcucccucaacaucuccggcuacaauuucucccuaggcgcagccgucaaagccggagcaugcaugcucgacggcggcaacaugcucgaaaccaucaaagucaccccacaaaccauggacggcauccucaaaucgauccuuaaagucaaacgaucccucggcauguucgucagcgacacacccggagaacgcaauccauacgaaaacauccuuuacaaaaucugccuauccggcgacgguuggcccuacauagcuucacgcacauccauagucggacgcgcgugggaaaacaccaccguagaccucgaauccgacggaaaaccacagaagguuggggccgccggcagcaacaaaagccuucaaucagcaggauuccccaccggacucacguacucccaacuaaugacccucaaagacuccaugaugcagcucgaccccucagccaaaaccuggaucgacaucgaaggccgccccgaggaccccgucgaaaucgcacuauaccaaccaaugagcggcugcuacauacacuucuuccgagaacccacggaccuaaaacaauucaagcaagacgccaaauacagccacggaauugacgucgcagaccuauucccagcacagcccggccuuacuucagccgucaucgaggcccucccacgcaacaugguccuuaccugccaaggauccgacgacauuaaacgccuucucgacucccaaggcagacgagacauaaaacuaauagacauagcccucuccaaagcagacucccgccgauucgagaacgccguaugggaucaaugcaaagaccucugccacaugcacaccggaguugucgucgaaaagaagaaacgaggcggcaaagaagaaaucacuccccacugcgcccuuauggacugcauuauguacgacgccgcggucuccggcggccucaacauccccguacuacgcgccguacuacccagggacaugguuuuccgcaccuccucacccaaagucguccuuuaa

SEQ ID NO: 9663 - RNA, 1710 nt, Artificial Sequence
  derived and/or modified CDS sequence (opt11) from LASV(LASV056-NIG-2008;Clade II)__AIT17613__NP
augucagcguccaaagaagucaaauccuuccuauggacccagucccuccgccgagaacuguccggauacugcucaaacaucaaacuacaagucgucaaagacgcccaagcccuacuccacggccuagacuucagcgagguaagcaacguccaaagacuuaugcgcaaacagaagcgcgacgacucggaccuaaaacgacuccgcgaccuuaaccaagccguaaacaaccucguggaacugaagucgacccaacaaaaauccaucuuacgcgucggcacccuaaccagcgacgaccuacucacccuagccgcagaccuugaaaaacucaaaucgaaagucaucagaaccgaacgcccacucagcagcggcguuuacaugggcaaccucuccacccaacagcuagaacagcgccgggcccuccucaacaugauaggaaugguaggaggggcccaagggacgcaacccggaagagacggagucguccgcgucugggacgucaaaaacccugaccuacucaacaaccaauucggcacaaugcccucacucaccuuagccugccuaaccaaacaaggccaagucgaccuaaacgacgcaguacucgcgcuaacagaccuaggccucaucuacacagcaaaauacccaaacuccucggaccucgacagacucucacaaucacaccccauucucaacaugguugacacgaagaaauccucccucaacaucucaggcuacaauuucagccucggagccgccgucaaagccggcgcaugcaugcuagacggcggaaacaugcucgaaaccauaaaagucaccccgcaaacaauggacggcauccucaaauccauucucaaggucaaaagaucacucggcauguucguaagcgacacccccggcgaacgcaacccauacgaaaacauccuuuacaaaaucugucuauccggugacggauggccauauaucgccucccgcaccucaaucguaggcagagcaugggaaaacaccaccguugaccuagaaagcgacggcaaaccccaaaaagucggcaccgcaggcucaaacaaaucccuccaaucagccggcuucccaaccggccucacauacucacaacucaugacacugaaagacagcaugaugcaacucgaccccuccgcaaaaaccuggauagacaucgaaggccgcccagaggaccccguugaaauagcccucuaccaaccuauguccggcugcuacauacacuucuuccgcgagcccaccgaccucaaacaauucaaacaagacgccaaauacagccacggcaucgacguagccgaccucuuccccgcacagccaggacuaacaagugcugucaucgaagcgcuaccccgcaacaugguccuaaccugccaagggagcgacgauaucaaacgccuccucgacucccaaggccggcgcgauauaaaacugaucgauaucgcccuauccaagacagacucucgccgauucgagaacgccgucugggaccagugcaaagaccucugccacaugcacaccggcguaguagucgaaaagaagaaacgcggcggcaaagaagagauaacgccccacugcgcccucauggacugcaucauguacgacgccgcagucagcggcggacucaacaucccaguacuacgcgcaguccuaccccgagacauggucuuccgaaccuccucccccaaaguagugcuauaa

SEQ ID NO: 9664 - RNA, 1710 nt, Artificial Sequence
  derived and/or modified CDS sequence (opt11) from LASV(LASV058-NIG-2008;Clade II)__AIT17617__NP
augucagccucgaaagaggucaaauccuuccucuggacacaaucccuccgacgcgagcuaucaggcuacuguagcuccaucaaacuacaaguagucaaagaugcacaagcauuacugcacggccucgacuucucagaaguauccaacguccagagacucaugcggaaacagaaacgagacgacucggaccuuaaacgccuaagagaccuaaaccaagcaguuaacaaucucguagaacucaaaagcacacagcaaaagagcauccuacguguaggcacacucacauccgacgaccuccucacccuagccgccgaccuagagaaacucaaaagcaaggucauccgcaccgaacgcccccucucauccggcgucuacauggguaaccucuccgcccaacaacucgagcaacgccgagcccuacuaaauaugauaggaaugguaggcggagcgcaaggcacacaaccaggccgagacggagucguccgagucugggacgucaaaaaccccgaccuccucaacaaccaauucggaacgaugcccucgcucacacuagccugccucacaaaacagggccaagucgaccuaaacgacgcaguccuagcacuaaccgaccucggccucaucuacaccgccaaguaccccaacuccagcgaccucgaccgccuaucccagucccaccccauucuaaacauggucgacaccaagaaauccucacucaacaucuccggcuucaacuucucccucggcgccgcaguaaaagcaggagccugcaugcuugacggaggcaacaugcuagaaaccaucaaagucaccccacaaaccauggacggcauccucaaaagcauccucaaagucaagcgcucccucgguauguuugucagcgacacacccggagagcgcaaccccuacgagaacauccuauacaaaauaugccucagcggagauggcuggcccuacauagccagccgaaccagcauaguaggcagagccugggaaaacaccaccgucgaccucgaaagcgacggaaaaccccaaaaggucggcaccgccggauccaacaaaucccuacaauccgcaggcuucccaaccggccucacguacucccaacuaaugacccucaaggauucuaugaugcaacuugaccccucagccaaaacauggaucgacaucgaaggacgcccagaagaccccguggaaaucgcccucuaccaacccauguccggcugcuacauccacuucuuccgcgaaccuaccgaccucaaacaauucaaacaagacgccaaauacagccacggcaucgaugucgccgaccuauuucccgcccagccaggccuaacauccgcugucaucgaagcacuaccccgcaacaugguccuuacaugucagggcagcgacgacaucaaaagacugcucgacucccaaggacgacgcgacaucaagcucauagacauagcacuauccaaagcagacagccgacguuucgaaaaugccguaugggaccagugcaaagaccuaugccacaugcacacgggcguagucgucgagaaaaagaaaagaggcgggaaagaagaaauaacaccccacugcgcccuaauggacugcaucauguacgacgcagcagucuccggcggacugaacauacccguccugagagccguacuaccgcgcgauauggucuuccguaccucgucccccaaaguuguccucuaa

SEQ ID NO: 9665 - RNA, 1710 nt, Artificial Sequence
  derived and/or modified CDS sequence (opt11) from LASV(LASV063-NIG-2009;Clade II)__AIT17621__NP
augagcgcguccaaagaaguaaaauccuuccuauggacccagucccuccgccgcgaacucuccggcuacugcaguagcaucaaacuucaagucgucaaagacgcccaagcccuacuccauggccuagacuucagcgaaguaaccaacguccagcgccuuaugcgcaaacaaaaacgagacgacagcgaccucaaaagacuccgcgaccucaaccaagccgugaauaaucuagucgaacuaaaaucaacccaacagaaaucaauccuacgcgucggaaccuuaacuagcgacgaccuacucacacucgcagcugaccucgaaaaacuaaaauccaaagucauccggaccgagcgcccccuuuccagcggagucuacaugggcaaccuauccacccaacaacucgaacagcgucgcgcccuacuuaacaugauugguaugguaggcggcgcccaaggcacccaaccaggcagagauggcguagucagagucugggacgucaaaaaccccgaccuccucaacaaucaguucggaaccaugccaucccuaacccucgccugccuaaccaaacaaggacaagucgaccuuaacgacgccguccuugcucucaccgaccucggccucaucuacaccgccaaauaccccaacucaucagaccucgaccgacucucccaaucccacccgauccucaacauggucgacacaaagaaaucuucacuuaacauaagcggauacaauuucucacuaggagccgccguaaaagcaggcgccugcaugcucgacggcgggaacaugcuagaaaccauuaaaguaacgccccaaaccauggacggcauccuaaaauccauccucaaaguaaaacgcucacucggaauguucgucuccgauaccccuggagaacgcaacccauacgaaaacauccucuacaaaauaugccuauccggcgacggauggcccuacaucgccucacgcacaucaaucgucggccgagccugggaaaauaccaccgucgaccucgaauccgacggcaaaccacagaaagugggaaucgccggcagcaacaaaagccuccaaucagccggcuuccccacaggccucaccuacucccaacucaugacccucaaagacucaaugaugcaacucgaccccuccgcaaaaacauggauagacaucgaaggacgacccgaagaccccguagagaucgcacuauaccagcccaugucaggcugcuacauacacuucuuccgggaaccaacagaccuaaaacaauucaaacaggacgccaaauacucacacggcaucgacguagccgaccucuuccccgcacaacccgggcuaaccuccgccgucauagaagcgcugccacgcaacaugguccuaaccugccaaggcucggacgacauaaaacgccuccuagacucccaaggccgccgagacaucaaacuaaucgacaucgcccucucaaaagcggacucacguaaauucgagaacgcagucugggaccaaugcaaggaccuaugccauaugcacaccggaguagucgucgaaaagaagaaacgaggcggcaaagaagaaaucacaccccacugcgcccuaauggacugcaucauguacgacgccgccguaagcggaggucuaaacaucccaguacuccgcgccguacuacccagagacaugguauucagaaccagcagcccaaaaguaguccuuuaa

SEQ ID NO: 9666 - RNA, 1710 nt, Artificial Sequence
  derived and/or modified CDS sequence (opt11) from LASV(LASV1000-NIG-2009;Clade II)__AIT17783__NP
augagcgccucaaaagaaguaaaauccuuccucuggacgcaaucgcucagacgagaacucucaggcuacugcagcaacauaaaacuccaaguagucaaagacgcacaagcccuccuacacggacucgacuucuccgaaguauccaacguacagcgacucaugcgcaaacaaaaacgagacgacagcgaccucaaacgccuccgcgaccuuaaccaagccgucaacaaccuagucgagcucaaaagcacccaacagaaaagcauacuccgcgucggaacccuaacaucagacgaccuccucacacuagcagcagaccucgagaagcuaaaaucaaaagugauccgcaccgaacgcccacuguccuccggaguauacaugggaaaccucuccacccaacaacuagaacaaaggcgcgcccuccucaacaugaucggcauggucggcggcgcccaaggcacccaacccggacgcgacggaguuguacgaguaugggacgucaaaaacccagaccuccucaacaaccaauucggcaccaugccaucacuaacauuggccugccuuaccaaacaaggucaaguagaccuaaacgacguggugcucgcacucaccgaccucggccucaucuacacggcaaaguaccccaacuccagcgaccucgaccgacuaucacaaucccaccccauccucaacauggucgacaccaagaaaucaucgcucaacaucucaggcuacaacuucucacuaggcgccgccgucaaagccggcgccugcaugcucgacggcggaaacaugcucgaaacuauaaaaguaacaccccaaaccauggacggcauccucaaaucaauacucaaaguuaagaaaagccuaggcauguucgucuccgacaccccaggagaacgcaaccccuacgaaaacauacuauacaaaaucugucuaagcggcgacggcuggcccuacaucgccucacgaaccuccaucgucggacgagcaugggagaacaccaccgucgaccuagaaucagacggaaaaccccaaaaagucggcaccgccggcuccaacaaaucacuucagucagcaggauuucccacaggucuaaccuacucccaacucaugacacuaaaagacucaaugaugcaacucgaccccucagccaaaacuuggaucgacaucgaaggccgccccgaagaucccguagaaaucgcgcucuaccaacccgucagcggcugcuauauccacuucuuccgugaaccuacagaccucaaacaauucaaacaagaugcgaaguacagccacggcauagacguagccgaccuauuccccgcccaaccaggacugacuuccgccgugauugaagcccucccccgcaacaugguacucacaugccaaggcuccgacgacaucaaaaggcuacucgacucacaaggccgacgggacaucaaacugaucgacaucgcacucucaaaagcagacucccgaagauucgaaaacgccgucugggaccaaugcaaagaccucugccacaugcacacaggcgucguagucgaaaagaagaaacgaggcggaaaagaagagauaaccccacacugcgcucugauggacugcaucauguacgacgccgcaguauccggcggccucaacauaccaguccucagagcaguccuacccagagauauggucuuccgcaccucaagccccaaaguaguccucuaa

SEQ ID NO: 9667 - RNA, 1710 nt, Artificial Sequence
  derived and/or modified CDS sequence (opt11) from LASV(LASV1008-NIG-2009;Clade II)__AIT17787__NP
augucggcaagcaaagaagucaaauccuuccucuggacacaaagccuaagacgagaacuauccggcuacugcaguaacaucaaacuccaggucgucaaagacgcacaagccuuacuccacggccucgauuucuccgaaguaucuaauguacaacgacucaugcgcaaacaaaaacgcgacgacggcgaccugaaacgccuucgcgaccuaaaccaagcagucaauaaccucguagaacuuaaauccacccaacaaaaauccauccugagggucggcacccugacaagcgacgaccuacuuacacuagccgccgaccuagaaaaacugaaaucaaaagucauacgcacggaaagaccccucuccagcggcguauacaugggcaaccucucaacccaacaacucgagcaacggcgcgcccuacuaaacaugaucgguauggucggaggagcccaaggaacccaacccggccgcgacggcgucguccgcgucugggacgucaaaaacccagaccuacuaaacaaccaauucggcacaaugcccucacucacccuagcaugccuaacaaaacaaggacaaguagaccucaacgacgcagugcucgcacugaccgaccuaggucucaucuacaccgccaaauaccccaacuccucagaccuggaccgccuuagccaaagccacccaauacuaaacaugguagacaccaagaaauccucacuaaacauaagcggcuacaacuucucccucggugcagcagucaaagccggcgcaugcaugcuagacggcgguaacaugcuugaaaccauaaaaguaacaccccaaaccauggacgguauccucaaguccauacuuaagguaaagaaaucacuaggcauguucgucucagacacacccggcgaacgcaacccauacgaaaacauacuauacaaaaucugccuaagcggcgacggauggccauacaucgcaucccgcacauccauagucggccgagcaugggaaaacacuaccguagaccucgaauccgacgggaaaccccaaaaaguaggcaccgcaggcuccaacaaaucccuccaauccgcaggcuucccaaccggccucaccuacagccaacucaugacccucaaagacucaaugaugcagcuagacccgagcgccaagacauggaucgacauagaaggacgccccgaagacccaguagaaaucgcccucuaccaacccaugucaggaugcuacauccacuucuuccgcgaaccaaccgaccuaaaacaauucaaacaagacgcuaaauacagccacggcauagacgucacagaccucuucucagcccaaccaggccuuaccucagccguaauagaagcccucccucgcaacaugguacucacaugccaaggcucagacgacaucaaaagacuccucgacucccaaggccgacgagacauaaagcuaaucgacaucgcccucuccaaagucgacucccgacguuucgaaaacgcagucugggaccaaugcaaagaccucugccauaugcacaccggcguagucgucgaaaagaagaaacgcggaggaaaagaagaaaucacaccccacugcgcuuugauggacugcaucauguacgacgcagccguaucuggcggccuaaacauccccguccugcgcgccguacucccaagagacauggucuuccgaaccuccucgcccaaagucguccucuga

SEQ ID NO: 9668 - RNA, 1710 nt, Artificial Sequence
  derived and/or modified CDS sequence (opt11) from LASV(LASV1015-NIG-2009;Clade II)__AIT17795__NP
augagcgcaucaaaagaaguaaaaucauuccuuuggacacagagccuacgacgcgaacuaagcggauacugcuccucaaucaaacuacaaguaguuaaagacgcccaagcucuccuacacggacucgacuucucugaaguauccaacguccaaagacugaugcgcaaacagaaacgugacgacuccgaccuuaaacgccuccgcgaccuuaaccaagccguaaacaaccuaguagaacuaaaauccacacaacagaaaagcauccugcgaguaggaacccucaccucagacgaccuccugacacuggcugccgaccuagaaaaacuaaaaucgaaaguaauccgaaccgaacgcccccucucaagcggcguauacaugggcaaccucucaacccaacaacuugaacaaagacgagcccuccucaacaugauagguauggucggaggcgcccagggaacccaacccggccgagacggcguaguccgaguaugggacgucaaaaacccagaccuccucaacaaccaauucggaaccaugccuucccucacccucgcaugccucaccaaacaaggacagguagacuuaaacgacgccguacucgcccucacugaccucggccugaucuacaccgccaaauaccccaacuccagcgaccuagaccgccucucccagucccacccgauccuaaacaugguagacaccaagaaaucuucacuaaacauuucagguuacaacuucucccuaggggccgcgguaaaagccggugccugcaugcuagacggcggaaauaugcuggaaaccauaaaagucacaccccaaaccauggacggcauacugaaaucaauccuaaaaguaaaacgaagccucgguauguucguauccgacacucccggugaaagaaaccccuacgagaacauccucuacaaaauaugccuaucaggcgacggcuggcccuacaucgccucccgcaccuccaucgucggccgcgcaugggagaacacaaccguagaccucgaaagcgauggcaaaccacagaaaguaggaaccgcaggcuccaacaaaucccuacaaagcgccggauuccccaccggcuuaaccuacagccaacuuaugacccugaaagacagcaugaugcagcuagaccccuccgccaaaacauggauagacauagaaggccgacccgaggauccagucgaaaucgcccuauaccaaccaauguccggcugcuacauccacuucuuccgcgaacccaccgaccucaaacaguucaaacaagacgccaaauauucccacggcaucgacgucgcagaccuuuuccccgcacaacccggccucaccagcgccguaaucgaagcccuuccacgcaacaugguccucaccugucaaggauccgaugacauuaagaaacuacucgacagccagggccggcgagacaucaagcuaauugacaucgcacucagcaaagcagacucucgacguuucgaaaacgccgucugggaucaaugcaaagaccucugccacaugcauaccggugugguaguagaaaagaagaaacgcggaggcaaagaggaaaucacaccacacugcgcccuaauggacugcaucauguaugacgcggcagucagcgguggccucaacauaccggugcuccgcgcaguccucccaagagauaugguauuccgcaccuccuccccaaaagugguccucuaa

SEQ ID NO: 9669 - RNA, 1710 nt, Artificial Sequence
  derived and/or modified CDS sequence (opt11) from LASV(LASV1016-NIG-2009;Clade II)__AIT17799__NP
augucagccuccaaagagguuaagagcuuccucuggacccaaagccuccgacgagaacucucggguuacugcuccaauauaaaacuccaagucguaaaagacgcccaagcacucuuacacggccuggacuucucagaagucuccaauguccaacgacucaugagaaaacaaaaacgagacgacuccgaccucaaacgccuacgcgaccuaaaccaagccguuaacaaccucgucgaacuaaaauccacccaacaaaaauccauccuccgugucggcacacuaacaagcgacgaccuccucacccucgccgcggaccuagaaaaacuaaaauccaaaguaauucgcaccgaacgaccacucucauccggcguauacaugggcaaccuauccgcccaacagcuagaacaaagacgcgcgcuccucaacaugaucggaauggucggcggcgcccaaggaacacagccaggcagagacggcgucguccgcgucugggacgucaaaaacccagaccuccuaaacaaccaguucggaaccaugccaucacuaacacuagccugccuuaccaaacaaggacaaguggaccuaaacgaugccguacucgcacuaacugaucucggucucaucuacaccgccaaauacccaaacucaagcgaccucgaccgacucagccaaagccaccccauucuaaacauggucgacaccaagaaauccucccuuaacaucuccggauacaacuucucccucggcgcugcagucaaagcaggagccugcaugcucgacggaggaaacaugcucgaaaccaucaaagucaccccacagacaauggauggcauacucaaaucaauccucaaagucaagaaaagccuaggcauguucguuuccgacacucccggcgaaagaaacccauacgaaaacauccucuacaaaaucugccucucaggcgauggcuggcccuacaucgcaagcagaaccucaaucgucggcagagccugggaaaacaccaccgucgaccucgagucagacggcaaaccccaaaaagucggcaccgccggaagcaacaaaagccuacaaucagcaggauuccccaccggacucaccuacucccagcuaaugacccuaaaagacuccaugaugcaacuagaccccagcgccaaaaccuggauagacaucgaaggucgacccgaagaccccgucgaaaucgcccuuuaccagcccaugucaggcugcuacauccacuucuuccgggaacccaccgaccucaaacaauucaaacaagacgccaaauauucccacggaaucgacguugccgaccuauucccugcccagccuggccuaacaucagcagucauagaagcgcuaccccgcaacaugguccuuaccugccaaggcuccgacgacauaaaacgccuccucgacucucaaggccgacgcgacaucaaacucauagauaucgcacucucaaaagcagacucuagacgcuucgaaaacgccgucugggaucaaugcaaagaccucugccacaugcacaccggcguaguugucgaaaagaagaaacgaggcggcaaagaagaaauaacaccucacugcgcccucauggacugcaucauguacgacgccgccgucuccggcggacuaaacauacccgugcucagggcaguccuaccacgggacauggucuuccgaaccuccucccccaaagucguccuauaa

SEQ ID NO: 9670 - RNA, 1710 nt, Artificial Sequence
  derived and/or modified CDS sequence (opt11) from LASV(LASV221-NIG-2010;Clade II)__AIT17625__NP
auguccgcuuccaaagaaguaaaauccuuccucuggacccaaucucuacgccgagaacucucaggcuacugcucaucaaucaaacuccaagucgucaaagacgcacaagcccuacugcacggacucgacuucuccgaaguaucaaacguccagcggcucaugcggaaacagcgccgcgacgacuccgaccuuaagcgccuacgagaccugaaccaagcaguaaacaaccucguggaacuaaaauccacccaacaaaaaucaauccuccgagugggcacgcuaacuagcgacgaucuccuaacucuagccgccgaccuagaaaaacuaaaauccaaagucauacgcacagaacgcccgcucuccagcggcgucuacaugggaaaccuauccacacaacaacuagaacaacguagagcccuccuaaacaugauaggcauggucggcggagcccaaggaacacaacccggccgcgauggcgucguccgagucugggacgugaaaaacccagaccuacucaacaaccaauucggcaccaugcccucccucacacuagcgugccugacaaagcaaggacaaguagaccucaacgacgccguacucgcccuuaccgaccucggauuaaucuacacagccaaauacccaaacagcagcgacuuggacagacucucccagucccaccccauacucaacaugguggacaccaagaaauccucccucaacaucagcggguacaauuucucacucggggccgcagucaaagccggcgcaugcaugcuagacggcggcaacaugcucgaaaccaucaaagucaccccacaaacagucgacggcauccucaaaucaauccucaaggugaaacgcagucucggcauguucguuucagacacacccggcgaacgcaauccauacgaaaacauccucuacaaaaucugccucagcggugacggguggccauauaucgccucccgaaccuccaucgucggccgcgcaugggaaaacaccaccguagaccuagagagcgacggaaaaccccagaaggucggcacagcuggcuccaacaaaucccuccaauccgccggcuuccccaccggccucaccuacucacaacugaugacccuaaaagacucuaugaugcaacucgaccccuccgcuaaaaccuggauugacauagagggccgcccugaagaccccgucgaaaucgcccuauaccaacccaugucagggugcuacauccacuucuucagagaacccaccgaccucaagcaauucaaacaggacgcaaaauacucccacggcaucgacguagccgaccucuuccccgcacaacccggauuaaccagcgcaguaaucgaggcacucccacguaacaugguacugaccugucaaggcuccgacgacaucaaacgccugcuagacucccaaggucgaagagauauuaaacucaucgacaucgcccucagcaaagcggacucacgcaaauucgaaaacgcagucugggaucaaugcaaagaccuaugccacaugcacaccggcgucgucgucgagaaaaagaaacgcggcggaaaagaagaaaucaccccacacugcgcccuaauggauugcaucauguacgacgcagccgucucaggcggacucaacauccccguacuacgcgccguacuaccucgcgacauggucuuccggaccucaagccccaagguuguccuauaa

SEQ ID NO: 9671 - RNA, 1710 nt, Artificial Sequence
  derived and/or modified CDS sequence (opt11) from LASV(LASV224-NIG-2010;Clade II)__AIT17627__NP
auguccgcauccaaagaagucaaauccuuccuauggacccaaagccugcgcagagaacuguccggauacugcuccagcaucaaacuacaagucguaaaagacgcccaagcccuacuacacggccucgacuucuccgagguaagcaacguccaacgccucaugagaaaacaaaaacgcgacgauuccgaccugaaacgccuccgagaccuaaaccaggccgucaauaaccucguggaacucaaauccacacagcaaaaaucaaucuuacgcgucggcacacucaccucagacgaccuacuaacccuagccgcggaccuagaaaaacucaaauccaaagucauccgaaccgaacgcccacucagcuccggcgucuacaugggcaaccuaagcagccaacaacucgaacaacgcagagcccuccucaacaugaucggcaugguaggcggagcccaaggcacccaaccuggaagagacggaguaguaagaguaugggacgucaaaaaccccgaccuccuaaacaaccaauucggcaccaugccaucccucacacuggccugccuaacaaaacaaggccaagucgaccucaaugacgcaguccucgcccucacugaccuaggacucaucuauaccgcaaaauaccccaacagcucagaucucgaucgccucagccagucccaccccauacuaaacauggucgacaccaagaaaagcucgcugaacaucuccggcuacaacuucucccucggcgcagcugucaaagccggcgcaugcaugcucgacggaggcaacaugcucgaaaccaucaaagucaccccacaaaccauggacggcaucuuaaaauccauccuaaaagucaaacgcagccucggaauguucgucagcgacacaccaggagaacgcaacccauacgaaaacauacucuacaaaauaugccucuccggcgacggcuggccauacaucgccucccgcaccuccauagucggccgcgccugggaaaauacuaccguagaccuagaaagcgacggaaaaccacaaaaagucggauccgccggcucaaacaaaagccuccaauccgccggcuucccaaccggacucacguacucacaauuaaugacacuaaaagacuccaugaugcaacuagaccccucugcaaaaacauggaucgacauagagggccgaccggaagacccugucgaaaucgcccucuaccaacccaugucaggcugcuacauacacuucuuccgcgaacccaccgaccuaaaacaguucaaacaagaugcaaaguacucacacggcaucgacgucgccgaccuauucccagcacaacccggccucacauccgcggucauagaggcccuaccucgcaacaugguacucaccugucaagguagcgacgacaucaaacgacuccucgacagccaaggccgacgggacauaaaacuaauagacaucgcccucucaaaagccgacuccagacgcuucgaaaacgcugucugggaccaaugcaaagaccucugccacaugcacaccggcguggucguagaaaagaagaaacgaggcggcaaagaagagaucacaccccacugugcccugauggacugcaucauguacgacgccgcagucagcggaggccuaaacaucccgguacuccgagcaguacuaccaagagacaugguauucagaacuuccagccccaaagucguccuguag

SEQ ID NO: 9672 - RNA, 1710 nt, Artificial Sequence
  derived and/or modified CDS sequence (opt11) from LASV(LASV225-NIG-2010;Clade II)__AIT17631__NP
augagcgccuccaaagagaucaaauccuuucucuggacacagucacuaagacgcgaacucuccggcuauugcucauccauuaaacuccaaguggugaaagacgcacaagcacuccuacacgggcucgacuucucagagguuuccaacguccaaaggcucaugcgcaaacagaaaagagacgacagcgaccuaaaacgccuacgcgaccuaaaccaagccguaaacaaccucgucgaauuaaaaagcacacaacaaaaaucaauacuccgcgucggaacccucacaagcgacgaccuccucacccuagcggccgaccucgaaaaacuaaaaucaaaagucauccgcaccgaaagaccccuauccagcggcgucuauaugggcaaccuaagcacacaacaacucgaacaacgcagagcccuccucaacaugauaggcauggugggaggcgcccaaggcacacagcccggccgagacggcgucguccgagucugggacgucaaaaacccagaccuccuaaacaaccaauucggaaccaugcccucccuuacccuagccugccucaccaaacaaggacaagucgaccucaacgacgcaguccuggcccuaacugaucugggacugauuuacaccgccaaauaccccaacuccucagaucuagaccgucucucacagucacaccccauccuaaacauggucgacaccaagaaauccucgcucaacauaucaggauacaacuuuucacuuggcgccgccgucaaagcgggagccugcaugcucgacggagggaacaugcucgagaccauuaaagucacaccccaaaccauggacgggauccucaaaagcauccucaaagucaaacgcucacuaggcauguucguaagcgacgcccccggcgaaagaaaccccuacgaaaauauccucuacaaaauaugccucagcggcgacggcuggccauacaucgccucccgcaccagcauagucggacgcgccugggaaaacaccaccgucgaccuagaauccgacgguaaaccacagaaagucggcaccgcaggcuccaacaaaucacuccaauccgccggcuucccaacaggacuaacauacucgcaacucaugacccuaaaagacucaaugaugcaacucgaucccuccgcaaaaacuuggauagacaucgaaggaagacccgaagacccgguagagaucgcccuauaccagcccaugucaggaugcuacauccacuucuuucgcgaacccaccgacuuaaaacaauucaaacaagacgccaaauacucccacggaauagacguagcagaccuauuccccgcccaacccggccucacguccgcaguuaucgaagcccucccacgcaacaugguacucacaugccaaggcuccgacgacaucaaacgucuacucgacucccaaggcagacgcgacaucaaacugauugacaucgcgcuauccaaagccgacucccgcagguucgaaaacgccguaugggaccaaugcaaagaccuaugccauaugcacacaggcguagucguagaaaagaagaaacgcggaggaaaagaagaaauaaccccacacugcgcacuaauggacugcaucauguacgacgccgccgugucaggaggccucaacauccccguccuccgagcaguucucccccgagacaugguguucagaaccuccucccccaaaguaguacucuaa

SEQ ID NO: 9673 - RNA, 1710 nt, Artificial Sequence
  derived and/or modified CDS sequence (opt11) from LASV(LASV229-NIG-2010;Clade II)__AIT17635__NP
augucagccucaaaagaaguaaaaucauuccucuggacccaaucccuccgaagagaacuuucgggcuacugcuccaacaucaaauuacaagucguaaaagacgcccaagcacuucuacacggccuagacuucuccgaagucucaaauguccaacgacuaaugcgcaagcagaaaagagacgacaacgaccuaaagcgacuccgcgaccucaaccaagcagucaauaaccucgucgaacucaaaucuacccaacaaaaaucaauccuccgcguaggcacccugaccuccgacgaccugcuaacccucgccgcagaccucgaaaagcucaaauccaaaguaauccgaaccgaacgaccgcuaucguccggagucuacaugggcaaccucaacacccagcaacuagaacaacgcagagcccuccucaacaugaucggaauggucggcggcgcccaaggcacacaacccggcagagacggagucguacgcguuugggacguaaagaacccagaccuccucaacaaccaauucggaaccaugcccucccuuacccucgccugccuaaccaaacaaggccaaguggaccucaacgacgccguccuagcccucaccgaccuaggccucaucuacaccgcuaaguaccccaacucauccgaccuagaccgccucagccaaucacacccaauccucaacaugguagacaccaaaaagucgucucugaacaucagcggcuacaacuuuucacucggcgccgcagucaaagcuggcgccugcaugcuagacggcggcaacaugcucgagaccaucaaagucacaccccaaaccauggacgggauccucaaauccauccuaaaagucaagaaaucccuaggcauguucgucagcgacacccccggcgaaagaaaucccuacgaaaauaucuuauacaaaaucugccucuccggagacggcuggcccuacauagcaagccgcacaucaaucgucgguagagccugggaaaacaccaccgucgaccuagaaagcgacggaaaaccucaaaaagugggaaccgccggcucaaauaaaucccuccaaucagccggauuccccacaggccucaccuacucacaacucaugacccucaaagacuccaugaugcaacucgaccccucggcuaaaacauggaucgacauagaaggacgcccagaagacccggucgaaauagcccucuaccaacccaugucaggcugcuacauccacuucuuccgagaacccacagaccucaaacaauucaaacaagaugccaaauacagccacggcaucgacgucgccgaccucuuccccgcccaacccggguuaacaucagcugucauugaagcccuaccccgaaacaugguccucacaugccaaggauccgacgacauaaaaagacugcucgacucccaaggccgcagagacauaaaacucaucgacaucgcacuaucuaaagccgacagccgacgcuucgaaaaugcagucugggaccagugcaaagaccucugccacaugcacaccggugucgucguugaaaagaagaaaagaggcggcaaagaagaaaucacaccccacugcgcccucauggacugcaucauguaugacgcagccgucucaggaggccuaaacauccccguccucagagcaguacuaccccgcgauauggucuuccgaaccuccagcccuaaagucguccuuuga

SEQ ID NO: 9674 - RNA, 1710 nt, Artificial Sequence
  derived and/or modified CDS sequence (opt11) from LASV(LASV237-NIG-2010;Clade II)__AIT17639__NP
augucggcaagcaaagaagucaaauccuuccuauggacccaaucacuccgccgagagcucucaggcuauugcucaaacaucaaacuucaaguagugaaagacgcacaagcacuccuccacggccucgacuuuucagaagucagcaacguacaacgccucaugcguaaacaaaaacgagacgacuccgaccucaaacgccuacgcgaccuaaaccaagcagucaacaaccucgucgagcucaaauccacccagcaaaaaucaauacuacgugucgggacccuaacuuccgacgaccuccuaacacuugccgccgaccucgaaaaacugaaaagcaaaguaauccguaccgaacgcccccucucaaguggcgucuacaugggaaaccuuagcacccaacaacuagaacaacgccgugcccuccucaacaugaucgguauggucggaggcgcccaaggcacacaacccggccgcgacggcguagucagaguaugggacguuaaaaaccccgaccuccucaauaaccaauuuggcacuaugcccucccuaacacucgcaugccucaccaaacaaggccaaguagaccuaaacgacgcaguccucgcccuaacagaccucggacucaucuacaccgccaaauacccuaacucauccgaccucgaccgccuaucacagagccaccccauccucaacauggucgacaucaagaaauccagccuaaacaucucagguuacaacuucucacuaggggccgccgucaaagcaggcgcaugcaugcucgacggcggcaacaugcuagaaaccaucaaagucacaccccaaaccauggacggaauccucaagagcauccucaaagucaaacgaucacuuggaauguucguauccgacacccccggcgaacgcaaccccuacgagaacauacuauacaaaaucugccuauccggcgacggcuggcccuacauagcuucacgcaccagcauaguaggccgcgccugggaaaauaccacaguagaccucgaaucagacggaaaaccccaaaaagugggaucagccgguucaaacaaaagccuccaauccgcaggauucccaaccggccuuacguacucccaacuaaugacccucaaagacucaaugaugcagcucgacccauccgcaaaaacauggauugacaucgaaggcagacccgaagacccagucgaaauugcccuuuaucaacccauguccggaugcuacauccacuucuuccgcgaaccaacagaccucaaacaauucaaacaagacgcuaaauacagccacgggauagacgucgccgaucucuucccagcccaacccggucuaaccagcgccguaaucgaagcccugccccgcaacaugguacuuacaugccagggcagcgacgacauaaaacgccuccucgacucccaaggccgacgcgacaucaaacuaaucgacaucgcacucuccaaagcugacucccgccgcuucgaaaacgcagucugggaucaaugcaaagaccuaugccacaugcacaccggaguagucgucgaaaagaagaaaagaggcggcaaagaagaaaucacaccccacugcgcacuaauggacugcauaauguacgacgcagcagugucaggaggacugaacauccccguacugcgagccguacucccccgagacauggucuuccgaaccagcucacccaaagucguccuuuaa

SEQ ID NO: 9675 - RNA, 1710 nt, Artificial Sequence
  derived and/or modified CDS sequence (opt11) from LASV(LASV242-NIG-2010;Clade II)__AIT17651__NP
augucugccagcaaagagguaaaauccuuucucuggacccaaucccuacgaagagaacucuccggcuacugcagcagcaucaaacuccaagucgucaaagacgcacaagcacuccuccacggccucgacuucucagaggucuccaacguacagcgccucaugcgcaaacaaaagagagacgacuccgaccucaaacgacuacgugaccugaaccaagccguaaacaaccuuguugaacucaagucaacccaacagaagucaguccucagaguaggaacccuuaccuccgacgaccuacucacucuagccgccgaccuagagaaacucaaauccaaagucauccgcacagaacgcccccucucaucaggcgucuacaugggcaaucuguccgcacaacaacuagagcaaaggagagcccuccucaauaugauagguauggucggaggcgcccaaggaacgcaacccggccgcgacggagucguucgcgucugggacgucaaaaaccccgacuuacuaaacaaccaauucggcacuaugcccucacuaacccucgccugccuuaccaaacaaggccaaguagaucuuaacgacgucguacucgcacucacugaccuaggccucauauacaccgcuaaauaccccaacuccuccgaccuggaccgccuaucccaaucccaccccauccucaacaugguagacacuaagaaaucgucacucaacaucagcggcuacaacuucucccuaggcgccgccgugaaagcgggagcuugcaugcucgacgguggcaacaugcuggaaaccaucaaagucaccccacaaaccauggacggaauccuaaaguccauuuuaaaagucaagaaaucccucggaauguucgucuccgacacccccggcgaacgcaaccccuacgaaaacauccuguacaaaauaugccucuccggcgacggguggcccuacaucgccucccgaacaucaauugucggccgcgccugggaaaacacuacagucgaucucgaaagcgacggcaaaccccaaaaagucggcaccgcaggcuccaacaaaucccuucaauccgcaggcuucccaaccggccucaccuacucacaacuaaugacacuaaaagacuccaugaugcaacucgaccccagcgcaaaaacauggauagauauagagggccgaccagaagaccccgucgaaauagcccucuaccaaccuaugucuggaugcuacauccauuucuuccgcgagcccacggaccucaaacaauucaaacaagacgcaaaauacucccacggcauagacgucaccgaccucuucucugcccaacccggccucaccuccgcagucaucgaagccuuaccucgcaacaugguccuaaccugccaaggauccgacgacauaaaacgccuccucgacucacaaggccgccgcgacauaaaacugaucgacauagcccucucgaaagcagacucccgccgauucgaaaacgccgucugggaccaaugcaaagaccugugccacaugcacacaggcgucguugucgagaaaaagaaacgcggcggaaaagaagaaaucacgccccacugcgcacucauggacugcauuauguacgacgccgccgucagcggcggacucaacauacccguacugcgcgccguacuaccccgagacauggucuuccgcaccucauccccuaaagucguacucuaa

SEQ ID NO: 9676 - RNA, 1710 nt, Artificial Sequence
  derived and/or modified CDS sequence (opt11) from LASV(LASV245-NIG-2011;Clade II)__AIT17655__NP
auguccgcaucaaaagaagucaaauccuuccuauggacccagucccuacgcagagagcuaucgggcuauugcucaaacauaaaacuacaaguggucaaagacgcccaagcacuccuccacggccucgacuucagcgaagucuccaacguccagcgccucaugagaaaacaaaaacgagacgacucagaccucaaaagacuccgagaccucaaccaagccguaaacaaccucgucgagcucaaauccacccaacagaaaucaauacuccgagucgggacccuaaccucagacgaccuacucacccuagcagccgaucucgaaaagcucaaaagcaaagucauccgcaccgaaaaaccccuauccuccgguguauacaugggcaaccucuccacccaacagcucgaacagcgcagagcccuacucaacaugaucgguauggucggaggagcacaaggcacccaacccggccgagacggcgucguacgagugugggacgucaaaaacccugaccuacucaauaaccaauucggcaccaugccaucccuaacccuagccugccuaacaaagcaaggccaggucgaccucaacgacgccguccuggcccuaacugaccucggccucaucuacaccgccaaauucccaaacuccuccgaccuagacagacuaucccaaucacaccccauccucaacaugguugacacaaagaaauccucccucaacauauccggcuacaacuuuucccucggcgcagccgucaaagccggagcaugcaugcuagacggcggcaauauguuagagaccaucaaagucacaccacaaaccauggacggcauacuaaaaucaauccucaaaguuaaaaagucccucggaauguucguaagcgacacacccggagaacggaaccccuacgagaacauccucuacaaaaucugccuguccggcgacggcuggcccuacauugccucucguaccagcauaguagggcgagccugggaaaacaccacaguggaccuggaaucagauggaaaaccacaaaaggucggcacaaccggauccaacaaaagccuacaaagcgccggcuuccccaccgggcuaacauacucgcaacucaugacacucaaagacuccaugaugcaacuagaccccagcgccaaaacguggaucgacauagaaggccgacccgaggaccccgucgaaauagcuuuauaccaaccaauguccggcugcuacauacacuucuuccgagaacccaccgaccugaaacaauucaagcaagacgcaaaauauucgcacggaauagacgucgccgaccucuuccccgcccaacccggccucaccagcgcgguaaucgaagcccuacccagaaacaugguacugaccugccaaggcucagacgacaucaagcgccuccuagacagccaaggccgccgcgacaucaaacucauagauaucgcacuauccaaggccgacagccgccgcuucgaaaacgccguaugggaccaaugcaaagaccucugccacaugcacacaggcgucguugucgaaaagaagaaaagaggaggaaaagaagaaaucacaccgcacugcgcccucauggacugcauaauguacgacgccgcaguauccggcggacucaacauaccaguacuacgcgccguacuaccccgcgacaugguauuucgcacaucuucccccaaaguagugcucuaa

SEQ ID NO: 9677 - RNA, 1710 nt, Artificial Sequence
  derived and/or modified CDS sequence (opt11) from LASV(LASV246-NIG-2010;Clade II)__AIT17659__NP
auguccgcgucgaaagaagucaaaucauuccucuggacacaaucccuaagacgugaacuaagcggauacugcuccucaauaaaacuccaaguagucaaagacgcccaagcgcuacuacacggccucgacuucagcgaagucagcaacguccagcggcucaugcggaaacaaaaacgugacgacuccgaccuaaaacgccuacgcgaccucaaccaagcgguaaacaaccuaguagaacucaaaagcacccaacagaaauccguacuccgcgucggcacccuaaccucugacgaccuacuuacccucgcagcggaccuagaaaaacuaaaaucgaaggucauccgcacagagcgaccccucucaagcggcguauacauggggaaccugagcacccaacagcuagaacaaagacgcgcgcugcucagcaugauaggcauggucggaggcgcccaaggcacccaaccaggaagagacggagucguacgcgugugggacgucaaaaaccccgaucuccugaacaaccaauucggaaccaugcccagccucacccucgccugccucaccaaacaaggccaaguagaccuaaacgacgcuguacucgcacuaacagaccucggccuaaucuacacagcaaaauaccccaacuccuccgaccucgacagacucagccaaagccaucccauccuuaauaugguagacaccaagaaaucaucgcuaaauaucuccgguuacaacuucucacucggagccgcaguaaaagccggcgccugcaugcucgacggcggcaauauguuagaaaccaucaaagucacaccgcaaaccauggacggcauauuaaaauccauccuaaaaguaaaaagaucccucggcauguucgucuccgacacacccggcgaacgaaaccccuacgaaaacauccuauacaaaaucugccuuucaggcgacggguggccguacaucgccucaagaaccucaaucgucggccgcgcaugggaaaacacaacgguagaccucgaaagcgacggcaaaccccaaaaaguaggcaccgccggauccaacaaaucccuccaauccgccggcuucccaacaggccuaaccuacagccagcuaaugacacucaaagacucaaugaugcaacuugaccccucagccaaaacauggauagacaucgaaggacgucccgaagacccggucgaaaucgcccuauaccaacccaugucagguugcuacauccacuucuuccgcgaacccaccgaccuaaaacaauucaaacaagacgcuaaauacucccacggaaucgacgucgccgaccucuuccccgcccaaccgggccucacaucugcaguaauagaagcccuacccagaaacaugguccuuaccugccaagggucggacgacauaaaacgccuacucgacucccaaggccgacgagacauaaaacuaaucgacaucgcucuaaacaaagccgacucucgccgcuucgaaaacgccguuugggaccaaugcaaggaccuaugccauaugcacaccggagucguugucgagaaaaagaaacgaggcggaaaagaggaaauaacaccccacugcgcccucauggacugcaucauguacgacgccgcuguauccgggggccucaacauccccguacuacgugccguccuaccccgcgacauggucuuccgcaccucaucccccaaaguuguacuauga

SEQ ID NO: 9678 - RNA, 1710 nt, Artificial Sequence
  derived and/or modified CDS sequence (opt11) from LASV(LASV251-NIG-2010;Clade II)__AIT17667__NP
augucugccagcaaagaaguaaaaaguuuccucuggacccagucccuccgaagggaacugagcggcuauugcagcucgaucaaacuacaagucguaaaagacgcccaagcacucuuacacggccuagacuucucugaggucuccaacguacaacgacucaugcgcaaacagaaaagagaugauucggaccuaaaacgccuccgcgaccucaaccaagccguaaacaaccucguagaacucaaauccacccaacagaaaagcauccuucgcgucggaacucucaccucagacgaccuacucacgcuagcagcagaccuugaaaaacucaaauccaaagucauucgcaccgaacgcccccuguccuccggcgucuacauggggaaccucucaacccaacaacucgaacaacgacgagcacuccuuaacaugaucggaauggucggcggcgcacaaggcacacagcccggacgcgacggaguaguccgagucugggacgucaaaaaccccgaccuucuaaacaaccaauucggaaccaugccaucccuaacccucgcuugucucaccaaacagggacagguagaccucaacgacgccguacucgcgcuaaccgaucuaggccuaaucuacacagccaaauaccccaacuccuccgaccuagacagacucagccaaucccacccaauccucaacauggucgacaccaagaaaagcuccuuaaacaucucaggauacaacuucucacucggcgcagccgugaaagccggcgccugcaugcucgacggcggcaacaugcucgagaccaucaaaguaacaccacaaaccaucgacggaauccuaaaauccauccucaaagucaagaaaucccuaggaauguucgucucagacacaccgggcgaacgaaauccauacgaaaacauacuauauaaaaucugccuuucaggagacggcuggcccuacaucgccagcagaacgagcaucgucggcagagcaugggaaaacaccaccguagaccuagaaucagacggaaaaccccaaaaagucggcaccacuggaagcaacaaaagucuccaauccgccggauucccgacgggccucaccuacucccaacucaugacgcuaaaagauagcaugaugcaacuugacccaagcgcaaaaacauggauagacaucgaaggccgccccgaagaccccguagaaaucgcacucuaccaaccuauguccgggugcuacauccauuucuuccgcgaaccaacagaccuaaaacaauucaaacaagacgcaaaauacucacacggaaucgacgucaccgaucuauucccggcccaacccggccuuaccucggccguaauagaagcccucccacgcaacaugguccuaaccugccaaggcucagaagacauaaagagacuccucgacagccagggccgccgugacaucaaacucaucgacaucgcccuauccaaagccgacucccguagauucgaaaacgccguaugggaccaaugcaaagaccuaugccacaugcacaccggcguugucgucgaaaagaagaaacgaggaggcaaagaagaaaucacuccccacugcgcccucauggacugcauaauguacgacgcagcugucuccggaggccucaacauucccguacucagagcaguacucccccgcgacauggucuuccgcacauccagccccaaagucguacuauaa

SEQ ID NO: 9679 - RNA, 1710 nt, Artificial Sequence
  derived and/or modified CDS sequence (opt11) from LASV(LASV253-NIG-2011;Clade II)__AIT17671__NP
auguccgccuccaaagaagucaaauccuuccuauggacccaaucucugcgacgcgaacucucagguuacugcucaagcauaaaacuccaagucgucaaagacgcacaagcccuccuacacggacuagacuucuccgaaguaucaaacguccaacgccuaaugcgcaaacaaaaacgcgacgacagcgaccucaaacgccuccgagaucucaaccaggcugugaacaaccucguagagcucaaaucaacccaacaaaaaucuguccugcgcgucggaacccuaacgucagaugaucuccucacccuagccgccgaccuagaaaaacucaaauccaaagucauacgcacggaacgaccccucucaucaggcgucuacauggggaaccuauccacccagcaacucgagcaaagacgagcacuccucaacaugaucggcauggucggaggcgcccaaggaacccagcccggacgcgacggcguaguccgagucugggacgucaagaaccccgaccuacugaacaaccaauucggcacaaugccaagccucacccuagcaugccucaccaaacagggacaaguagaccucaacgacgugguccuagcccuaaccgaccucggccuaauauacaccgcaaaguaccccaacuccagcgaccucgaccgacuaucccaaagccauccaauacucaacauggucgacacaaagaaaagcucacuaaacaucagcggcuacaacuucagccucggugccgccgucaaagcaggcgccugcaugcucgacggcggaaacaugcucgaaaccauaaaagucacaccccaaaccauggacggcauccuaaaaagcauacucaaaguaaagaaaucacuaggcauguucgucuccgacacacccggcgaacgcaaccccuacgaaaacauacuauacaaaauaugccuaucgggcgauggcuggccauacauagcuucacgaaccucaauagucggcagagccugggaaaacaccaccgucgaucucgaaucggacggaaaaccacaaaaaguaggcaccgccggaagcaacaaaucccuacaaucagcaggcuucccaaccggccucaccuacagccaacucaugaccuuaaaagauuccaugaugcaacuggacccaagcgccaagacauggaucgacauugaaggacgacccgaagaccccgucgaaauagcccucuaccagcccaugagcggcugcuacauccacuucuuccgagaacccaccgaccuaaaacaauucaaacaagacgccaaguacucccacggcaucgacgucacagaccucuucccagcccaacccggccucaccagcgccgucaucgaagcgcuaccaagaaacaugguccuaacgugucaaggcucggacgacaucaaacgacuccucgacucgcaaggucgcagagacaucaaacuaaucgacaucgcacucaguaaagcugacucacgccgauucgaaaacgcagucugggaccagugcaaagaccucugccacaugcacacaggcgucguaguagaaaagaaaaagcgaggaggcaaagaagaaaucaccccacacugcgcacucauggacugcaucauguacgacgccgcggucucgggcggccuaaacauacccguacuccgcgcaguccuaccacgcgacauggucuucagaaccagcagcccaaaagucgugcucuaa

SEQ ID NO: 9680 - RNA, 1710 nt, Artificial Sequence
  derived and/or modified CDS sequence (opt11) from LASV(LASV254-NIG-2011;Clade II)__AIT17675__NP
auguccgccuccaaagaagucaaaucauuccucuggacccaaucccuacgucgagaacucucaggauacugcuccuccaucaaacuacaagucguaaaagacgcccaagcacuccuccacggacuagacuucagcgaaguaucgaacguacaacgccucaugcgaaaacagaaaagggacgacuccgaccucaaacgccuacgcgaccucaaccaagcagucaacaaccuaguagaacucaaguccacucaacagaaaucaguauuacgugugggaacccuaacuagcgacgacuuacucacacucgccgccgaccucgagaaacucaaaucaaaaguaauccgaacagaacgcccccucucuagcggaguauacaugggcaaccugagcacccaacaacuagaacagcgacgagcccuccucaacaugaucggaaugguuggcggcgcacaaggcacgcaacccggacgcgacggcguaguacgaguaugggacgucaaaaaccccgaccuccuaaacaaccaauucggcacaaugcccucacucacacucgccugccuaaccaaacaaggccaagucgaccucaacgaugcaguccucgcccucaccgaccucggccuaauauacaccgcaaaauacccaaacaguuccgaccucgaccgacuaagccaaucccacccaauacucaacaugguagauaccaaaaaguccucccucaauaucuccggcuacaacuucucccucggcgccgcgguaaaagccggcgcgugcaugcucgacgggggaaacaugcucgaaaccaucaaagucacaccccaaaccauggacggaauccugaaaagcauccucaaaguuaagaaaucccuaggaauguucgucuccgacacccccggcgagcgcaacccauacgagaacauccuuuacaaaauaugccucuccggagacggcuggccguacaucgccucccgaaccucaaucguaggcagagccugggaaaacaccauagucgaccucgaaucagacggcaaaccacagaaagucggcaccgcaggaucaaacaaaucccuacaaucagcaggauuccccacaggucuuaccuacucccagcuaaugacacucaaagacuccaugaugcaacucgacccaucagcaaaaaccuggaucgacauagaaggucgcccagaagaccccgucgaaaucgcccuauaccaaccgauguccggcugcuacauccacuucuuccgggaacccaccgaccucaaacaauucaagcaagacgccaaauacucacacggcaucgacguagccgaccuauucccagcucaacccggccucaccuccgcagucaucgaagcccucccccgaaacaugguccucacaugccaaggcagcgacgacaucaaacgccuucucgacucacaaggccgacgugacaucaaacucaucgacaucgcccucuccaaagcagauucccgacgauucgaaaacgcagucugggaccaaugcaaagacuuaugucauaugcacaccggagucgucgucgagaaaaagaaacgcggaggcaaagaagaaaucacaccgcacugcgcccugauggacugcauaauguacgacgcagcaguaagcggcggccucaauauacccguccuccgcgcaguacucccucgagacaugguauuccgaaccuccagcccaaaaguaguccucuaa

SEQ ID NO: 9681 - RNA, 1710 nt, Artificial Sequence
  derived and/or modified CDS sequence (opt11) from LASV(LASV256-NIG-2010;Clade II)__AIT17679__NP
augagcgcauccaaagaaguaaaauccuuccucuggacccaaagucuccgacgagaacugucaggcuacugcucauccaucaaacuacaaguagucaaagacgcccaagcccuccuccacggccucgacuucucggaagucucaaacguccaaagauuaaugcgcaaacaaaaacgagacgacucagaccucaaacgccucagagaccuaaaucaagcagucaacaaccuagucgaacucaaaucaacccagcaaaaauccauccuaagagucggcacccuuaccuccgacgaccugcucacccuagccgcagacuuagaaaaacucaaauccaaaguaaucagaaccgaacgcccccucaguucaggagucuauaugggcaaccucuccacccaacaacucgaacaacgacgcgcccuacuuaacaugaucggaaugguaggaggcgcccaaucaacccagcccggccgcgauggcgucguccgagucugggacgucaaaaaccccgaccuccuaaacaaccaauucggaaccaugccaucccuuacccucgccugccugacaaaacaaggccaagucgaucuuaaugacgccguacucgcucucaccgaccucggccuaaucuacaccgccaaauaccccaacuccuccgaccucgaccgccuaagccaaucccacccaauacuaaauaugguagacaccaagaaauccagccucaacaucucaggcuacaacuucucacuaggcgcagcugucaaagccggcgcgugcaugcucgacggcggcaacaugcuagaaaccaucaaagucacaccccaaaccauggacggaauccuuaaaucuauccucaaagucaaaagaucacucggcauguucgucagcgacacccccggcgaacgaaauccauacgaaaauauacuauacaaaaucugccucucuggcgacggcuggcccuacaucgcuucaagaaccuccaucguaggccgagcaugggaaaacaccaccgucgaccuugaauccgacggaaaaccccaaaaaguaggaaccgcaggcagcaacaaaucccuccaauccgccggcuuucccaccggacuuacguacucccaacucaugacccuuaaagacuccaugaugcaacucgaccccucagcaaaaacguggaucgacaucgaaggcagaccagaagaccccgucgaaaucgcccuuuaccaacccauguccggcugcuacauacacuucuuucgagagcccacagaccucaaacaauucaaacaagacgccaaauacucccacggaaucgacgucgccgaccuauucccagcgcaaccaggacucacguccgccguuauagaagcgcuaccacgcaacaugguacuuaccugccagggcuccgacgacaucaaacgacuccucgacucccaaggccgucgagacaucaaacucaucgacauagcucuaucaaaagccgacagccgccgcuucgaaaacgccgucugggaccaaugcaaagaucucugccacaugcacaccggaguaguuguagaaaagaagaaacgcggaggcaaagaagaaaucacaccccacugcgcacucauggacugcauaauguacgacgcagccgucuccggaggauuaaacauacccguccucagagcaguacuccccagagacauggucuuccgaaccucaucaccuaaagucguacucuag

SEQ ID NO: 9682 - RNA, 1710 nt, Artificial Sequence
  derived and/or modified CDS sequence (opt11) from LASV(LASV263-NIG-2011;Clade II)__AIT17683__NP
augucagccagcaaagaagucaaaaguuuccucuggacacaaagccuccgccgugaacuaagcggcuacugcuccaacaucaaacuacaagucgucaaagacgcccaagcccuacuccacggacuagacuucuccgaaguauccaacguucaacgacucaugcgcaaacaaaagcgagacgacagcgaucuaaaacgccuccgagaucucaaccaagccgucaacaaccuaguagaacucaaauccacccaacagaaaagcauacucagaguaggcacacucacaagcgacgaccuacucacccuugccgccgaccuagagaaacuaaaaagcaaagucauccgcaccgaacggccccucagcagcggggucuacaugggaaaccuaucaacccaacaacuagagcaacgccgcgcccuacucaacaugaucggaauggugggcggcgcacaaggaacccaacccgggcgagacggugucguccgcguuugggacgugaaaaaccccgaccuacucaacaaccaauucggaaccaugcccucccuaacccuagcaugccucaccaaacaaggccaagucgaccucaacgacgcaguacuagcccucaccgaccucggacuaauauacacggcuaaauacccgaacucauccgaccucgaccgccuaucacaaucacacccaauacucaacauggucgacaccaaaaagucaucgcucaacauauccggcuucaacuucucccugggcgcagcaguaaaagccggugcaugcaugcucgacggcggcaauaugcuagaaacaaucaaagucacgccccaaacaauggacggcauucucaaauccauccuaaaagucaagaaaucccucggcauguucgucagcgacacccccggagaacgcaacccauacgaaaacauacuauacaaaauaugccugagcggcgacggcuggccauacaucgcaucgagaacaagcaucgucggacgcgcaugggaaaacacgaccgucgaccucgaauccgacgggaaaccgcaaaaagucggaaccgcaggcuccaauaaaagccuucaauccgcaggcuucccaaccggccucacauacagccaacucaugacccucaaagacuccaugaugcaacuagacccauccgccaagaccuggauagacaucgaaggccgcccagaagauccugucgaaaucgcucucuaccaaccaauguccggaugcuacauccacuucuuccgcgaaccaacagaccugaaacaauucaagcaagacgcuaaguacagccacggaauagacgucgcagaccucuucccagcccaaccaggacucacaagcgccgucauagaagcccuaccccgcaacaugguccucacaugccaaggcagcgacgacaucaagagacuacucgacagccaaggccgccgagacauaaaauuaaucgauaucgcacucuccaaggcagacucccgacgcuucgaaaacgccgugugggaccaaugcaaagaccuaugccacaugcacacagggguggucguggaaaagaagaaacgcggaggcaaagaagaaaucacuccccacugcgcccucauggacugcaucauguaugaugcagccguauccggaggccugaauauacccguacugcgcgcaguccucccaagagauaugguauuccgcaccagcagccccaaagucguccucuaa

SEQ ID NO: 9683 - RNA, 1710 nt, Artificial Sequence
  derived and/or modified CDS sequence (opt11) from LASV(LASV267-NIG-2010;Clade II)__AIT17687__NP
augagcgccuccaaagaaguaaaauccuuccuuuggacccagagccuccgacgagaacucuccggcuacugcagcucaauaaaacuccaagucguaaaagacgcacaagcccugcuccacggccucgacuucuccgaagucuccaacguccaaagacucaugcgcaaacaaaaacgggacgacagcgacuuaaaaagacuccgagaccugaaccaggccgucaauaaccuggucgagcuaaaauccacccaacagaaaagcauccugaggguaggcacccucaccuccgacgaccuccucacacucgcggccgaccuggaaaaacuaaaaucaaaaguaauccgcacagaacgcccucucucaagcggcgucuacaugggcaaccuaagcgcccaacaacucgaacagcgacgcgcccuccucaacaugaucggcauggucggaggcgcccaaggcacucagcccggccgggacggaguaguccgagucugggacgucaaaaacccagaccuacugaacaaccaauucggcaccaugccuagccuaacccuagcaugucuaacaaaacaaggacaaguagaccucaacgacgccguacuagcacugacugaccucggacucaucuacacagccaaauaccccaauuccuccgaccuugaucgccuaucccaaucacacccaauacugaacaugguugacacaaagaaaucaucccucaacaucuccggcuacaacuucucacuaggugcggccguaaaagccggagcgugcaugcuagacggcggcaacauguuagaaaccauaaaagugaccccacaaaccauggacgggauccucaaaucaauccuuaaagugaaacgcagccucggcauguucgucagcgacaccccuggagaacgcaaccccuacgaaaacauccucuauaaaauaugccucagcggcgauggauggccauacauugcaucaagaaccuccauaguaggccgcgccugggaaaauacaaccgucgaccucgaauccgacggcaaaccucagaaaguaggaacagccggcucaaacaagucccuucaaucugcaggcuucccaaccggacucaccuacucccaacuuaugacccucaaagacuccaugaugcaacuagaccccuccgcaaagaccuggauagacauagaaggccgccccgaagaccccgucgaaaucgcacuauaccagcccaugucaggcugcuacauacacuucuucagagaaccaacagaccucaaacaauucaaacaagacgccaaauacagccacggaauugacguagccgaccucuuccccgcacagccaggccuaacauccgccguaaucgaagcccucccccgcaacaugguacuaaccugccaaggcuccgacgacaucaaacgacuccucgacagccaaggcaggagagacauaaaacucaucgacaucgcacucuccaaagccgacucacgccgauucgaaaacgcaguuugggaucaaugcaaagaccucugccacaugcauaccggugucguaguugaaaagaagaaacgcggcggcaaagaagagaucacaccccacugcgcccucauggacugcauaauguacgacgccgccguaagcggcggccucaauaucccgguccuacgcgccguccucccacgggacauggucuuccgcaccuccucccccaaagucguccuauag

SEQ ID NO: 9684 - RNA, 1710 nt, Artificial Sequence
  derived and/or modified CDS sequence (opt11) from LASV(LASV274-NIG-2010;Clade II)__AIT17695__NP
augagcgcauccaaagaagucaaaucauuccucuggacucaaucccuccgucgcgaacucagcggcuacugcuccaacauaaaacuacaagucguaaaagacgcccaggcacuccuccauggccuagacuucuccgagguaucaaacguacaacgccucaugcgcaaacaaaaacgagacgacucagaccucaaaaggcuccgcgaucucaaccaagccgucaauaaucuugucgaacucaagaguacccagcaaaaguccauccuucgugucggaacccucacaagcgacgaccuccucacacuggccgcagaccucgaaaagcugaaaucaaaaguaauccgcacggaacgcccacuaagcucaggaguauacauggggaaccucucgacacaacaacuagaacaacgcagagcccuacugaaccuaaucggcauggucggaggcgcccaaggaacccaaccaggaagagacggcgucguucgcgucugggacgucaaaaaccccgaccuccucaacaaccaauucggcacaaugcccucccucacccucgccugccucaccaagcaaggacaagucgaccucaacgacgucguauuagcccugacagaccucggccuaauuuacacagccaaauaccccaacuccagcgaccucgaccgccucucccaaucccaccccauccucaacaugguagacaccaaaaagucaucccucaauaucucaggauucaacuucucccucggcgcagccguaaaggcuggcgccugcaugcucgacggcgguaacaugcuagaaaccaucaaaguaaccccacauaccauggacggaauacucaagagcauacucaaagucaagaaaucgcucggaauguuugucucagacacacccggagaacgaaacccuuacgaaaauauccucuacaaaaucugccucuccggcgacggauggccauacaucgccucacgcacaagcaucgucggacgcgccugggaaaacacaaccgucgaccuagaaucagacggcaaaccucacaaagucggcaccgcgggcuccaacaaaagucuacaauccgccggcuucccaaccggccucacauacucccaacucaugacacuaaaggacagcaugaugcaacuagaccccuccgccaaaacauggauagacaucgaaggccgccccgaagacccaguggaaauugcacucuaccaacccaugagcggcugcuacauacacuuuuuccgcgaaccgaccgacuuaaaacaauucaagcaagacgccaaauacucccacggaaucgacgucgccgaccuauucccugcccagcccggccucaccuccgcagucauagaagcacuaccccgcaacaugguccuaacaugucaagguucggacgacaucaaacgacuauuagacucucagggccggagagacaucaaacuaaucgacaucgcccucagcaaagccgacagccgucgcuucgaaaacgccgucugggaccaaugcaaagaccuaugccacaugcacaccggagucguugucgaaaagaagaaacguggcggcaaagaagaaaucacaccacacugcgcgcuaauggacugcaucauguacgacgccgccguaucaggcggccucaacauccccguccuccgagccguccucccacgcgacauggucuuucgaacaagcucccccaaaguuguccucuag

SEQ ID NO: 9685 - RNA, 1710 nt, Artificial Sequence
  derived and/or modified CDS sequence (opt11) from LASV(LASV719-NIG-2009;Clade II)__AIT17705__NP
augucggccuccaaagaaguaaaauccuuccucuggacccaaucccuacgacgugaacuaucaggcuauugcucaaacaucaaacuccaagucgucaaagacgcucaagcccuacuccacggccuagacuucuccgagguauccaacguacaacgccuaaugcgcaaacaaaaacgcgacgacagcgaccucaaaaggcuucgggaccuaaaccaagccgucaacaaccuugucgaacucaaauccacccaacagaaaagcauacuacgcgucggcacacucacauccgacgaccuacuaacccucgccgccgaccuagaaaaacuaaaaucgaaaguaauucgcaccgaaaggccccuauccagcggcgucuauaugggaaaccucucgacccaacaauuagaacaacgccgcgcacugcucaaccuaaucggcauggucggcggcgcacaaggcacacagccaggaagagacggcgucguccguguaugggacgucaaaaaccccgaccuacucaacaaccaauucggaaccaugccaagccuaacccucgcaugccucaccaaacaaggccaaguagaccucaacgacgcaguacucgcacucaccgaccucggccucaucuacaccgcuaaauaccccaacucaucagaccucgaccgacuuagccaaagccacccuauacucaacauggucgacacaaagaaaagcagucuaaacaucuccgguuucaacuucagccugggcgccgcaguaaaagccggagccugcaugcucgacggcggaaacaugcucgaaaccauaaaagucaccccacaaaccauggacggcauacuuaaauccauccugaaagucaagaaauccuugggaauguucgucuccgacacacccggcgaacgcaacccauacgaaaacauacucuacaaaaucugccuaucaggcgacggauggcccuacaucgcuagccgcaccuccaucguaggacgcgcaugggagaacaccacagucgaccuugaaucagacggcaaaccccacaaaguagguacugcaggauccaaucgauccuuacagucugcaggcuuccccaccggccugacauacucccaacucaugacacucaaagacucaaugaugcaacuagacccuuccgcaaaaacauggaucgacaucgaaggucgcccagaggaccccguggaaaucgcacucuaccaacccaugagcggcugcuacauccacuucuuccgcgaacccacagaccuaaaacaauucaaacaggacgcgaaauacagccacgggaucgacgucgccgaccucuucccagcccaacccggcuuaaccucagccguaaucgaagcccucccacgcaacaugguccucacaugccaaggaucagacgacaucaaacgacuccuagacucucaaggcagacgcgacauuaaacugauagauaucgcccucagcaaagcagauaguagacgcuucgaaaacgccgucugggaccaaugcaaagaccucugccacaugcacacaggcgucgucgucgaaaagaagaaacgagguggcaaagaagaaaucacaccccacugcgcccucauggacugcaucauguacgacgcugccgucucuggcggacugaacauacccguacuccgagccguccugccccgcgacauggucuuccgcacaucauccccaaaagucguacuauaa

SEQ ID NO: 9686 - RNA, 1710 nt, Artificial Sequence
  derived and/or modified CDS sequence (opt11) from LASV(LASV737-NIG-2009;Clade II)__AIT17711__NP
augucagcauccaaagaaguaaagucauuccuauggacccaaucccuccgacgcgaacucucaggcuacugcucgaacaucaaacuacaaguagucaaagacgcacaagcacuccuccacggccuagacuucucagaagucuccaacguccaacgacuuaugcgaaaacaaaaacgagacgacagcgaccuuaaacgccuccgcgaccuaaaccaagcagucaacaaccuugucgaacucaaaagcacacaacagaaaagcauauuacgcguaggcacacucaccagcgacgaccuacucacgcuagccgccgaccucgagaaacuuaaaagcaaagucauccgcaccgaacgcccacucuccuccggcgucuacaugggaaaccuaagcacccaacaacucgagcaacggcgcgcacuccuaaaccuaaucgguaugguaggaggcgcacaagggacccaacccggaagagacggcgucguccgcgucugggacgucaaaaacccagaccuccuaaacaaccaauucgggacaaugcccagccuaacccuugcgugucucacaaaacaaggacaagucgaccuaaacgacgccguacucgcgcuaacagaccuaggacucaucuauacagcaaaauaccccaacucauccgacuuggaccgccucucgcaaucacacccaauccucaacauggucgacaccaagaaauccagccugaacaucuccggcuuuaacuucuccuuaggcgccgccguaaaagccggcgccugcaugcuugacggaggcaacaugcuugaaaccaucaaagugacaccacaaaccauggacggcauucugaaauccauccucaaaguaaagaaaagccucggaauguucguauccgacacccccggcgaacgcaaccccuacgaaaacauccucuauaaaaucugccuauccggagacggcuggcccuacauagccucccgcacauccauagucggcagagccugggaaaacaccacagucgaccuggaaagcgacggcaaaccccacaaagucggcacagccggaagcucuaaaucacuacaauccgccggcuucccaaccggccucaccuacagccagcuaaugacccucaaggacagcaugaugcaacucgaccccucggccaaaacauggauagauauagaaggacgcccagaagaccccguugaaauagcacuauaucaaccgaugagcggaugcuacauccacuucuuucgagaacccaccgaccuaaaacaguucaaacaggacgccaaauacagccacggaauagacgucgccgaccucuuucccgcacaaccuggccucaccuccgccgucaucgaagcccucccacgcaacaugguacuuaccugccaaggcuccgacgacaucaaacgccuccucgacucacagggacgacgcgacaucaaacuaaucgacauagcucuuucuaaagccgacucaaggcgcuucgaaaaugcagucugggaccaauguaaagacuuaugccacaugcacacaggcguggucguagaaaagaagaaacgcggaggcaaagaagagauaacaccccacugcgcgcucauggacugcaucauguacgacgccgcagucuccggaggacuuaacauccccguacuucgcgccguacugccccgagacauggucuuccguaccuccucccccaaagucgugcucuga

SEQ ID NO: 9687 - RNA, 1710 nt, Artificial Sequence
  derived and/or modified CDS sequence (opt11) from LASV(LASV738-NIG-2009;Clade II)__AIT17713__NP
augucagccucaaaagaagucaaaucauuccucuggacccaaucccuccgccgcgaacuaagcggguacugcuccaacaucaaacuccaaguagucaaagacgcccaagcgcuccuacacggccucgauuucagcgaaguaucaaacguccaacgucucaugcgaaaacagaaacgcgacgacuccgaccuaaaacgccuucgagaccucaaccaagcuguaaacaaccuagucgaacucaaaagcacccaacaaaaauccauacuccgagucggaacgcuaacaucagacgaccuacucacacuagcagccgaccuugaaaaacucaaauccaaagucauccgaacagaacgcccccuuuccucaggcgucuacaugggcaaccuauccacccagcaacuagaacagcgucgagcccuccucaauaugaucggcaugguaggaggagcgcagggcacccaaccaggccgcgauggagucguccgcgucugggacgucaaaaaccccgaccuacucaacaaccaauucgggacaaugcccuccuuaacccuagccugccuaaccaaacaaggccaggucgaccucaacgacgccguccuggcacucacagaccucggccucaucuacaccgccaaauaccccaacagcagcgaccucgaccgacucagccaaucccaccccauccucaacaugguagacaucaagaaauccucucuaaacaucucagguuacaacuucucccucggcgcagccgucaaagcaggcgccugcaugcuugacgggggcaacaugcucgaaacgaucaaagucacaccccaaaccauggacggcauacucaaauccauccucaaagucaagaaaucucuaggaauguucgucuccgacacgccaggagagcgcaaccccuacgaaaacauccucuacaaaaucugccucagcggagacggcuggcccuacauagccucacgcacaucaauagucggccgcgccugggaaaacaccacaguagaccucgaaucagacggaaaaccccaaaaaguuggcaccgccggcuccaauaaaagccuacaaucugccggauuccccaccggacuuacuuauagucaacucaugacacuuaaagacagcaugaugcaacuugaccccucagccaaaaccuggaucgauauagaaggccgcccagaagaccccgucgaaaucgcacuauaccaaccaauguccggaugcuacauacacuucuuccgcgaacccacagaccucaaacaauucaaacaagacgccaaauacucccacggcaucgacgucgccgaccuauucccagcacagccaggacucacuucugccgucauagaagcacucccccgcaacaugguacucacaugccaaggaucagacgauaucaaacgacuccuagacucccaaggccgccgcgacaucaagcuaaucgacauagcccucaacaaagcggacucgcgacgauucgagaacgcaguaugggaucaaugcaaagaccucugccacaugcacaccggcgucguagucgagaaaaagaaaagaggaggaaaagaagaaauaaccccucacugugcccucauggacugcaucauguacgacgcagcuguaagcggcggacucaacauccccguacugcgagcaguccucccacgggacauggucuuccguaccucauccccaaaaguuguccuauaa

SEQ ID NO: 9688 - RNA, 1710 nt, Artificial Sequence
  derived and/or modified CDS sequence (opt11) from LASV(LASV966-NIG-2009;Clade II)__AIT17719__NP
augucagcuagcaaagaagucaagagcuuccuauggacacaaucacugcgccgagaacucuccggcuacugcucaucaaucaaacuccaagucguuaaagacgcucaagcccuacuacacggccuagacuucuccgaagucagcaacgugcaaaggcucaugcgcaaacaaaaacgcgacgacucugaccuaaaacgccuccgugaccucaaccaagcaguaaacaaccucgucgaacucaaauccacccaacaaaaauccauacuacgcgucggcacccugaccucagacgaccuccucacccucgccgcagaccuggaaaaacucaaauccaaagucauccgcaccgaacgcccccucaguuccggaguauacaugggcaaccucuccacccaacagcucgaacagcgccgcgcccuccucaacaugaucggcauggucuccggcgcccaaggaacacaaccugggcgcgacggugucguccgaguaugggaugucaaaaacccagaacuccucaacaaccaauucggaacgaugcccucccuuacacuagccugucucaccaagcaaggacaagucgaccuaaaugacgccguccuggcccucacagaccuaggccucauauacaccgccaaauacccaaacuccuccgaccucgacagacuuucacaaagccaccccauccucaacauggucgacaccaagaaauccucacucaacaucuccgguuacaacuucagucuaggagccgcagucaaagccggcgcaugcaugcuagacggagguaacaugcucgaaacaauaaaagucacuccccaaaccauggacggaauacucaaaagcauacuaaaagucaagaaaucacuuggcauguucguaagcgacaccccaggcgaaagaaauccauacgagaacauccuauacaagaucugccuauccggcgacggauggccauacaucgccagucgaaccucaauugucgggagagccugggaaaacaccacuguagaccucgaauccgacggaaaaccacaaaaagucggcaccgcugguuccaacaaaucucuacaaagcgccggcuucccuaccggccuaaccuauagucaacucaugacacuaaaagacucaaugaugcaacuagaccccagcgccaaaacauggaucgauaucgaaggccgacccgaggacccaguggaaaucgcacuauaccaaccaaugucaggcugcuacauccacuucuuccgcgaaccgaccgaccucaagcaauucaagcaagacgccaaauacagccacggcaucgacguagccgaccucuucccagcgcaaccaggacucaccuccgcaguaaucgaagcacuuccccgcaacaugguccuaaccugccagggaucagacgacauaaaacgucuccucgacucccaaggcagacgcgacauaaaacucaucgacauaagccucagcaaagcagacagucgccgcuucgaaaacgccgucugggaccaaugcaaggaccuuugccacaugcacaccggcgucgucgucgaaaagaagaaacgcggcggaaaagaagaaaucacaccccacugcgcacucauggacugcauuauguacgacgccgcagucucaggcgggcucaacauaccaguacuacgcgcuguccuacccagagacaugguuuucagaaccagcuccccaaaagucguucucuaa

SEQ ID NO: 9689 - RNA, 1710 nt, Artificial Sequence
  derived and/or modified CDS sequence (opt11) from LASV(LASV969-NIG-2009;Clade II)__AIT17725__NP
auguccgcaaguaaagaagucaaaucauuucuuuggacccagucccuccgaagagaacucuccggauauugcagcaacauaaaacugcaaguagucaaagacgcccaagcccuacuucacggacuagauuucucggaaguauccaacguccaacgccugaugagaaaacaaaaacgagacgacagugaccuaaaacgccuccgugaccuaaaucaggccgucaacaaccuagucgagcuaaaauccacccaacaaaaaucaauccugcgcguuggcacacuaaccagugacgaccuacucacccucgcagccgaccuagaaaaacucaagucaaaagucauacggacagagagaccccucucauccggcgucuacaugggcaaccucagcgcccaacaacuagaacaaagacgcgcccuccucaacaugaucgguauggucgguggcgcacaaggaacccaacuaggccgcgacggcgucguccgagucugggacgucaaaaacccagaccuccucaacaaccaauucggcaccaugcccucacucacccuagcgugccucacaaaacaaggucaaguagaucucaacgaugcagugcuagcccugacggaccucggacucauauacacggccaaauaccccaacuccuccgaccuugaccggcuaucacaaagccacccaauacuaaacaugguagacacaaagaaauccucacuaaacaucagcggauacaacuucucccuaggcgccgcagucaaagccggagccugcaugcuagacggcggaaacaugcuagagaccaucaaaguaaccccgcaaaccauggacggcauacucaaaucuauacucaaagugaagaagucccucggcauguucguuagcgacaccccaggagaacgcaacccauacgaaaacauccuauacaaaaucugccucucaggcgauggcuggccauacaucgccagucgcacaagcauaguaggacgagccugggaaaacacaacuguagaccucgaaucggacggcaagccccagaaagugggcacugccggcaguaacaaaucccuccaaagcgccgguuuccccaccggacucacauacucgcaacuuaugacacuaaaagacaguaugaugcaacucgaccccagcgccaaaacauggaucgacaucgaaggacgaccagaagaccccguagaaaucgcccucuaccaaccgauguccgguugcuacauccacuucuuccgcgaacccaccgaccuaaaacaguucaaacaagacgcaaaauacagucauggcauugacguagcggaccucuuccccgcccaaccaggcuuaacaagcgccgucauagaagcccucccacgcaacaugguccucacaugccaaggcagcgaagacaucaaaagacuacuagacucccagggaagacgcgacaucaaacucaucgacauagcccuauccaaggccgacucccgacgcuucgaaaacgccgucugggaccaaugcaaagaccuaugccacaugcacaccggagucguagucgaaaagaagaaacgcggaggaaaagaagaaauaacaccccacugcgcucucauggacugcaucauguaugacgcagcaguauccggcggacugaacauccccguccucagagcgguacuaccccgcgacauggucuucagaaccucgucgccaaaaguuguccuauaa

SEQ ID NO: 9690 - RNA, 1710 nt, Artificial Sequence
  derived and/or modified CDS sequence (opt11) from LASV(LASV971-NIG-2009;Clade II)__AIT17729__NP
auguccgcaucuaaagaggucaaguccuuccucuggacccaaucccuucgcagggaacucucuggauacugcaguagcauuaaacuucaagucguaaaggacgcccaagcccuacuacacgggcuagacuucucagaagucucaaacguccaacgacucaugcggaaacaaagacgcgacgacuccgaccucaaacgccuccgcgaccucaaucaagccguaaacaaucuagucgaacuuaaauccacccaacagaaauccauccugcgcguaggaacccucaccuccgacgaccuccucacgcucgcugcagaccucgaaaaacucaaaucaaaagucauccgcaccgaacgaccccucucuagcggcguauacauggguaaccuauccacccaacaacuagaacaacgcagagcccuuuuaaacaugaucggcauggucggcggaacacaaggaacccaacccggccgagacggagucguccgcguaugggacgucaaaaaccccgaccuacucaacaaccaauucggcaccaugcccucccuaacccuggccugccuaacaaaacaagggcaagucgaucuaaacgacgcaguccucgcacugaccgaccuaggacucaucuacacagccaaauaccccaacagcucagaccucgaccgucucagucaaagccacccaauccucaacauggucgacacaaagaaauccucacuaaacaucuccggcuacaacuuuagccuaggcgcagcugucaaagccggggcauguaugcucgacgggggaaacaugcucgaaaccaucaaagucaccccgcaaacaauggacggcauccucaagagcauccuaaaagucaaaaggucgcugggcauguucgucagcgacaccccaggagaacguaaccccuacgagaacauccucuacaaaaucugccucagcggcgacggauggcccuacaucgccucacgaaccagcauagucggcagagccugggaaaacacaacaguagacuuagaaucggacggaaaaccgcaaaaagucggcacagccggcuccaacaaaucacuacaaagugcaggguucccaacaggccuaacuuauagccagcucaugacacuaaaagacuccaugaugcaacuggaccccuccgccaagacauggauagacauagaaggccgacccgaagacccagucgaaauagcccuauaccaacccauguccggcugcuacauccauuucuucagagaaccuaccgaccucaaacaauuuaaacaagacgccaaguacucccacggcaucgaugucgccgaccucuuccccgcccaaccaggccucacguccgcaguaauagaagcucucccccgcaacaugguccuaacgugccaaggcucugacgacaucaaaagacuccucgauucccaaggacgccgcgauaucaaacucauagacauagcccucagcaaagccgacucacgaaaauucgaaaacgccgucugggaccaaugcaaagaccucugccacaugcacaccgguguaguagucgaaaagaagaaacgaggaggaaaagaagaaaucacuccccacugcgcccucauggacugcauaauguacgacgccgcaguauccggugggcugaacauaccaguccuccgagcaguccugccccgcgacaugguguuccgcaccagcucccccaaagucguccuauaa

SEQ ID NO: 9691 - RNA, 1710 nt, Artificial Sequence
  derived and/or modified CDS sequence (opt11) from LASV(LASV975-NIG-2009;Clade II)__AIT17733__NP
auguccgccucuaaagaagucaaaucguuccuauggacccaaagccuccgccgagaacuaucaggcuacugcucaaacaucaaacuccaagucgucaaagaugcccaagcacuacuacacggccuagacuuuagcgaagucucaaacguacaaagacucaugcgcaaacagaaaagggaugacagcgaccuaaaacgccuacgcgaccuaaaccaagccguuaacaaccuuguagaacuaaaauccacacaacaaaaauccauccuaagagucggcacacuaaccagcgacgaccuccucauccucgccgcugaccuagaaaaacucaaauccaaagucauccgcaccgagcgaccccuauccucaggcgucuacaugggcaaccuauccacacaacaacucgaacaacgucgagcccuccucaacaugauaggaaugguaggcggcgcccaaggcacacaacccggccgagacggagucguccggguaugggacgucaagaauccagaccuacuaaacaaccaauucggcaccaugccaucccuuacacucgcaugccuaaccaaacaaggucagguggaccuaaacgacgcaguucuagcacucacagaccucggucugauauacaccgcaaaauaccccaacucaucggaccuagaccgccucucccaaucacaccccauacucaacaugguagacacaaagaaaagcagccuuaauaucagcggcuacaacuuuagccuaggagccgccgucaaagccggagccugcaugcuagacggcggcaacaugcucgagaccaucaaggucacaccccaaaccauggacggcauccuaaaauccauacugaaagucaaaaagagucugggcauguucguaucugacacccccggcgaacguaacccauacgaaaacauacuauacaagaucugccucagcggcgacggcuggcccuacaucgcaucccguaccuccaucgucggccgugccugggaaaacaccaccguagaccucgaauccgacggcaaaccccaaaaaguaggaaccgcagggagcaacaaaucgcuccaaucagccggauucccuacgggccucaccuacagccaacucaugacccucaaagacuccaugaugcaacucgacccauccgcaaagaccuggaucgacaucgaaggaagacccgaagacccagucgaaaucgcacucuaccaaccaaugucgggaugcuacauccacuucuuccgcgaacccaccgaccuaaaacaauucaaacaagacgccaaauacagccauggcauagacguagcagaucucuucccagcacaacccggccucaccagcgccgucaucgaagcacuccccaggaacaugguacucaccugucaaggaagcgacgacaucaaacgccuacucgacucucaaggacgccgagacaucaaacuaaucgacaucgcgcuauccaaagcagacagcagacgcuucgaaaacgccguaugggaccaaugcaaggaccuaugccacaugcacaccggagucguagucgaaaagaagaaacgaggcgggaaagaagaaaucacgccccacugcgcacuaauggacugcaucauguaugacgcagcaguguccggaggccucaacauccccguacuccgugccguacucccacgugacauggucuucagaaccuccagcccaaaagucguucuauag

SEQ ID NO: 9692 - RNA, 1710 nt, Artificial Sequence
  derived and/or modified CDS sequence (opt11) from LASV(LASV978-NIG-2009;Clade II)__AIT17745__NP
auguccgccucgaaagaaauaaaauccuuccucuggacacaaucucuccgccgcgaacucucaggcuacugcagcuccauaaaacuccaaguagucaaagacgcccaggcacuccuccacggccucgacuucucagaagucucaaacguucaacgccucaugcguaaacagaaacgcgacgacagcgaccucaaacgccuccgggaccucaaccaagccgucaacaaccucgucgaacucaaaagcacccaacaaaaaucaauacuacgcguaggcacauuaaccagcgacgaccugcuuacccuugccgcggaccuagaaaaacucaaaagcaaagucauacgcacagaacggccccuauccuccggcgucuacaugggcaaccucucuacccagcaacucgaacaacgccgcgcucucuuaaacaugauaggaaugguaggcggagcccagggaacacaacccggccgcgacggcguaguacgggucugggacgucaaaaaccccgaccuccuaaacaaccaauucggcacaaugccuucacugacccucgcuugccugaccaaacagggacaagucgaccucaacgacgccguccucgcacuuaccgaccugggccucauauacaccgccaaauacccuaauucaucagaccucgaccgacucucgcaaucccaccccauacuaaacaugguugacaccaagaaauccucacuuaacauuagcggguacaacuucucacucggcgccgcagucaaagccggggcauguaugcucgacggcgggaacaugcuggaaaccauaaaagucacgccccagaccauggacgggauccuaaaaagcauccucaaaguaaaacgcuccuuaggcauguucgucuccgacgccccaggcgaacgcaaccccuacgaaaacauacucuacaaaauaugccucucaggcgacggguggcccuauaucgcaucccgaaccaguaucgucggcagagccugggaaaacaccaccguagaccucgaauccgacggcaaaccccaaaaaguaggcaccgcaggaucuaacaaaucgcuacaguccgcgggauuccccacaggccucaccuacucccaacugaugacccucaaagacuccaugaugcaacuagacccaucugcuaaaaccuggauagacauagaaggacgaccagaagauccagucgaaaucgcccuauaccaacccauguccggcugcuacauacacuucuuccgugaacccacagaccucaaacaauucaaacaagacgccaaauacagccacggcauagacgucgccgaccucuucccagcucaacccggccucaccucagccguaaucgaagcccuaccacgaaacaugguucuaaccugccaaggcuccgacgacauaaaacgccuccuagacucacaaggccggcgcgacauaaaacucaucgacaucgcucucuccaaagucgacucacgucgcuucgaaaacgccgucugggaccaaugcaaagaucugugccauaugcacacaggcguagucgucgaaaagaagaaacgcgguggaaaagaagagauaacaccccauugcgcccucauggacugcaucauguacgacgccgccguauccgggggccuaaacauccccguccuacgcgcgguccuaccccgcgacauggucuuccgcaccucaucccccaaaguaguccucuaa

SEQ ID NO: 9693 - RNA, 1710 nt, Artificial Sequence
  derived and/or modified CDS sequence (opt11) from LASV(LASV981-NIG-2009;Clade II)__AIT17753__NP
augucagccucaaaagaaguaaaauccuuccuauggacccaaucccucaggcgcgaacucucaggcuacugcucaucaauaaaacuccaagugguaaaagacgcccaagcacuccuccacggccuugacuucuccgaaguauccaacguccaacgcuuaaugcgaaaacagaaacgagacgacuccgaccucaaaagacuacgcgaccucaaccaagcagucaacaaccuagucgaacucaaaucaacccagcaaaaauccauacuccgagucggcacacuaacgucagacgaccuccuaacccucgccgccgaccucgaaaaauuaaaaucaaaaguaauccgaaccgaacggccccucuccuccggcguuuacaugggcaacuuauccacccaacaacuggagcaacgacgagcccuccucaacaugauagggauggucggcggcgcccagggcacacaaccaggccgcgacggcgucguacgaguaugggacgucaaaaaccccgaccuacucaacaaccaauucggcacaaugcccucccuuacccucgccugccucacuaaacaaggccaaguagacuugaacgacgcaguccucgcccuaacagaccuagggcucaucuacaccgcgaaauacccaaacagcuccgaccuagaccgucuuucccaaucccauccaauccucaacauggucgacacaaagaaaucaagccucaacauuucuggcuacaacuucucccucggagccgccgucaaagcaggagcaugcaugcucgacggagggaauaugcuagaaaccaucaaagugaccccacagaccauggacgggauccugaaauccauccuaaaagucaaacgaucacuaggcauguucgucuccgacacacccggagaacgcaacccauacgaaaacauccucuacaaaaucugccucucaggagauggcuggcccuacaucgcaucgcgcaccucaauagugggccgcgcuugggaaaacaccacgguagaccuagaaucagacggcaaaccccaaaaagucggaaccaccggaagcaacaagucccuccaaagcgccggauucccaacgggccuaaccuacucacaauuaaugacgcucaaagacagcaugaugcaacucgaccccucagcaaaaacauggauagacaucgaagggcggcccgaagaccccguagaaaucgcccucuaccaaccaauguccggaugcuacauccacuucuuccgcgaaccaaccgaccucaaacaauuuaaacaagacgccaaauacucccacggcauagacguagcagaccuguucccagcacaacccggucuaacuagcgccgucaucgaagcccuaccccgcaacauggucuuaaccugccagggcucagacgacaucaaacgccuccucgacucucaaggacgaagagacaucaaacucaucgacauagcccuaucaaaagccgacucacgacgcuuugaaaacgccgucugggaccaaugcaaagaccuaugccauaugcacaccggcgucgucgucgaaaagaagaaacgcggcggaaaagaagagaucacaccccacugcgcacucauggacugcaucauguaugacgcugccguaucaggcggccuuaacauaccaguccuacgcgcgguccucccucgagacaugguguuccgcaccuccucacccaaagucguccucuaa

SEQ ID NO: 9694 - RNA, 1710 nt, Artificial Sequence
  derived and/or modified CDS sequence (opt11) from LASV(LASV988-NIG-2009;Clade II)__AIT17759__NP
augagcgcaagcaaagaagucaaauccuuccucuggacacagagccuucgccgagaacugucaggauacugcuccaacaucaaacuacaagucguaaaagacgcccaggcccuacuccacggccuagacuucucugaagugagcaauguccaacgccuaaugaggaaacaaaaacgcgacgacucagaucuaaaacgccuccgagaccucaaccaagcagucaacaaccucgucgaacugaaaucuacacagcaaaaaucuauccuccgcgucggaacucuaaccagcgaugaccuccucacccucgccgccgaccuggaaaaacucaaguccaaaguaauacgcaccgaacgaccccucuccagcggagucuacaugggaaaccucaacacccaacaacucgagcaacgccgagcacucuuaaacaugaucggcauggcaggaggcgcccaaggcacccaacccggccgagacggaguaguaagaguaugggacgucaagaacccagaccuccugaacaaccaauucggaacgaugcccucacuaacccuagccugccucacaaaacaaggccaagucgaccuaaacgacgcagugcucgccuuaaccgaccucgggcucauauacacugcaaaauaccccaacagcagcgaccucgaccgacucucacaaucacacccaauccuaaacauggucgacaccaaaaaguccucccugaacaucucaggauacaacuucucacuuggcgccgcagucaaagcaggcgccugcaugcucgacggcggaaacaugcuggaaaccauaaaagucacaccccaaaccauggacggcauccucaaauccauccucaaagucaaaaagucccuaggcauguucgucucagacacccccggcgaacguaaccccuacgaaaacauccucuauaaaauaugccuaagcggagacggcuggccauauauagccucccgaaccagcaucgucggacgagcaugggagaacacaaccguagaccucgaaagcgacggcaaaccucaaaaaguaggcacagcaggcagcaacaaaucccuccaaucagcgggcuuccccaccggccucaccuacucucaacucaugacccucaaagacagcaugaugcaacuagacccaagcgcaaaaaccuggaucgacaucgaaggccgccccgaagacccaguagaaaucgcccuguaccaacccaugagcggaugcuauauccauuucuuccgcgaacccaccgaccuaaaacaauucaaacaggaugccaaauacucccacggcaucgacguagccgaccucuucccagcccaaccaggacuaaccuccgcagucaucgaagcccuaccccgcaacaugguccuaaccugccaaggcucagaugacauuaaacgacuccucgacagccaaggacgccgcgacaucaaacucaucgacaucgcucucuccaaagccgacucacgcagauucgaaaacgccgugugggaccaaugcaaggaccugugccacaugcacacuggcguagucgucgaaaagaagaaaagaggcggcaaagaagaaauaacaccccacugcgcacucauggacugcaucauguacgacgcagccgucuccggcggucucaacauccccguccuccgcgccguccuaccaagggacaugguuuuccgaaccuccucccccaaagucguccuuuaa

SEQ ID NO: 9695 - RNA, 1710 nt, Artificial Sequence
  derived and/or modified CDS sequence (opt11) from LASV(LASV989-NIG-2009;Clade II)__AIT17763__NP
auguccgccucaaaagaaguaaaaucauuccucuggacgcaaagccuccgccgagaacuuuccggcuacugcuccuccauuaaacuacaaguagucaaagacgcccaagcccuacuacauggccucgacuucuccgaaguaucaaauguccaaagacuaaugcgaaaacaaaaacgcgacgacucagaccucaaacgccuccgggaucucaaccaagccguaaauaaccucgucgagcucaaaucaacccagcaaaaauccauccuccgagucggaacccucaccuccgacgaccuccucacccuggccgcugacuuagaaaaacuaaaauccaaaguuauacgaacugagcgaccacuaagcuccgggguauacaugggcaaucucaguacccaacaacucgaacaacgccgcgcccuccucaacaugauaggcauggucggcggugcacaaggaacacaaccaggcagagacggcgucguacgagucugggaugucaaaaaccccgaccuacucaacaaccaauucggcacaaugcccucccuaacccuggccugccucaccaaacaaggacaaguagaccuaaacgacgccguccucgcccucaccgaccucggccugaucuacaccgcuaaauacccaaacuccucagaccucgaccgacucucacaaucccacccaauacuaaacauggucgacaccaagaaaagcagccucaacaucuccggcuacaacuucucccucggagcagcagucaaagcgggcgcaugcauguuagacggcggcaauaugcucgaaaccaucaaagucacgccacaaaccguagacggcauacucaaaagcauccucaaagucaaacgcucacuaggcauguucgucucagacaccccuggugaacgcaaccccuacgaaaacauacuauacaaaauaugccucucgggcgacggcuggcccuacaucgcaagccgcaccucuauaguaggucgagcaugggaaaacaccaccgucgaccucgaaagcgacgaaaaaccacaaaaagucggggcagccggcuccaacaaaucgcuacaaucagccggcuuccccacgggucuuaccuacucacaacucaugacccucaaagacuccaugaugcaacucgaccccucagcaaaaaccuggaucgacauagaaggccgcccagaagaccccgucgaaauagcccuauaccaacccaugucaggcugcuacauccauuucuuccgcgaacccaccgaccucaaacaauucaaacaagacgccaaauacagccacggaaucgacguaaccgaccuauucccugcccaacccggacucaccucagcugucaucgaagcccucccaagaaacaugguccucacaugccagggaucagaugacauaaaacgccuccuagacucccaaggacgccgagacauaaaacucaucgacaucgccuuauccaaagcagauucacgccgcuucgaaaacgccgucugggaccaaugcaaagaccugugccacaugcacacaggaguagucgucgagaaaaagaaacgcggcggaaaagaagaaauaacaccccacugcgcccuuauggacugcaucauguacgaugcugccgucuccggaggccuaaacaucccuguccuacgcgccguccucccccgcgacauggucuuccggaccuccucccccaaaguaguccuauaa

SEQ ID NO: 9696 - RNA, 1710 nt, Artificial Sequence
  derived and/or modified CDS sequence (opt11) from LASV(LASV991-NIG-2009;Clade II)__AIT17771__NP
auguccgccuccaaggaagucaaaaguuuccuauggacccaaagccuccgcagagaacuguccggcuacugcucgagcaucaaacuccaggucguaaaagacgcgcaagcacuucuccacggacuggacuucuccgaagucucgaauguacaacgcuuaaugcgcaaacaaaagcgcgacgacuccgaccucaaacgacuccgcgaccucaaccaagccgucaacaaccuaguagaacuaaaauccacccaacaaaaauccauccuucgagucgguaccuuaacuagcgacgaccugcuaacccuugccgccgaucuggaaaaauuaaaauccaaagucauacgaacagaacgaccccucuccagcggcguauacauggggaaccucagcacccaacaacucgaacaacgccgcgcccuccuaaacaugaucggcauggucggcggcgcacaaggaacccaacccggccgcgacggcgucgugcguguaugggacgucaaaaaccccgaccugcucaacaaucaauucgggacgaugccaagucucacucucgccugccucacaaaacaaggacaagucgaccugaacgacgcaguccuagcccucaccgaccucggccucauauacaccgccaaauaccccaacagcucagaccuugaccgccucucgcaaucccaccccauauuaaacauggucgacaccaagaaaucaucucucaauauuagcggcuacaacuucucccucggggcggccguaaaagcuggagccugcaugcuagacggcggcaacaugcucgaaaccauaaaagucacaccccaaaccauggacggaauacucaaaagcauucucaaagucaagcgaucccugggaauguucguuuccgacaccccaggagaacgcaacccauaugaaaacauccucuacaaaauaugccucucaggcgacggauggcccuacauagccagccgaaccucuaucgucggcagagccugggaaaacacaaccgucgaccuagaauccgauggaaaaacucaaaaagucuccaccgccggcagcaacaaaagccugcaauccgcaggcuucccaaccggccuaaccuacagccaacuaaugacuuuaaaggacuccaugaugcagcucgacccaucagccaaaaccuggaucgacauagaaggucgccccgaagacccaguagaaaucgcccuauaccaacccauguccggcugcuacauccacuucuuccgcgagcccaccgaccucaagcaauucaaacaagacgccaaauacucacacggcauagacgucaccgaccucuucccagcccaacccggccucacauccgcggucaucgaagcccuaccccgaaacaugguacucacgugccaaggcuccgacgacauaaaacgacucuuagacucacaaggacgccgcgacauuaaacuaaucgacaucgcccugucaaaggccgacucacgcagauucgaaaacgccgucugggaccaaugcaaagaccucugccacaugcacaccggagucgucgucgagaaaaagaagcgcggcggaaaagaagaaaucacuccacacugcgcacugauggacugcaucauguacgacgccgccgucuccggaggacuaaacauacccguacuacgagccguacuaccccgcgacauggucuuucgcaccuccucgccaaaagucguccuauaa

SEQ ID NO: 9697 - RNA, 1710 nt, Artificial Sequence
  derived and/or modified CDS sequence (opt11) from LASV(LASV993-NIG-2009;Clade II)__AIT17779__NP
augagcgcaucaaaagaaguaaaauccuuccucuggacccaaucacuaaggcgagaacucucaggcuacugcuccaacaucaaacuccaagucguaaaagacgcacaagcgcuacuccauggacucgacuucucagaagucagcaacguccaacgccuuaugcggaaacagaaacgagaugacggcgaccucaaaaggcuucgggaccuuaaccaagcagucaacaaucucguagagcuaaaauccacccaacaaaaguccauccuacgaguagggacccuaaccagcgacgaccuccuuacacuagccgccgaccucgagaaacuuaaaagcaaagucauacgcaccgaacgccccuuauccucaggugucuacaugggcaaccuaucaacacaacaacuagaacaacgccgcgcacuccuaaauaugaucggcauggucggcggagcccaaggaacacaacccggccgggacggaguagugcgaguaugggacgucaaaaaccccgaccuacucaacaaccaauucggcaccaugcccucauuaacccucgcaugccuaacaaaacaaggccaaguagaccucaacgacgccguacuagcccuaaccgaccucggacucauauacaccgcaaaguaccccaacagcuccgaucucgaccgacucagccagucccaccccauccucaacauggucgacaccaagaaauccucccuaaacauaucaggcuacaacuucucacucggcgcagccguuaaagccggcgcaugcaugcuagacggcggcaacaugcuagaaacuauaaaaguuaccccacaaaccauggacggcauacucaaauccauccucaaaguaaagaaaagccucggaauguucgucuccgauacaccaggcgaacggaaucccuacgaaaacauucucuacaaaaucugucucucgggcgauggcuggcccuacaucgccagccgcacauccaucgucggacgcgccugggaaaacaccacagucgaccuagaauccgacggaaaaccacaaaaagucggcacggccggcuccaacaaaucccuacaauccgcgggcuucccgaccggacuaacauacucacaacucaugacccucaaagacuccaugaugcaacucgaccccuccgccaaaaccuggauagacaucgaaggccgccccgaagaccccguggaaauagcacuauaccagcccauguccggcugcuacauccacuucuuccgcgaaccaacagaccuuaaacaauucaaacaagacgccaaauacucccacggcaucgacgucaccgaccucuucuccgcccaacccggacucaccagcgccgucaucgaagcccuccccagaaacaugguccugaccugccaaggaucugacgacaucaaacgccuucucgacucccaaggaagacgcgacaucaagcucaucgacaucgcuuuaucaaaaaccgacucucgccgauucgaaaacgcagucugggaccaaugcaaagaccucugccauaugcacaccggagucgucguugaaaagaagaaaagaggcggcaaagaagagauaaccccacacugcgcacuaauggacugcaucauguacgaugccgccguuuccggcggccucaacauccccguccucagagcaguccucccacgagacaugguauuccgcaccuccucccccaaaguuguccuauag

SEQ ID NO: 9698 - RNA, 1710 nt, Artificial Sequence
  derived and/or modified CDS sequence (opt11) from LASV(Nig08-04;Clade II)__ADU56611__NP
augagcgcgucgaaagaagucaagagcuuccucuggacccaaucucugcgaagagaacucucuggcuacugcuccaacauaaaacuccaagucgucaaggacgcccaagcccuauuacacggccuagacuucuccgaaguaucaaacgugcaaagacucaugcgcaaacagaaacgagacgacggcgaccucaagagacuacgagaccuaaaccaagccguaaacaaccucgucgaacuaaaaagcacccagcaaaaaucaguccuacgggucggcacgcugaccagcgacgaccugcuaacacucgccgcagaccuagaaaaacuaaaaucaaaagucauacgcaccgaacgcccacuauccagcggagucuacauggggaaccucucaacccagcaauuagaacaaagaaaagcccugcuaucaaugauaggcauggucggcggcgcccaaggaacgcaacccggccgcgacggcgucguccgagucugggacgucaaaaacccagaccuacucaacaaccaauucggcaccaugccgucacuaacacuagcaugccucaccaaacagggccaagucgaccucaacgaugcaguccuagcccuaaccgaccucggccuaaucuacaccgcaaaauacccaaacuccucagaccuagaccgacuaucccaaucacacccaauccucaacauggucgacacaaagaaaucaucccucaacaucuccggcuacaacuucagccucggcgccgccgucaaagcaggcgccugcaugcucgacggcggcaacaugcucgaaaccaucaaaguaaccccacaaacaauggacgggauauuaaaauccauacucaaagucaagagaucccucggcauguucgucucggacaccccaggagaacgcaacccauacgaaaacauacucuacaagauaugccuauccggcgacggcuggccauacauagccuccagaaccuccauagucggccgggcgugggaaaacaccaccguagaccuagaaagcgacggcaaaccccagaaggucggcacugcgggcucaaacaaaucccuacaaucagccggauucccgacaggacucacauacucacaacugaugacccucaaagauucaaugaugcaacucgacccaagcgccaaaacguggaucgauaucgaagggagaccagaagacccggucgaaaucgcccuauaccaaccaaugagcggcugcuacauacacuucuucagggaacccacagaccuaaaacaauucaagcaagacgcaaaguacucacacggcauagaugucacagaccuauucagcgcccaaccaggacuuaccuccgcaguaaucgaagcacuacccaggaacaugguccugaccugccaaggaucagacgacauaaagaaacugcuagacagucagggacgacgagacaucaaacuaaucgacaucagccucaacaaagccgauagccgacguuucgaaaacgccgucugggaccaaugcaaagaccucugccacaugcacaccggcguagucguagaaaagaagaaacgcggcggaaaagaagaaauuacaccccacugcgcccucauggacugcaucauguucgacgcggcaguaagcggaggccucaacauaccgauccuccgagcaguccuccccagagacaugguauuccgcaccuccagcccaaaagucguccucuaa

SEQ ID NO: 9699 - RNA, 1710 nt, Artificial Sequence
  derived and/or modified CDS sequence (opt11) from LASV(Nig08-A47;Clade II)__ADU56631__NP
auguccgcuucgaaagaagucaagagcuuccucuggacccaaucccuacgccgcgaacuaagcggcuacugcuccaacaucaaacuacaagucguaaaagacgcacaagcccuccuacacggucucgacuuuuccgaagucuccaacguccaacgcuuaaugcgaaaacaaaaacgggacgacucagaccucaaaagacucagagaccucaaucaagcaguaaacaaccucgucgaacucaaaucgacccaacaaaaauccauucuccgagucggaacacucacuucugacgaccuccugacuuuagcagccgacuuagagaaacucaaaagcaaaguuauccguacagagcgaccccucagcuccggcguauacaugggcaaccuauccacccagcaacuagaacaacgccgcgcgcuccucaacaugaucggcauggucggaggagcacaaggcacacaacccggacgcgauggcguaguacgagucugggacgucaaaaacccugaucuacucaacaaccaauucggaaccaugccgucgcucaccuuagccugccucacaaaacaaggacaaguagaccucaacgacgccguauuagcccuaaccgaccucggccuuaucuacaccgccaaauacccaaacagcuccgaccucgaccgucuaucccaaagccaccccauccucaacauggucgacacaaagaaaucaucacuaaauaucuccggcuacaacuucucucucggggccgccgugaaagccggcgcaugcaugcucgacgggggcaacaugcucgaaaccaucaaagugacuccccaaaccauggacgguauacucaaauccauacucaaagucaagaaaagccucggaauguucgucuccgacacgcccggagaacgcaacccauacgaaaacauccuauacaaaauaugccucuccggcgacggauggccguacaucgcauccagaaccagcaucgucggccgcgccugggaaaacaccaccgucgaccuugaauccgacggcaaaccgcagaaaguaggaacagccggaucaaacaaaagccuacaauccgccggauuccccacaggacucacauacucacaacuaaugacccucaaagacucgaugaugcaacucgaccccagcgcgaaaaccuggauagauaucgaaggacgccccgaagaccccguagaaaucgcccuauaccaacccauguccggcugcuacauccacuucuuccgcgaaccaaccgaccuaaaacaauucaaacaagacgcuaaauacucccaugggaucgacgucaccgacuuauucccagcccaacccggacuaaccagcgccgugauagaggcccucccccgaaacaugguccuaaccugccaaggcucagaugacaucaaacgccuccucgacagccaaggccgccgagacaucaaacucauagacauagcacucagcaaagccgacagccgccgcuucgaaaacgccgugugggaccaaugcaaagaccucugucacaugcauaccggcguuguaguagagaaaaagaaacgcggcggcaaagaagaaaucacaccccauugcgcccucauggacugcauaauguacgacgccgccgucuccggcggacucaacauccccguccuacgggccguccucccccgugacauggucuuccgaaccucaucacccaaagucguccucuaa

SEQ ID NO: 9700 - RNA, 1713 nt, Artificial Sequence
  derived and/or modified CDS sequence (opt11) from LASV(GA391;Clade III)__AAA46284__NP
auguccgcgaguaaagaaguacguucaugccuauggacgcaaucccuccggcgcgaacuuuccggcuacugcucaaacauaaaacugcaagugguaaaggacgcccaagcacuacuucacggacuagacuucucagaagugucaaacguccagagacuaaugcgaaaacagaaacgggacgauggagaccuaaaacgacugcgcgaccuaaaccaagcggucaacaaccuagucgagcucaaaagcacacaacagaaaucgguccuacgcguuggaacgcucuccagcgacgaccugcucauccucgcggccgaccucgaaaaacucaaaucaaaaguaacccgaaccgaacgcccgcuuucgagcggaguauauaugggaaaccuaaguucccaacagcucgaccaacgccgcgcacuccugaacaugauaggcaugacaggagugagcggcggagggaaaggcgcaucaaacggcaucgugcgcgucugggacgugaaaaacgccgaacuccuuaacaaccaguucgggaccaugcccucacuaacacucgcaugccuaaccaagcaaggacaaguagaccuaaacgacgccguacaagcacuaaccgaccuaggccuuaucuacacagcgaaauaccccaauagcucggaccuggacagacucucacaaucgcaccccauccugaacaugaucgacaccaagaaaucgagccuaaacauuuccggcuacaacuucucucucggggccgccgucaaagcaggggcaugcaugcuagacggaggcaacaugcucgaaacgaucaaagucucaccccaaaccauggacggcauacugaaauccauccuaaaagucaagaaaagccuaggaauguucgucagcgacaccccaggcgaacgcaaccccuacgaaaauauccuguacaaaaucugccucucgggagacggcuggagcuauaucgcgagcagaacaucaaucguaggccgcgcgugggagaacaccguaguugaccucgaacaagacaacaaaccacagaaaauaggcaacggcggauccaauaaaucacuccagagcgcaggcuucgcagcuggccuaaucuacagccaacucaugacacugaaagacuucaaaugcuucaaccucaucccaaacgccaaaacauggauggauaucgaagggcgccccgaagaccccguagaaauagcacucuaccaacccucgagcggcugcuacguucacuucuuccgcgagcccacagauuuaaaacaguucaaacaggacgccaaauacucacacggucgcgacgucacagaccucuucgcagcccaaccaggccugacaagcgcuguaauagaagcccucccacgaaacauggucauaaccugccaaggaucagaagauaucagaaaacuacucgaaagccaaggccgacgggacaucaaacucauagacauaacccuaagcaaagcagauagcagaaaauucgaaaacgccguaugggaccaauucaaagaccucugccacaugcacacaggcguagucguggaaaagaagaaacgcggaggcaaagaagaaaucacaccucacugcgcacucauggacugcauaauguuugaugcugcggucuccggcggacucgaugcaaaaguacuccgaguuguccuacccagagacaugguauuccgcaccucaacacccaaaguaguacucuaa

SEQ ID NO: 9701 - RNA, 1710 nt, Artificial Sequence
  derived and/or modified CDS sequence (opt11) from LASV(ISTH2121-NIG-2012;Clade III)__AIT17541__NP
auguccgccuccaaagagguaaaauccuuccuauggacccaaucccuccgccgagaacuuagcggcuacugcagcaacaucaaacuacaagucguaaaagacgcccaagcacuacuucacggccuugacuucucagaagucucaaacguccaacgacucaugagaaaacaaaagagagaugacggcgaccuaaaacgccuacgcgaccucaaccaagcgguaaacaaucuagucgaacucaaauccacacaacaaaaaucgguacuccgcgucggcacccuguccucagacgaucuacucacccucgccgccgaccuagaaaaguuaaaaagcaaagucauccgcaccgaaagaccccugagcagcggaguauacaugggcaaccucagcucccaacaacuagaccaaagacgcgcucuuuuaaacaugauaggcaugaccucggaccgccaaggcgccucaaccggcagagacggcauaguaagaguaugggacgucaaaaacgcagaacuccucaacaaccaauucggcaccguacccucucuaacacucgccugccuaaccaaacaaggccaagucgaccucaaugacgcaguacaagcccucaccgaccucggucucauauacacggcuaaguaccccaacucaagcgaccucgaccgccugagccaaucccacccaauccucaacaugauagacaccaagaaaagcucccucaacauaagcggauacaacuucucccucggcgcagcugucaaagccggagccugcaugcucgacgggggcaacaugcucgagacuaucaaaguaagcccccaaacaauggacggcauccucaaaagcauacuaaagguaaaacgaagccuagggauguucgucucagacauuccuggcgaaaggaaccccuacgaaaacauccucuacaagaucugccuuucaggagacggcuggccauacauagcaucacgcaccucaaucaccggacgagccugggaaaacaccaucgucgaccuagaaucggacucgaagccacagaaaccaggcaacucaggauccaaccgaagccuccaaagcgccggcuucccagcaggccugaccuauucccaacucaugacccucaaagacucaaugcuccaacucgacccaaacgcgaaaacauggauggacaucgaaggacgcccagacgacccugucgaaaucgcacucuaccaaccauccagcggcugcuacauccacuuuuuccgugaacccaccgaccugaaacaguucaaacaagacgccaaauacucacacggcaucgacguuggcgaccuauucgccgcccaaccaggacucaccagcgcggugaucgaagcacucccccgcaacaugguuaucacaugccaaggauccgaagacaucaagaaacuccucgaaagccagggccggaaagacauaaaacugguagacaucuccauguccaaacccgacucccgcaaauuugaaaacgccgucugggaccaauacaaagaccuaugccacaugcacacaggcauaguaguagagaaaaagaaacgcggcggaaaagaagaaaucacaccacacugcgcacucauggacugcaucauguucgacgcagccguaguaggaggacuugacgcccgcauccuccgagccguccuaccccgcgacauggucuuccgcacauccacccccaaagucguacucuga

SEQ ID NO: 9702 - RNA, 1710 nt, Artificial Sequence
  derived and/or modified CDS sequence (opt11) from LASV(Nig08-A18;Clade III)__ADU56615__NP
augucagcaucgaaagaaguaaaauccuuccucuggacccagucccugaggcgagaacucagcggcuauugcucgaacaucaagcuccaggucgucaaagacgcucaagcccuccuacacggacuagacuucucggaaguaagcaacguccaacgccucaugcgaaagcaaaaacgagacgacagcgaccucaaacgccugcgcgaccucaaccaagccguaaacaaccucguagagcucaaaucaacacaacaaaagucaguccuacgaauaggcacccucagcagcgacgaccuccucauccucgccgcagaucuagagaagcucaaauccaaaguaguccgcaccgaacgcccacuauccuccggcauuuauaugggaaaccucagcagccaacaacuagaccaacgcaaagcccuccucaacaugaucggcaugacaggcggcaacggcggucgcaacgccaccucggacggaauaguucgcguaugggacgucaaaaacgcggaacuccucaacaaccaauucggaaccaugccaagccuuacccuagcaugccucacaaaacaaggacaagucgaccuaaacgacgcaguacaggcacucaccgaccucggccuaauauacacagccaaauaccccaauuccuccgaccuugaccgacuagcccaaucccaccccauccuaaacaugaucgacaccaagaaaucaagccuaaacaucucaggcuacaacuucucccuaggagccgccgucaaagcgggcgcaugcaugcucgacggcggcaacaugcuagagaccauaaaagucagcccccaaacaauggacggcauccuaaagagcauacucaaaguaaagcgcucccucggaauguucaucucagacacgccaggcgaacgcaauccauacgaaaacauccuuuauaaaaucugccuguccggagacggauggcccuacaucgcgucccgcaccucaaucguaggccgagcaugggaaaacaccgucgucgaccucgaaacagacaacaaaccccagaaaacgggcaacggcggaagcaacaaaucacuacaauccgccgguuucgccgccggccuuacuuacucccaacuaaugacccucaaagacuccaugcuacaacucgacccaaaugcuaagaccuggauggacaucgaaggccgccccgaagaucccguagaaauagcacuauaccaaccaguaucuggcugcuauauccacuucuucagagaacccacagaccuaaagcaauucaaacaggacgcaaaauacagccacggcaucgacgucaccgaccucuucgccgcccaacccggccucaccucagccgucauagaagcccuaccacgcaacauggugauaaccugccaaggcucagaagacauccgaaaacuacucgaaagccaaggacgccgugacauaaaacuaaucgacauaucccuauccaaagucgacucccgcaaauucgaaaacgccgucugggaccaauucaaagaucuaugccacaugcacaccggcaucgucguagagaaaaagaagcgcggcggcaaagaagaaauaacgccccacugcgcccucauggacugcaucauguucgacgcagccgucuccggcggaguagacgcaaagguccuccgcgccguccuccccagggacauggucuuccgcaccuccacaccaaaagugguccucuaa

SEQ ID NO: 9703 - RNA, 1710 nt, Artificial Sequence
  derived and/or modified CDS sequence (opt11) from LASV(Nig08-A19;Clade III)__ADU56619__NP
auguccgccucaaaagaggucaagagcuuccuauggacccaaucacuucgccgcgaacuuagcggcuacugcuccaacaucaaacuacaagucgucaaagacgcgcaggcccuccuccacggacucgacuucucagaaguauccaacguacaacgccugaugcgcaaacaaaaacgagacgacggcgaccucaaacgacuacgcgaccucaaccaagcaguuaacaaccuagucgaacucaaaagcacccaacagaaaagcguacuacgugucggcacgcuaagcagcgacgaccuacucguguuagccgcugaccucgaaaaacuaaaaucaaaaguaguccggaccgaacgcccacugagcagcggcaucuacaugggcaaccucucaucacaacaacuagaccaacgcaaagcacuacucaacaugaucggcaugacaggaggcaacggcggacgaaacacgaccuccgacggaauuguacgggucugggacgucaaaaacgcagagcuccuaaacaaucaauucggcacaaugccaucccuuacacuagcuugccucaccaaacaaggccagguagaccuaaaugaugccguacaagcccuuacagaccucggacucauauacaccgcaaaauacccuaacucaucagaccucgaccgacuagcacaaucacacccaauccugaacaugauagauaccaaaaaguccucccuuaacaucuccggauauaacuuuucccucggagcagccgucaaagcuggcgccugcaugcuggacggcggcaacaugcucgaaacaaucaaaguaagcccacaaacaauggacggaauccucaaauccauacuaaaaguaaaacgcucccuaggcauguucauauccgacacacccggcgaacgaaaccccuaugaaaacauacuuuacaagaucugccucucaggcgacggauggcccuacaucgcaucccggacauccaucguaggacgagccugggaaaacaccguagucgaccuggaaagcgacaacaagccccagaaaacaggcaacggcggcagcaacaagucccuccaaagcgccggcuucgcagcaggccuaaccuacucccaacucaugacacucaaagacagcaugcuccaacuagacccaaacgcaaaaaccuggauggauaucgaaggccggccagaagaccccguagaaauagcccuauaccaaccuagcucaggaugcuacauccauuucuuccgagaacccaccgaccuuaagcaauucaaacaggacgccaaauacagccacggcaucgacgucaccgaccucuucgccgcccaacccggccuaacaucagccgucauagaagcccuaccccgcaacauggucauaaccugccaaggauccgaagacauaagaaaacuccucgagucgcaaggccgccgagacaucaaacuaauagacaucucccuauccaaagucgacagccgcaaauucgaaaacgcagucugggaccaauuuaaagaccucugccacaugcauaccggcaucgucguagaaaagaagaaacgcggaggcaaagaagaaaucaccccacacugcgcucucauggacugcauaauguucgacgcggccguaucaggcggcgucgacgccaaaguccugagagccguccuucccagagacaugguauucagaaccuccacccccaaagucguccuauaa

SEQ ID NO: 9704 - RNA, 1710 nt, Artificial Sequence
  derived and/or modified CDS sequence (opt11) from LASV(ONM-299;Clade III)__ANH09735__NP
augagcgccaguaaagaagucaaaaguuuccuauggacccaaucgcuacgacgcgaacucuccggcuacugcuccaacauaaaacuacagguagucaaagacgcccaagcucuccuccacggccuugacuuuucugaaguaagcaacauccagcgccuaaugaggaaagaacgacgcgacgacuccgaccucaaacgacugcgcgaccuaaaccaagccgucaacaaccuaguagaacuaaagagcacccaacagaaauccguccuccgcguaggcacucuaucauccgacgaccuacucacccucgcagccgaccucgaaaaacucaaauccaaaguaauucgcacugaacgaccccuaucaagcggaguauacaugggcaaccuaucaacacaacaacuagaccaacgucgagcacuacuaaacaugauaggcaugacaaacggcggccaaggagccaacgcaggccgagacggcauuguccgcgucugggacgucaaaaaugccgaauuacucaacaaccaauucggaacaaugcccucccucacccucgcaugccucaccaaacaagggcagguagaccucaacgacgccguccaagcccucaccgaccugggcuuaaucuauaccgccaaauaucccaauagcucggacuuagaccgacucucccaaaaccaccccauacucaacaugaucgacaccaaaaagucaagccuaaacaucagcggauacaacuucucacucggagccgcugucaaagcaggagccugcaugcucgacggcggcaacaugcucgagaccaucaaaguaagcccccaaaccauggacggcauccucaaaucuauacucaaagucaaacgcucccucggcauguucgucuccgauacccccggcgaacgcaaccccuaugaaaacauauuauacaaaaucugucuauccggcgacggcuggcccuacgucgcauccagaaccuccauaauaggacgcgcuugggaaaacaccguugucgaccucgaaucagacagcaagccccagcgccccggauccaaagagucaaaccgcucucuccaaaccgccggguucccggccggccucaccuacagccaacucaugacccucaaggauuccaugcuccagcucgaccccaaugccaaaaccuggauggacauagaaggccgcccagacgaccccgucgaaaucgcacucuaucaaccaucaucgggcugcuacauacacuuuuuccgagaacccacagaccucaagcaauucaaacaagacgccaaauacagccacggcaucgacauaggagaccucuucgcagcccaacccggucucaccuccgccgucaucgaagcccuacccagaaacauggucauaaccugccaagggagcgaagacaucaaacgacuccuagaaucacaaggacgaaaggacauccggcucgucgacaucucccuuucuaaagcggacucacgcaaauucgaaaacgcagucugggaccaauucaaagaccucugcaacaugcacaccggagucguagucgagaagaaaaagaaaggagggaaagaagaaaucaccccgcacugcgcccucauggacugcauaauguucgaugcagccguaaugggaggccuagacgcaaaaguccuaagagcaguccuccccaaagacauggucuuccgaaccucgacuccucgcgucguccucuaa

SEQ ID NO: 9705 - RNA, 1710 nt, Artificial Sequence
  derived and/or modified CDS sequence (opt11) from LASV(ONM-314;Clade III)__ANH09737__NP
augagcgccagcaaagaagugaaaucguuccuauggacacaaagccucagacgcgaacugagcggauacugcagcaacauaaaacuacaggucgucaaagacgcacaagcacuacuccacgggcucgacuucuccgaagugucaaacauacaacggcuaaugcgcaaagaacgacgagacgacucagaccucaaaagacucagagaccuaaaccaagcagucaacaaccuaguagaacuaaaauccacgcaacaaaaauccguacugcgagugggcacucugucauccgacgaccuccuaacgcucgccgccgaccucgaaaagcuaaaguccaaagucauacgcacagaacguccccuguccucaggugucuacauggggaaccuauccacccaacaacucgaccaacgacgagcacuccucaacaugauuggcaugaccaacggaggccaaggcgccaacgccggacgagacggcauaguacgaguaugggacguuaaaaacgccgaacuccuaaacaaccaauucggcaccaugccaucacucacacuggccugccuaacaaaacagggacaagucgaccugaacgacgcagugcaagcacucacagaccuaggccuaauauauaccgcaaaguaccccaacagcagcgaccuagacaggcucucacaaaaccaccccauccucaacaugauagacacaaagaaaucaagccucaacaucagcgguuacaacuucucgcugggcgccgccgucaaagccggcgccugcaugcucgacgggggcaacaugcucgaaaccaucaaaguauccccacaaaccauggacggaaucuugaaaaguauucuaaaagucaaacgcucacucggcauguucgucagcgacaccccgggcgaacgcaacccauacgaaaacauacuauacaaaaucugccucagcggagacggauggccauacgucgccucccgaaccagcaucauagggagagccugggaaaacacagucgucgaccucgaaagcgacucaaaaccccaacgacccggaucaaaagaauccaaccgaucccuccaaaccgcaggauuccccgcaggucuaacauacagccagcucaugacccugaaagacagcaugcuacaacucgaccccaacgccaaaaccuggauggacaucgaaggccggccagacgacccagucgaaaucgcccucuaccaacccagcagcggaugcuacauacacuuuuucagggaacccacagaucucaaacaauucaaacaggacgcaaaauacagccacgguaucgacaugggggaccucuucgccgcacaacccggccuaacgucagccgucaucgaagcacuccccagaaacauggucauaaccugccaaggauccgaggacaucaaaagacuccucgaaagccaaggacgucgagacauacgccucguagacaucucccucagcaaggccgacucgaggaaauucgagaacgccgucugggaccaauucaaagaccucugcaacaugcacaccggcgucgucguagagaaaaagaagaaaggcggcaaagaagaaaucacaccccacugugcccucauggacugcaucauguucgacgccgccguuaugggaggccuagacgcgaaaguccucagagccgugcuacccaaagacauggucuuccguacguccacacccagaguaguccuguaa

SEQ ID NO: 9706 - RNA, 1710 nt, Artificial Sequence
  derived and/or modified CDS sequence (opt11) from LASV(ONM-700;Clade III)__ANH09739__NP
auguccgccuccaaagaagucaagagcuuccuauggacccaaucccuccgccgcgaacuaucuggauacugcucaaacauaaaacuccagguagucaaagacgcacaagcacuccuccacggccuagacuucuccgaagucuccaacauccaacgacugaugcgcaaagaacgucgagacgacucagaucucaaacgccuccgcgaccucaaccaagcugucaacaaccucguggaacucaaaucuacccaacaaaaauccguacuacgaguaggaacacucagcuccgacgaucuacuaacacucgcagccgaccucgaaaaacucaaauccaaagucauacgcaccgaaaggccccucucaucuggcgucuacaugggaaaccuaagcacgcaacaacucgaccaacgacgcgcacuacuaaacaugaucgguaugacguccggcggacagggagcuaacgcgggccgagauggcauaguccgcgugugggacgucaaaaacgccgaacuccucaacaaccaauuuggcaccaugccaucucuaacccuagcaugccuaaccaaacaaggccaaguagaccuaaacgacgccguacaagcucucacugaccuaggacuaauauauacugcaaaauacccaaacucaagcgaccuagacagacuaucccaaaaccaccccauccuaaacaugauagacaccaagaaaucaagccuaaacaucagcggcuauaacuucucucucggagcagccgucaaagcaggcgcauguaugcucgacgguggcaacaugcuagaaacaaucaaaguaucaccucaaaccauggacgggauccugaaaucaauccuuaaaguuaagcgcucccuaggcauguucguuuccgacaccccaggagaacgaaaccccuacgaaaacauccucuacaaaaucugccucagcggagacggcuggcccuacgucgccucgcgcaccuccauaauaggccgcgcaugggaaaacacaguaguggaccucgaaagcgacaguaaaccccaacgccccggcagcaaggaaagcaaccgcucgcuccaaacagccggauuccccgccggccucaccuacucccaacucaugacccucaaagacuccaugcuccaacucgacccaaaugccaaaaccuggauggacauagaaggccgacccgacgaccccgucgaaaucgcacucuaccaaccuucuucaggcugcuacauccacuucuucagagaaccaaccgaccuaaagcaauucaaacaagacgccaaauacucccacggcaucgacaucggcgaucuauucgcagcccaacccggucucacuagcgcaguaaucgaagcccuaccacgcaacauggucauaaccugccagggcuccgaagacaucaaacgacuccucgaaucccaaggccggcgagacauccgccucguggacaucucccucuccaaggcggacucccgcaaauuugaaaacgccgucugggaccaauucaaagaccuuugcaacaugcacaccgguguaguggucgagaagaagaagaaaggcggcaaagaggaaaucacaccccacugcgcucucauggacugcaucauguucgacgccgcagucaugggcggacucgacgccaaaguacuaagagccguccuacccaaagacauggucuuccgcaccuccaccccacgcgucguccucuaa

SEQ ID NO: 9707 - RNA, 1710 nt, Artificial Sequence
  derived and/or modified CDS sequence (opt11) from LASV(Weller;Clade III)__AAT49009__NP
augucugcaucuaaagaagucaaaucauuccuauggacccaaagccuccgccgcgagcucuccggcuacugcagcaacaucaaacuacaagucgucaaagacgcccaagcacuccuccacggccucgacuuuuccgaagucucuaacguacagcgccuaaugcgcaaacaacgacgcgacgacggugaccucaaaagacugcgcgaccucaaccaagcaguaaacaaccuuguagaacucaaaucaacccaacaaaaaucuguacuacgcgucggcacccuaaacagcgacgaccuccucguacuggccgcagaccuagaaaaacucaaaucaaagguaaucagaaccgaacgcccccucucauccggcaucuacauggguaaccuaucaucgcaacaacuagaccaacgacgagcccuucucaacaugaucgggaugacaggaggcaaccgcggaggcggcaccucauccgacggcaucguccgcgucugggacguuaaaaacgccgaacuccucaacaaccaauucggcacgaugcccagccuaacacuggcgugcuuaaccaaacaaggccaaguagaccucaacgacgccguccaagcacucacggacuuaggccucaucuacaccgccaaguaccccaacucaucagaccucgaccgccuagcccagagccaccccauccucaacaugaucgacaccaagaaauccagcuuaaacaucuccggauacaacuuuucccucggagccgccgucaaagccggcgccugcaugcucgacggcggcaacaugcucgaaaccauaaaagucucaccgcagaccauugacggcauccuaaaaacaauccucaaagucaagaaaucccucggaauguucauauccgacguccccggagaacgcaacccauacgaaaauauccuauacaaaaucugccuaucaggggauggcuggcccuauaucgcaagccgcacauccaucgucggccgcgccugggaaaacacagucguugaccucgaauccgacaacaaaccacagaagacgggcaacggcggauccaacaaaagccuccaaucugcaggcuucgcagcaggacucaccuacucacaacuaaugacgcucaaagacucaaugcuacaacuagaccccaacagcaaaaccuggauggacauagaaggccgacccgaagacccaguugaaaucgcccucuaccaacccaacagcggaugcuacauccacuucuuccgagaacccaccgaccucaagcaauucaaacaagacgcgaaauacucccacggaaucgacguaacagaccuauucgccgcccaacccggacuuaccucggccguaaucgaagcccuuccccgaaacauggucauuaccugccaagguuccgaagacauccgaaaacuacucgaaucccaaggccgccgcgacaucaaacucaucgacaucagccucaacaaagcagacagccgcaaauucgaaaacgccgucugggaccaauucaaggaccuaugccacaugcacaccgggguuguuguagagaaaaagaaacgcggaggaaaggaagaaaucacaccucacugcgcccucauggacugcaucauguucgacgccgccguaucaggaggccuagacgccaagguccuccgcgccguacucccccgagacauggucuuccgcaccagcacaccaaaagucguccuuuaa

SEQ ID NO: 9708 - RNA, 1710 nt, Artificial Sequence
  derived and/or modified CDS sequence (opt11) from LASV(BA366;Clade IV)__ADI39452__NP
augagcgugagcaaagaagucaaauccuuccuauggacacaaucacucagacgugaacuauccggauacugcucuaacaucaaacuccagguaguaaaagacgcacaagcccuccuacauggacucgacuucagcgaaguaagcaacguccaacgacucaugcgcaaacaacggcgcgacgauaacgaccucaaacgccuacgagaccucaaccaagccgucaauaaccuaguagagcucaaaagcacacaacaaaaaucuguccugcgggucggaacacucacaagcgaugaccuacuaauccucgcagcagaccucgaaaagcuaaaaaccaaagucacccgaaccgaacgcccccucucagccggagucuacaugggaaaccuguccucacaacagcucgagcagcgaagggcccuccuaaacaugauaggcaugaacggcggcaaccagggcguccaagcgggccgcgacggcgucguacgcguuugggacgucaaaaacgcagagcuacucaauaaccaguucggaacaaugccaucccucacccucgccugccucacgaaacaaggacaaguagacuuaaacgacgccguucaggcucuaaccgaccugggacuaaucuacaccgccaaauaccccaacacaucagaucuagaccgacucgcccaaucccacccaauccuaaacaugauagacaccaagaaaagcagccuaaacauauccggcuauaacuucucccuaggggcagcagucaaggcgggagccugcaugcucgacgggggcaacaugcuagaaaccauaaaagucagcccccaaaccauggacggcauccugaaauccauccucaaaguaaaacguacacuaggcauguucguauccgacacccccggcgaacgcaauccauaugaaaacauccuauacaaaauaugccucuccggcgacggcuggccauacauagcuucacgaacaucaaucacaggccgagccugggaaaacacaauaguagaccuagaauccgacggcaaaccccagaaagucggcaacaacggauccaacaaaucgcuacaaagcgccggauucaccgccggacugaccuacagccagcugaugacccucaaagacgccaugcuccagcucgaccccaaugcaaaaacuuggauggauauagaaggcagacccgaagacccagucgaagucgcacucuaccaacccuccucaggcugcuacauacacuucuuccgcgaacccaccgaccuaaaacaauucaaacaagacgcaaaauauagccacggcauagacgucaccgaccucuucgccgcgcagccgggacucacaucggccguaauagaagcccucccacgaaacauggucaucacaugccaaggcuccgaagacguacgcaaacuccuagaaucccaaggccgcaaagacauaaaacuaaucgacaucgcccuauccaaagcagacagccgcaaauacgaaaacgccgucugggaccaauacaaagaccuuugccacaugcacacaggaguaguagucgaaaagaagaaacgaggcggcaaagaggaaaugaccccgcacugcgcccuaauggacugcaucauguucgacgccgccguaagcggaggccucagcacgcaaguacugcgggccguccuaccaagagauauggucuuccgcaccagcaccccgaaagugguccucuaa

SEQ ID NO: 9709 - RNA, 1710 nt, Artificial Sequence
  derived and/or modified CDS sequence (opt11) from LASV(G1180-SLE-2010;Clade IV)__AIT17169__NP
augucagccagcaaagagaucaaauccuuccucuggacccaaucccuccggcgcgaacucagcgguuacugcagcaacauaaaacuacaagucgucaaagacgcccaagcccuccuccacggccuagacuucuccgaagucuccaacguccagcgccuaaugcgcaaagaacgacgagacgacaacgaccucaaacgacugcgagaucuaaaccaagcaguuaacaaccucguagaacuaaaaucaacucaacaaaaaucaauccugagggucggcacccuaaccagcgacgaccuccuaauccuugccgcugaccucgagaaacucaaaagcaaagucauccgaacggaacgaccacuaagcgccggcgucuacaugggcaaccuaucaagccagcaacucgaccaaagacgcgcauuacucucgaugaucggaaugagcuccggcaaccaacgagcacaagccggccgagacggcgucguacgagucugggacgucaaaaacguugagcuacuaaacaaccaauucggaaccaugccaucacuaacccucgccugccucacaaaacaaggccaaguagaccucaacgacgccguccaagcccucaccgaccucggacuaauauacacagcaaaguaccccaacaccagcgaccuggaccgucuaacccagucacaccccauacucaacaugauagacaccaaaaaguccucacucaacauauccggauacaacuucucccucggcgccgccgucaaagccggagcaugcaugcuagacggcggcaauaugcucgaaacaaucaaagucucaccccaaaccauggacggcauacucaaaagcauacucaaagucaagaaagcccucggaauguuuaucucugacacacccggcgaacgcaaccccuacgaaaacauacuauacaaaauuugccugucaggagauggauggcccuacauagccagucgaaccuccaucaccggccgcgcaugggaaaacaccgucguugaccuagaauccgacggaaaaccccagaaagcaggcuccaauaacuccaacaaaagccuucaaagcgucggauucacagcgggccucaccuacucacaacuaaugacacuaaaagacgccaugcuccaacucgacccaaacgcuaaaaccuggauggacaucgaaggccgccccgaagacccaguagaaaucgcccucuaccagccuuccuccggcugcuacauccacuucuuccgagaacccaccgaccuaaaacaguucaaacaagacgccaaauacucccacggcaucgacgucacagaccuguucgccgcccaaccaggccucacgucugcaguaaucgacgcacugccccguaacaugguaauaaccugccaaggcucagacgacaucagaaaacuucuagaaucacaaggccgaaaagacaucaaacucaucgacaucgcccucuccaaaaccgacuccagaaaauacgaaaacgccguaugggaccaauacaaagacuuaugccacaugcacaccggaguagucgucgaaaagaagaaacgcggcggcaaagaagaaaucaccccacacugcgcacucauggacugcauuauguucgacgccgccgucucuggaggacuaaacaccucaguccucagagccguccucccuagagacaugguauuucgaaccagcacaccccgagucguccuauaa

SEQ ID NO: 9710 - RNA, 1710 nt, Artificial Sequence
  derived and/or modified CDS sequence (opt11) from LASV(G1190-SLE-2010;Clade IV)__AIT17173__NP
auguccgccagcaaagaaaucaaauccuuccucuggacccaaucacuccgaagagaacuaagcggcuacugcucaaacaucaaacuacaagucgucaaagacgcgcaagcacuccuacauggacuugacuuuuccgaagucuccaacguccaacgccucaugcgcaaggaacgucgcgacgacaacgaucucaaacgccuacgcgaccuaaaccaagccgucaacaaccuagucgaacugaaauccacacagcaaaaguccauccuccgggucggcacacuaaccuccgaugaccugcucauccuagcagccgaccucgaaaaacuaaaauccaaagucacacgcacagaacgcccacucuccgcaggagucuacaugggaaaccucagcucccaacaacucgaccaacggcgagcccuacuuaacaugauaggaaugucgggcuccaaccaaggagcccgcgccggccgcgauggcgucguacgaguuugggacgucaaaaacgccgagcuccucaacaaccaguucggcacaaugccaagccucacacuagccugccucacaaaacaaggacaagucgaccuaaacgacgccguacaagcccucaccgaccucggacuaaucuacacagccaaauaccccaacaccucagaccuagacaggcucacgcagagccaccccauacucaacaugaucgacaccaagaaaucuucacuaaacauauccggcuacaauuucucccucggcgccgcaguaaaagccggggccugcaugcucgacggcggcaacaugcucgaaaccaucaaagucucaccccagacgauggacggcauccuaaaauccauccugaaagucaagaaagcccucggaauguucaucucggacgcacccggagaaagaaaccccuacgaaaacauccucuacaaaaucugucucucaggagacggcuggccauacaucgccucgcgaaccagcaucacaggacgagccugggaaaauaccgucgucgaccucgaaagcgacggaaaaccacaaaaagccggcucaaacggaagcaauaaaucacuucaauccgccggauucaccgccggucugaccuacucccaacucaugacccucaaagacgcaaugcuccaacucgaccccaacgccaagaccuggauggacauagaaggaaggcccgaagaucccguggaaauagcccuauaccaacccagcuccggcugcuacauccacuucuuucgcgaacccaccgaccucaaacaauucaaacaagacgccaaauacucacacggcaucgacguaaccgaccuauucgcagcccagcccggccucacauccgccgucaucgacgcccugccccgcaacaugguaauaaccugccaaggcucagacgacauccgcaaacucuucgaaucacagggucgaaaagacauaaaacuaauagacauagcccuaagcaaaaccgacagccgcaaauacgaaaaugccgucugggaccaauacaaggaccucugccacaugcacaccggaaucgucgucgaaaagaagaaacgcggcggaaaagaagaaaucacgccccauugcgcccucauggacugcauaauguucgacgccgccguauccggcggccucaacaccucuguccuacgggcuguccucccacgcgacaugguuuucagaaccuccaccccacggguaguccuauaa

SEQ ID NO: 9711 - RNA, 1710 nt, Artificial Sequence
  derived and/or modified CDS sequence (opt11) from LASV(G1200-LIB-2010;Clade IV)__AIT17177__NP
auguccgcauccaaagaaaucaagagcuuccuauggacccaaucccuccgacgagaacuauccggcuacugcucaaacaucaaacuccaaguagucaaagacgcccaagccuuacuacacgggcucgacuucagugaagucuccaacguucaacgccugaugcgcaaacagcgcagagacgacaacgaccuaaaacgccuccgagaccucaaccaagccgucaacaaccucguugaacuaaaaucuacccaacagaaaagcguacuccgcgucggcacucuaacgagcgaugaccuucuuguccuagcugcggaccucgaaaaacuaaaaagcaaaguuaucagaaccgaacgcccccucuccgcagguaucuauaugggcaaccucuccucccagcaacucgaucaacgacgcgcccuacucaacaugaucggcaugagcggcggcaaccaaggagcccgcgcgggccgcgacggcgugguacgaguaugggauguaaagaacgccgaccuccucaacaaccaauucggcaccaugccaucauuaacccuagccugccuaaccaaacagggacaagucgaucucaacgacgucguacaagcccuaacagaccugggacuaaucuacaccgccaaauacccaaacacuagcgaccuagacaggcucacacaaagccaccccauacuaaaaaugaucgacgcaaauaaaucaagccucaacauaucuggcuacaacuucucccuaggcgccgccgucaaagcuggcgcaugcaugcuugacggcggcaacaugcuugaaacaaucaaagucuccccacagaccauggacggaauccuaaaauccauacucaaagucaagaaaucccuagguauguuuauaagcgacacccccggcgaacgaaauccauacgaaaacauccucuacaaaauaugccuuaguggagacggcuggccauacauagccucacgcaccuccauaaucggccgcgcaugggaaaacacagucguugaccucgaauccgacggcaaaccccagaaaaccggcagcaacaacaguuccaaaagccuccaauccgcaggcuucgcagccggacucacauacagccaacucaugaccuuaaaagacgccaugcuucaacuagacccaaacgcuaaaaccuggauggacauagaaggaagaccagaagaccccguagaaaucgcccucuaccaaccaagcuccgggugcuacauccacuuuuuccgcgagcccaccgaccuaaaacaauucaaacaagacgcaaaauacucccacggcaucgacguaaccgaccuauucgccgcacaacccggccugacuucggccgucauagaagcccuaccccgaaacaugguuauaaccugccaaggcuccgacgacauccgaaaacuccuagaaucccaaggccgaaaagacaucaaacucaucgacaucgcacugucaaaaacggacucacgaaaauacgaaaacgccgucugggaccaguacaaggaccuaugccacaugcacacgggaaucguagucgaaaagaagaaacgcggcggaaaagaagagaucacaccccacugcgcccuaauggacugcaucauguuugacgcagcaguauccggcggccucaacacccuaguccuccgcgcaguccucccccgcgacauggucuuccgaacaucaacuccaaaagucguacuauaa

SEQ ID NO: 9712 - RNA, 1710 nt, Artificial Sequence
  derived and/or modified CDS sequence (opt11) from LASV(G1442-SLE-2011;Clade IV)__AIT17181__NP
auguccgccagcaaagaagucaaauccuuccuauggacccaaucacuccgccgcgaacuuagcggcuacugcucaaauauaaaacugcaagucgucaaagacgcucaagcccuccugcacgggcucgauuucucagagguauccaacguccaacggcuaaugcgcaagcaacgacgggacgacaaugaucucaaaagacuccgcgaccugaaccaagccgucaacaaccuugucgagcucaaauccacucaacagaaaaguguacuccgcgucgguacacucaccucggacgaccuucuaguacuagcagcugaccuagaaaaacuaaaauccaaagucauccgcaccgaacgcccccucagcgcaggcgucuauaugggcaaccucuccucccaacaacucgaccaaagacgagcacuccucaacaugaucgguaugagcggaggcauccaaggcacacgaaccggccgagacggcgucguccgaguaugggacgucaaaaacgccgaccuacucaacaaccaauucggaaccaugcccucccuaacacuagccugccucaccaagcaaggacaaguagaccucaaugacgucguccaagcccucacagaccucggccuaauauacaccgcaaaauaccccaacgccagcgaccucgacagacuaacccaaucccaccccauccuaaacaugaucgacacaaagaaaagcagccucaacaucuccggcuacaacuucucacuaggcgccgccgucaaagcaggagcaugcaugcuggauggcggcaacaugcucgaaacaaucaaagucucaccacaaacaauggacgguauccucaaauccauacuaaaagucaagaaaacucugggaauguucauauccgacacucccggagaacgcaaccccuaugaaaacauccuauacaaaaucugccugucaggagacggcuggcccuacaucgcuucccgaacaagcaucacaggacgcgccugggaaaacacaguuguagaccucgaaagcgacggcaaaccacaaaaagccggaucaaacaacucaaacaaaucccugcagagcgcgggcuucgccgccggucuaaccuauagccaacuaaugacccucaaagacgccaugcuccaacuggauccaaacgccaaaaccuggauggacauagagggccgccccgaagacccagucgagaucgcccuauaucaacccagcucaggcugcuacauccacuucuuccgcgaaccaacagaccucaaacaauucaaacaagacgccaaauacucucacggcauagacgucacagaucuauucgccgcacaaccaggacuuaccucagccguaauugaagcccucccccgcaacauggucauaaccugccaaggauccgacgacaucaagaaacuccuagaaucacaaggccggaaagauaucaaacuuaucgacauagcgcuaucaaaaacagacuccagaaaguacgaaaacgcagucugggaccaguacaaagaccucugccacaugcauaccggcgucgucgucgaaaagaagaaaagaggcggaaaagaggaaaucacgccccacugcgcccucauggacugcauaauguucgacgcagccgucagcggcggacucaacacccuaguccuccgcgccguacucccccgcgacaugguauuccguacauccacuccacgcguaguccuauga

SEQ ID NO: 9713 - RNA, 1710 nt, Artificial Sequence
  derived and/or modified CDS sequence (opt11) from LASV(G1529-SLE-2011;Clade IV)__AIT17185__NP
auguccgcaucaaaagaaauaaaauccuuccuauggacccaaucccuccgaagagaacuauccggcuacugcucaaacaucaaacuccaaguagucaaagacgcccaagcccuccuacacggacuagauuucucagaagucagcaacguccagcgccugaugagaaaacaacgccgcgacgacggcgaccucaaacgccuccgcgaccucaaccaagcaguuaacaaccucgucgaauugaaaagcacacaacaaaaaucaguacuccgggucggcacccuaaccagcgacgaccuacucauacucgccgcagaccuagaaaaacuaaaaucgaaagucacccgaaccgaacgaccccucuccgccggcgucuacaugggcaaccucuccucccaacaauuagaccaaagacgagcccuacuaaacaugaucgguaugucagggggcaaccgaggagcacgcaccggaaaagacggcgucguccguaucugggacguuaaaaacgccgaccuacugaauaaccaauucggcaccaugcccagccucacccuggccugccucacaaaacaaggacaaguggaccucaacgacgucguacaggcacuaacagacuuaggccugaucuacaccgcaaaauaccccaacaccagcgaccucgauagacucacccaaucgcaccccauccucaacaugauagacaccaacaaauccuccuuaaacauauccggauacaacuucucacucggagcagccgucaaagcaggcgcguguaugcuagacggaggcaacaugcuagaaacaauaaaagucucaccacagaccauggacggaauccuaaaauccauucucaaaguaaagaaaucacuaggaauguucaucucagauacccccggcgaacguaaccccuacgaaaacauccucuacaaaauaugucuauccggcgacggguggccauacauagccucccgcaccagcauaaccggccgcgccugggaaaacaccguagucgaccuagaguccgacgaaaaaccgcaaaaagcaggcucgaacaacagcaacaaaucccuacaaagcaccggcuucaccgcaggccucaccuacucgcaacuaaugacacugaaagacgccaugcuacaacucgaucccaacgccaaaacauggauggacaucgaaggccgacccgaagaccccguagagaucgcauuauaucaacccagcuccgggugcuacauacacuuuuuccgcgaaccgaccgaccucaaacaauuuaaacaagacgccaaauacucccacggaaucgacgucaccgaucucuucgccgcccaaccgggacucaccuccgccgucauagacacccuaccccggaacauggucauaaccugccaaggcagcgacgacauccgcaaacuacuggaaagccaaggccgcaaagacaucaaacucaucgauaucgcccucagcaaaacugacucacgaaaauacgaaaacgccgucugggaccaauacaaggaccugugccacaugcacaccggcgugguagucgaaaagaagaaacgcggcggaaaagaagaaauuacuccccacugcgcccucauggacuguaucauguucgacgccgccguaagcggaggacugaacgccuccguacuaagagccguccucccacgagacaugguguuccgcaccagcaccccaagagucguacucuga

SEQ ID NO: 9714 - RNA, 1710 nt, Artificial Sequence
  derived and/or modified CDS sequence (opt11) from LASV(G1618-SLE-2011;Clade IV)__AIT17189__NP
augagcgcaagcaaagaaaucaaauccuuccucuggacacaaucccuccgccgcgaacucucaggcuacugcaguaacaucaaauuacaaguugucaaagacgcacaagcacuccuccacggccucgauuucucagaggucagcaacguacaacgacuaaugcgaaaagaacgucgcgacgacaacgaccuaaaacgacuccgugaccucaaccaagcugucaacaaccucgucgaacugaaaucaacccagcaaaaaucaguccuccgcgucgggacccuaacauccgacgaccuccugauccuagcugccgaccuagagaaacuaaaauccaaagucacccgcacagagcguccccuauccgccggaguguacaugggcaaccuaagcucccaacaacuagaccaacgccgagcucuccucagcaugauaggcauguccggggguaaccaaggagcccgcaccggcagagacggagucguccgaguaugggacgucaaaaacgccgaauuacucaacaaccaauucggcaccaugcccucccucacccucgccugucucacaaaacaaggacaagucgaccuaaacgacguaguccaagcacucaccgaccucggccuuauauacaccgccaaauaccccaacaccucagaccuggaccgcuuaacacagucccaccccauacucaacaugaucgacaccaagaaauccucacucaauaucuccggcuacaacuucucccucggagccgcugucaaagcaggagccuguaugcuagacggaggcaacaugcuagaaaccauaaaagucagcccccaaacuauagacggcauccucaaauccauacucaaagucaagaaggcucucggcauguucaucucagacacccccggggaaagaaaccccuaugaaaacauacuuuacaaaauaugccucuccggugacggcuggccauacaucgcaucgcgaaccuccaucaccggccgcgccugggaaaauaccgucguggaccucgaauccgacggcaaaccccaaaaggcaggcuccaauaauucuaauaaaucacuccaauccgccggauucacagccggucucaccuacucacaacuuaugacccucaaagacgcgaugcuacaacucgaccccaacgccaagaccuggauggacaucgaaggccgcccagaagaccccgucgaaaucgcacucuaccaacccuccuccggcugcuacauacacuucuuccgcgaacccaccgaccucaaacaguucaaacaagacgccaaauacucccacggcaucgacguaacagaccuauucgcagcgcaacccggccuaacaucagcagucaucgacgcccucccccgaaauauggugauaaccugccaaggcucagacgacauccgaaagcuacucgaaagccaaggccggaaagacauaaagcuaaucgauauagcccuauccaaaacugacucacgcaaauacgaaaacgcagucugggaccaauacaaagaccucugccacaugcacaccggggucguggucgaaaagaagaaacguggaggaaaagaagaaaucaccccacacugcgcacucauggacugcaucauguucgaugccgcaguauccgguggacucaacucccuaguccuccgagccgugcucccccgagauaugguauuccgaaccagcacaccccgcgucguccucuaa

SEQ ID NO: 9715 - RNA, 1710 nt, Artificial Sequence
  derived and/or modified CDS sequence (opt11) from LASV(G1646-SLE-2011;Clade IV)__AIT17193__NP
augagcgccuccaaagaaaucaaaucauuccucuggacccagagccuccgccgagaacucucggguuacugcucuaacauaaaacuacaagucguaaaagacgcccaagcacugcuacacggccucgacuucucagaagucucuaacguccaacgucucaugcgcaaagaacgccgcgacgacaacgaccucaaacgccuccgcgaccuaaaccaagccgugaacaaccuaguggaacucaaauccacacaacaaaaauccguacucaggguaggcacucuaaccagcgacgaucuacucauacucgcagccgaccuagaaaaacuaaaaucaaaagucacccgaaccgaacgcccccucagcgccggcgucuacaugggcaaccucucgucacagcagcuagaccaacgcagagcccuacucuccaugaucggcauguccggaggaaaccaaggcgcccgcaccggccgcgacggagucguacgaguaugggacgucaaaaaugcagaacuccucaacaaccaauucggaaccaugcccagccucacccucgccugccuaacuaaacaaggacaaguagaccuuaacgacgcaguccaagcccuuaccgaccucggacuaaucuacaccgcuaaauaccccaacacauccgaccuugacagacucacacaaucacaccccauccuaaacaugaucgacaccaagaaauccucacuaaacaucagcggcuacaacuucagccucggcgccgccgucaaagcaggcgccugcaugcucgacggcggaaacaugcuagaaacaauaaaagucuccccacaaaccauggacggcauacucaaaucaauacucaaagucaagaaagcgcuagguauguucaucuccgacacacccggcgaacgcaaccccuaugaaaacauccuauacaaaauuugccucucaggcgacggcuggcccuacaucgccagccgaaccucaauaacgggacgcgcgugggaaaacacaguagucgaccuagaaagcgacggaaaaccccaaaaagcaggaaacaacaacagcaacaaaucccuacaauccgccggguucaccgccgggcucaccuauucccaacucaugacccucaaagacgcuaugcuccaacucgaucccaacgccaaaacauggauggacauagaaggcagacccgaagacccagucgaaaucgcucucuaccaacccagcagcggauguuacauacacuucuuccgagaaccuacagaccuaaaacaauucaaacaagacgccaaauacucacacggcaucgacguaaccgaccuguucgcagcccaacccggccuaaccuccgccguuaucgacgcccucccccgaaacauggucaucacaugccaaggaucagacgacauccguaaacuccucgaaucacaaggccgcaaagacaucaaacuuaucgacauagcacuaucaaaaaccgacucacguaaauacgaaaacgcaguaugggaccaauacaaagaccucugccauaugcacaccggcgucguaguagagaaaaagaaacgaggaggcaaagaagaaauaacaccacacugcgcccucauggauugcaucauguuugacgccgccguaagcggcggccucaacucccuaguccuccgagccguucucccacgcgacaugguauucaggaccucaaccccaagagucguccucuga

SEQ ID NO: 9716 - RNA, 1710 nt, Artificial Sequence
  derived and/or modified CDS sequence (opt11) from LASV(G1647-SLE-2011;Clade IV)__AIT17197__NP
auguccgcuucgaaagaaaucaaaucauuccucuggacccaaagccuccgccgagaacucucuggcuacugcucuaacauaaaacuccaagucgucaaagacgcccaggcacuccuccacggccucgacuucucugaagucuccaacguccaacgacucaugcgaaaagaacgccgagacgacaacgaccugaaacgccucagagaccuaaaccaagcagucaacaaccuagucgaacucaaauccacccaacaaaaauccauacucagagucggcacccugaccucagacgaccuccuuauacuagcagccgaccuagaaaaacucaaauccaaagucauccgaacagaacgaccccuguccgccggcgucuacaugggcaaccuuucacuccaacaacuagaccaacgccgcgcacuccuaaacaugaucggaaugucaggcuccaaccaaggaguccgcgcaggccgcgauggcgucguccguguaugggacguaaagaacgccgagcuccugaacaaccaauucggcacaaugccuucccucacccucgcaugccuaacaaaacaaggccaagucgaccuuaacgaugccgugcaagcccucacggaccuaggacucaucuacaccgcuaaauacccaaacaccucagaccuagacagacuaacacaaucccacccaauccucaacaugaucgacaccaagaaaucaucccuaaacauaagcggcuacaacuucucacuaggugcagccgucaaagcaggcgcaugcaugcucgacggaggcaacaugcuugaaaccaucaaagucucaccccaaaccauggacggaauacuuaaaagcauccuaaaagucaagaaagcacucggcauguuuaucucagacacgccaggcgaacgcaaucccuacgaaaauauccucuauaaaauaugccucuccggagacggauggccauacaucgccucccgaaccucaaucaccggccgcgcaugggaaaacacggucguugaccucgaaucagacgguaaaccacaaaaagccggaucaaauggaucaaauaaaucccuccaauccgcuggguucaccgcaggucuaaccuacucacaacucaugacccugaaagacgcgaugcuccaacuggaccccaacgccaaaaccuggauggacaucgaaggccgcccagaagaccccguugaaaucgcucucuaccaacccagcuccgguugcuauauacacuucuuccgcgaacccaccgaccucaaacaauucaaacaggacgcaaaauacucacacgguaucgaugucacagaucucuucgccgcccaacccggccuaaccucggccgucaucgacgcccucccccgcaacauggucauaaccugccaagggagcgacgacauccgaaaacuacuugaaucacaaggacgcaaagacaucaaacuaaucgacaucgcccuauccaaaaccgacuccagaaaauacgaaaacgccgugugggaccaauacaaagaccuaugccacaugcacaccgggauaguggucgagaaaaagaaacgcggaggaaaagaagaaaucacaccccacugcgcccucauggacugcaucauguucgacgcggccgucagcggcggccuaaacacgagcguccuccgagccguccucccccgcgauauggucuuuagaacguccacaccccgaguaguccuauaa

SEQ ID NO: 9717 - RNA, 1710 nt, Artificial Sequence
  derived and/or modified CDS sequence (opt11) from LASV(G1727-SLE-2011;Clade IV)__AIT17201__NP
augucagccucaaaagagaucaaaucauuccucuggacacagucccuacggagagagcuaucaggcuacugcuccaacaucaaacuccaaguugucaaagacgcacaagcacuccuccacggccuggacuucuccgaaguaagcaacguccaacgccucaugcgcaaagaaagacgcgacgacaacgaccuaaaacgccuccgcgaccucaaccaagccgucaacaaccuaguagaacucaaaagcacccaacagaaaagcauccuccgagucggaacacuaaccuccgacgaccuacucauccucgccgcagaccuagagaaauuaaaauccaaagucacccgcaccgaaagaccccucucagcaggcgucuacaugggcaaccucuccucacaacaacucgaccaacgcagagcccuucugaacaugaucggcaugucaggaucaaaccaaggcgcacgcgcaggacgcgacggcguaguacgcguaugggacgucaaaaacgccgaacuccucaacaaccaauucgggacaaugccaucccuaacccuagccugcuugacaaaacaaggacaaguugaccuaaacgacgcagugcaagcucucaccgaccucggucuaaucuacacagccaaauaccccaauaccuccgaccuagaccgccucacccagagccaccccauccuaaauaugauugauaccaagaaaucaucccuaaacaucucgggcuacaacuucucccuaggcgccgcagucaaagccggcgccugcaugcucgauggaggcaacaugcuggaaacaaucaaagucagcccccaaaccauggacgggauccucaaauccauccucaaagucaagaaagccuuaggcauguucaucuccgacgcccccggagaacgcaacccauacgaaaacauccucuacaaaauaugccuauccggugacggauggccauauauagccagcagaaccucuaucacaggacgagccugggaaaacacaguagucgaccucgaaucagacggcaaaccacaaaaagccggaucaaacggcuccaacaaaucccuccaaagcgccggcuucaccgcaggucucaccuacagccagcucaugacccucaaagacgcaaugcuacaacucgaccccaacgccaaaaccuggauggacauagaaggucgacccgaagaccccgucgaaaucgcacucuaccaacccagcagcggcuguuacauccacuucuuccgcgaaccgaccgaccugaaacaauucaaacaggacgcaaaauacagccacggaaucgacgucaccgaccucuucgcagcacaaccaggccucacaagcgccgucaucgacgcacucccaagaaauaugguaauaaccugccaaggauccgacgacauuaagaaacucuucgaaucucagggccgaaaagacaucaaacuaauugacauagcccuuucuaaaaccgacucccguaaauacgagaacgcagucugggaccaauacaaagaccugugccacaugcacaccggcauagucguugaaaagaagaaaagaggcggaaaagaagaaaucacaccccacugcgcucuaauggacugcaucauguucgacgccgccgucagcggaggccucaacaccucaguccugagggcaguccuaccacgugacaugguauuccgcaccuccacaccccgcguuguacuauaa

SEQ ID NO: 9718 - RNA, 1710 nt, Artificial Sequence
  derived and/or modified CDS sequence (opt11) from LASV(G1774-SLE-2011;Clade IV)__AIT17205__NP
augucggcaucaaaagaaaucaagagcuuccucuggacacaaucccuccgacgcgaacucucuggauacugcucaaauaucaaacuccaggucgucaaagacgcccaagcccuucuacacggauuagacuucuccgaaguaucaaacguccaaagacucaugcgcaaagaacgccgcgacgacaacgaccucaaacgacuacgcgaccuuaaccaagccgucaacaaccugguugaacuuaaauccacccaacaaaaauccauccuccgcguuggcacacucaccucagacgaccuucucauccuagccgccgaccucgaaaaacuaaaaucgaaaguaacccgcacugaacgaccccucucggccggugucuacaugggcaaccuaagcagccaacaacucgaccaacggaaagcacuccuaaauaugaucggcaugagcggcagcaaccaaggcgccagaaucggccgggacggagucguccgcgucugggaugucaaaaacgcagaacuccuaaacaaucaauucggaaccaugcccagccuaacccuagccugccucacgaagcaaggacaaguagaccucaacgacgcaguccaagcacuaaccgaccucggccugaucuacacggcaaaauaccccaacaccuccgaccuagaccgccucacacaaucacaccccauccugaacaugaucgacaccaagaaaucuucucuaaacaucuccggcuacaacuucucacucggcgccgccguaaaagccggcgcaugcaugcuugacggcggcaacaugcuggaaaccauaaaagucaguccccaaacuauggacggcauccucaaaagcauccucaaagucaagaaagcccucggcauguuuaucuccgacacccccggagaacgcaaccccuacgaaaauauccucuacaaaauaugucucuccggcgacggcuggcccuacaucgccucccgcacaucaaucaccggccgcgccugggaaaacaccgucgucgaccucgaauccgacggaaaaccccaaaaagcaggcuccaacuccagcaacaaauccuuacaaagcgccggccuaacagccggacuaaccuacucccaacuaaugacccuuaaagacgcaaugcuacaacuggaucccaacgccaaaacauggauggacauagaaggacgcccagaagaccccgucgagaucgcucuauaccaaccaucuagcggcugcuacauacacuucuuucgcgagccaaccgaccucaaacaauucaaacaagacgcaaaauacucacacggaaucgacguaaccgaccucuuugcagcccaacccggccuaacaucagcugucaucgacgcccucccgagaaaccuugucauaaccugccaaggaucagacgacauccggaaacugcucgaaagccaaggccgaaaagacaucaaacucauagacaucgcacuguccaaaacagauucccguaaauacgaaaacgcugucugggaccaauacaaagaccucugccacaugcacaccggaaucguugucgaaaagaagaaacgaggcggcaaagaagaaaucaccccacacugcgcacucauggacugcaucauguucgacgccgcaguaagcggcggacucaacgccuccguccuaagggccguccuuccaagagacauggucuuucgcacaucaacaccccgcguaguccuauag

SEQ ID NO: 9719 - RNA, 1710 nt, Artificial Sequence
  derived and/or modified CDS sequence (opt11) from LASV(G1792-SLE-2011;Clade IV)__AIT17209__NP
augagcgcguccaaagagaucaaauccuuccucuggacccaaucccuccgucgcgagcucuccggauauugcucgaacaucaaacuacaagucgucaaagacgcgcaagcacuacuacacgggcuugauuucuccgaagucuccaacguacaacgcuuaaugcgcaaagagagacgcgacgacaacgaccucaaacgccuccgcgaccuaaaccaagccgucaacaaccucguugaacucaaaucaacacaacaaaaauccauacugcgcgucggcacacucacaucagacgaucuacucauacucgccgccgaccucgaaaaacucaaaucaaaaguaacccgaacagaacgaccccuauccgccggagucuacaugggaaaccucagcagccaacaacuggaccaaagacgagcccuucucagcaugaucggcauguccggaggcaaccagggcgcccgcgccggcagggauggcgucguccgcguaugggacguaaaaaacgcugaauuacucaacaaccaauucggcaccaugcccuccuuaacccucgccugccuaaccaaacaaggacaagucgaccucaacgacguaguccaagcccuaaccgacuuaggacucauuuacacagccaaauaccccaauacauccgaccucgaccgccucacacaaucccaccccauccuaaacaugauagacaccaaaaaauccagccuaaauaucucaggauacaacuucucccuaggggccgccguaaaagcaggagccugcaugcuagacgguggcaacaugcucgagaccauaaaagucuccccccaaacaauggacggaauucucaaauccauccucaaagucaaaaaagcacucggaauguucauaucagacacacccggcgaacgcaaccccuacgaaaacauacucuacaaaaucugccucuccggcgacggauggcccuacauagccagccguaccagcauaacaggcagggccugggagaacaccguagucgaccucgaaagcgacggcaaacuacaaaaaacaggaagcaacaacuccaacaaaucacuacaaagcgcaggcuucaccgccggccugaccuacucccagcucaugacccugaaagacgccaugcuacaacucgaccccaacgccaaaaucuggauggacaucgagggccgacccgaagauccggucgaaaucgcacucuaccaaccguccuccggaugcuauauccacuucuuccgagagcccacugaccuaaagcaauucaaacaggacgccaaguacagccacggcaucgacgucaccgaccuuuucgccgcccaaccgggacucaccuccgccguaaucgacgcccuucccagaaacauggucaucaccugccaaggauccgacgacauccgcaaacuacuagagucccaaggccgcaaagacaucaaacucaucgacaucgcucucaacaaaacagacucccgcaaauacgaaaacgccgucugggaccaauacaaagaccucugccacaugcacacaggcguagucgucgaaaaaaaaaaaaaaggcggaaaagaggaaaucacuccccacugugcccuaauggacugcaucauguucgacgcagcugucuccggaggccuaaacacguccguacuccgcgccguccucccccgcgacaugguauuccggacuucaacaccucgcgucguccucuaa

SEQ ID NO: 9720 - RNA, 1710 nt, Artificial Sequence
  derived and/or modified CDS sequence (opt11) from LASV(G1897-SLE-2011;Clade IV)__AIT17211__NP
augagcgcuagcaaagaaauaaaauccuuccucuggacucaaucccuccgacgugaacuaucaggcuacugcucaaacaucaaacuacaaguagucaaagacgcacaagcacuccuccacggacucgacuuuucagaagucuccaacguccaacgccuaaugcgcaaagaacgccgggacgauaacgaccucaaacgccuccgcgaucuaaaccaagcagucaacaaccuaguagaacuaaaaagcacacaacaaaaauccauccuccgcguaggaacccucaccagcgacgaucuacuaauacucgccgccgaccucgaaaaacucaaaucuaaaguaaccagaacagaacgcccccuaucugcgggaguauacaugggcaacuuaagcucucaacaacuagaccaacgacgggcccuccucaauaugaucggaaugucaggcggcaaccaaggagcccaagccggccgugacggagugguccgcguaugggacgucaaaaacgcagaacuccucaacaaccaauucggcacaaugcccucccucacacucgccugccucacaaaacagggacaggucgaccucaacgacgccguccaagcccuaacagaccucggacucaucuacaccgccaaauacccuaacacuuccgaccucgaccgacucacccaaucgcacccaauccucaacaugaucgacaccaaaaaauccucccucaacauauccggcuacaacuucucccuaggcgccgcagucaaagccggcgccugcaugcuagacggcggcaacaugcucgaaacgaucaaaguaucaccccaaacaauggacggaauccucaaauccauacucaaagugaagaaagcccucggaauguucauauccgacaccccaggcgaacgaaaccccuaugagaacauccucuacaaaaucugccucuccggcgacggcuggccauacauagccucacgcaccucuauaaccggacgagcuugggaaaacaccguaguagacuuagaauccgacggcaaaccccaaaaagccaacucaaacuccuccaacaaaucccuacaaucagccggauucaccgcaggccucaccuacagccaacucaugacccucaaagacgcuaugcuacaacuagaccccaacgccaaaaccuggauggacaucgagggacgccccgaagaccccgucgagauagcacuauaccagccaagcagcggcugcuacauccacuucuuccgggaacccacggaccuaaaacaauucaaacaagacgcaaaauacagccacggaauagacguaacagaccucuucgcagcccaacccggccucaccagcgcagugaucgacgcacuaccucgaaacaugguaaucaccugucaaggcucagacgacauccgcaaacuacuugaaagucaaggccgcaaagacauaaaacuaaucgacaucgcacuuagcaaaaccgacucacgcaaauacgaaaacgccguaugggaccaauacaaagaccucugccauaugcacacgggcaucguagucgaaaaaaaaaaacggggcggaaaagaagaaaucaccccacacugcgcacucauggacugcauaauguucgacgccgcagucagcggcggacucaacaccagcguccucagagccguacuaccgcgagacaugguauuccgaacauccacaccccgcguaguacuauaa

SEQ ID NO: 9721 - RNA, 1710 nt, Artificial Sequence
  derived and/or modified CDS sequence (opt11) from LASV(G1932-SLE-2011;Clade IV)__AIT17213__NP
augagcgccuccaaagaaaucaaaucauuccucuggacccaaucgcuacgacgcgagcuagcaggcuacugcuccaacauaaaacuccaagucgucaaagacgcacaagcccuacuacaugggcucgacuucucagaaguaucaaacguacaaagacucaugcgcaaagaacgccgcgacgacaacgaccugaaacgucuacgugaccuuaaucaagcagucaacaaccucgucgaacuaaaauccacccaacaaaaauccguccuccgagucggcacucuaacgucagacgaccuacuaauacucgccgccgaccuagagaaacucaaaucgaaagucauccgcacagaaagaccccucuccgccggcguauacaugggcaaccucuccucccaacagcuagaccaacgccgcgcucuacucaacaugauaggcauguccggcucgaaccagggcgugagagcaggcagggacggugucguccgcgugugggacgucaaaaacgccgaacuacucaacaaccaauucggcaccaugcccucccucacgcucgccugccucaccaaacaaggacaagucgaccugaacgacgccguucaagcacuaacugaccuaggccuaaucuacacagcaaaauaccccaacaccagcgaccucgaccgccucacacaaucccacccuauccuaaacaugaucgacaccaagaaauccagucuaaacaucagcggcuacaacuucagccuaggcgccgccguaaaagccggcgcauguaugcucgacggcggaaacaugcuagaaaccaucaaggucucaccccaaaccauggacggaauacucaaauccauacucaaaguaaagaaagcccuaggaauguucauauccgacacgccaggagaacgaaaccccuacgagaacauccuauacaaaaucugucucuccggcgauggauggcccuacauugcaucccguacuuccaucacaggccgcgccugggaaaacaccgucgucgaccuagaaagcgacggcaaaccccaaaaagccggaagcaacggcagcaacaaaucccuacaaagcgccggcuucaccgccggccuaaccuacucccaacucaugacccuaaaagaugccaugcuacaacuugaucccaacgccaaaacauggauggauaucgaaggcaggcccgaagaccccguagaaaucgcucuauaccaaccaagcuccggaugcuacauccacuucuuccgcgagcccaccgaccuaaagcaguucaaacaagacgccaaauacucccacggaauagacguuaccgaccucuucgcagcccaacccggccucaccuccgccguaaucgacgcccugccccgcaacauggucauaaccugccaaggaagcgacgacaucagaaaacuccuagaaucucaaggcaggaaggacaucaagcugaucgacaucgcucuuucaaaaacagacucccgcaaauacgagaaugccgucugggaccaguacaaagaccuaugccauaugcacaccgggaucgucgucgagaaaaagaaacguggcggcaaagaagaaaucaccccucacugugcccuaauggacugcauuauguucgacgccgccguauccggcggacuaaacacaagcguucuccgugccguccucccccgagacaugguauucagaaccucaacaccccgaguaguucuguaa

SEQ ID NO: 9722 - RNA, 1710 nt, Artificial Sequence
  derived and/or modified CDS sequence (opt11) from LASV(G1959-SLE-2011;Clade IV)__AIT17217__NP
auguccgcaucaaaggaaaucaagagcuuccucuggacacaaucccuccgacgcgaacuaagcggauacugcucuaacauuaaacuucaagucgucaaagacgcccaggcccuccuacacggccucgacuucuccgaaguuuccaacguucaacgccuuaugcgcaaagaacguagagacgauaacgaccuaaaacgccuacgcgaccuaaaccaagcagucaacaaccuugucgaacugaaaucuacccaacaaaaauccauccuacgagucggcacgcuaacgucagacgaccuccucauacucgcagccgaccuagaaaaacucaaauccaaagucacacgaacagaacgcccccucucagcaggagucuacauggggaaccucuccucccagcaacucgaccaaaggcgcgcacuucuauccaugaucggaauguccuccggcguccaaggggcuagagccggaagagacggggucguacgaguaugggacgugaaaaacgccgaacuacuaaacaaccaauucggaaccaugcccucacucacacucgccugccucaccaaacaaggccaagucgaccucaacgacguaguccaagcacucacagaccuaggccugaucuacacugccaaauacccaaacaccuccgaccuagaccgacucacccaaucccaccccauccucaacaugaucgacaccaagaaaucaagccucaacaucuccggauauaacuucagccuaggcgccgccgucaaagcaggcgcauguaugcuagacggcgggaacaugcucgaaacaauaaaaguuucgccacagaccauggacggaauacucaaauccauccuaaaggucaagaaagcacucggcauguucauaagcgaaacccccggcgaacgaaaccccuacgaaaacauccuauacaaaauaugucucucgggcgaugguuggccauacaucgccucgcgaaccuccaucacaggccgcgccugggaaaacaccgucguagaccuagaauccgacggcaaaccccaaaaagcaggcuccaacaacuccaacaaaucccuccaauccaccggcuuugcagccggccuaaccuacagccaacucaugacacuaaaagacgcaaugcugcaacuugacccaaacgccaaaaccuggauggauaucgaaggacgucccgaagacccagucgaaguagcccucuaccaacccagcuccggcugcuacauacacuucuuccgagaacccaccgaccucaaacaauucaaacaggaugccaaauacucgcacggaauagacgucacagaucucuucgccgcccaacccggccucacaucagcugugauagacgcccuaccccgaaacauggucauaaccugccagggcagcgacgacaucaaaaagcuacucgaaucgcaaggccgcaaggacaucaaacuuaucgacauagcccucuccaaaacugacucccgcaaauacgaaaacgccgucugggaccaguacaaagaucucugccacaugcacaccggaguagucgucgaaaagaaaaagcgagggggaaaggaagaaauaacaccucacugcgcacucauggacugcaucauguucgacgcagccgucuccggcggccuuaacaccuccguccuccgcgcaguccuaccacgcgacauggucuuccguacaagcaccccacgagucguacucuaa

SEQ ID NO: 9723 - RNA, 1710 nt, Artificial Sequence
  derived and/or modified CDS sequence (opt11) from LASV(G2141-SLE-2011;Clade IV)__AIT17225__NP
auguccgcauccaaagaaauaaaaucuuuccucuggacacaaucucuacgacgcgaacucuccggcuacugcucaaacauaaaacuccaaguagugaaagacgcacaagcccuccuacacggccucgacuucuccgaaguaaguaacguccaacggcuaaugcgcaaacaacgacgcgacgacaacgaccucaaacgccuacgcgaccucaaccaagccgucaacaaccucgucgaacuuaaaagcacccaacagaaaagugugcuacgcgucggcacacucaccagcgacgaccuccuaguacuagccgcagaccucgaaaaacucaaaucuaaagucacccgcacagaacgaccccucuccgccggagucuacauggguaaccucuccucgcaacaacucgaccaaagacgcgcccuacuaaacaugaucgggauguccggcggcaaccaaggagcccgugcaggcaacgacggcgugguccgaguaugggacgucaaaaacgccgaccuacuuaacaaccaauucgggacaaugccuagccucacacucgccugccucaccaaacaaggacaaguagaccugaacgacguuguucaagcccucacagaccucggccucaucuacaccgccaaauaccccaacaccuccgaccuagaccgucucacacaaucacaccccauccucaacaugaucgacaccaagaaaagcucacucaacaucagcggcuacaacuucagccucggcgcagccguaaaagcaggcgcaugcaugcuugacggcggaaacaugcucgaaaccaucaaagucagcccccaaacgauggacggaauccucaaaagcauccuaaaagucaaaaaggcccuaggcauguucaucucagacaccccaggagaacgcaaucccuacgaaaacauccucuacaaaaucugccuaagcggcgacggauggcccuacaucgcaagccgcaccuccaucaccggacgcgccugggaaaacacaguaguagaucucgaauccgacgguaaaccccagaaaaccggcaacaacuccagcaacaaaucacuccaaagcgccggcuucaccgccggccucacuuacucccagcuaaugacacucaaggacgccaugcuacaauuagaccccaaugccaaaaccuggauggauaucgaaggccgacccgaagaccccgucgaagucgcccuauaccaaccauccuccggaugcuacauccacuucuuccgcgaaccaacagaccuaaaacaauucaaacaagacgccaaauacagccacggaaucgacgucaccgaccucuucgccgcacaaccaggacucaccucugcaguaaucgaagcccuaccccgcaacauggugauaaccugccaaggcucagacgacauccgcaagcuccucgaaucccaaggacggaaggacaucaaacuuaucgacaucgcccucucaaaaaucgacuccaggaaauacgaaaacgcugucugggaccaauacaaggaccuaugccacaugcacacaggcguuguagucgaaaagaagaaacgaggaggcaaagaagaaaucacaccccacugcgcccucauggacugcaucauguucgacgccgcaguaucaggaggccuuaacacccuaguccuacgagccguuuuaccccgagacaugguuuuccgcacaucaacccccaaagugguacuauaa

SEQ ID NO: 9724 - RNA, 1710 nt, Artificial Sequence
  derived and/or modified CDS sequence (opt11) from LASV(G2147-SLE-2011;Clade IV)__AIT17229__NP
auguccgccagcaaagaaauaaaaucauuccucuggacccaaucacuacgccgcgaacuaucaggauacugcucaaacaucaaauuacaagucgucaaagacgcacaagcccuccugcacggucucgacuucuccgaagucucaaacguccaaagacucaugcgcaaagaacgccgcgacgacaacgaucucaaacgacuccgagaccuaaaccaggcaguaaacaaccucgucgaacucaaauccacccaacagaaaagcguccugcgcgucggcacucuaacguccgacgaccuacucauacuagccgccgaucucgagaaacucaaauccaaagugauccgaacagagcgcccccucagcgccggagucuacaugggaaaccucagcucccaacaacucgaucaacguagagcucuccucuccaugauaggcaugagcggcggaaaccaaggcacccgcgcaggccgcgacggagucguccgggucugggacgucaaaaacgcagaacuacuaaacaaccaauucgguacaaugccaucucucacacuggcaugccucacaaaacaagggcaaguggaccucaacgacgccguccaagcccugaccgaccuaggccucauuuacacagcaaaauacccuaacaccucagaccuugaccgacugacccaaucacaccccauacucaacaugaucgacaccaagaaauccagccucaacaucagcggauacaacuucucccucggagcagccguaaaagccggugcaugcaugcucgauggcggcaacaugcuugaaacaauaaaagucucaccacaaacaauggacgguauacuaaaaucaauccuaaaaguaaagaaagcccucggcauguucaucuccgacaccccaggugaacgcaaucccuacgaaaacauccucuacaaaaucugccucuccggagacgguuggcccuacauagccucccgcaccucgaucaccggacgcgcaugggaaaacaccgucguagaccuggaauccgacggaaaaccacagaaagcagggucaaacaacagcaacaaaucccuccaaucggccggauucacagcuggccuaacauacucccaacucaugacacuaaaagacgccaugcuccaacuagaccccaacgccaaaaccuggauggacaucgaaggacgaccagaggacccagucgaaaucgcgcuauaccaaccauccuccggcugcuacauacacuucuuccgagaacccacagaccucaaacaauucaaacaagacgcaaaauacagucacggcaucgacguuacugaucuauucgccgcccagcccggccuaaccuccgcugucauagacgcccuaccucgcaacauggucauuaccugccaaggcuccgacgauauccgcaaacuacuagaaucacagggccgcaaagacaucaaacuaaucgacaucgcccucucaaaagccgacucccgcaaauacgaaaacgcaguuugggaccaauacaaagaccuaugucacaugcacaccggcgugguggucgagaaaaagaaacgcggcggcaaagaagaaaucacuccccacugugcccuaauggacuguauaauguucgacgcagccgucuccgguggacucaacacaagcguccuccgcgcaguacuccccagagacauggucuuccgcacauccacuccacgcgucgucuuauga

SEQ ID NO: 9725 - RNA, 1710 nt, Artificial Sequence
  derived and/or modified CDS sequence (opt11) from LASV(G2165-SLE-2011;Clade IV)__AIT17233__NP
auguccgccagcaaagaagucaagagcuuccucuggacccaaagccuucgccgagagcucucaggauacugcucaaauaucaaacuccaagucguaaaggacgcccaagcucuacuccacggacuagacuucucagagguguccaacguccaacgacucaugcgcaaagaaagacgagacgacaacgaccucaaacgccuccgagaccugaaccaagcaguaaacaaccucgucgaacucaaaaguacacaacaaaaauccauccucagagucggcacccucaccagcgacgaccuccucguccucgcagccgaccucgaaaaacucaaaucaaaagucacacgcacagaacgaccccucagcgccggcgucuacaugggcaaccucucaucacaacaacucgaccaacgccgggcccuccucuccaugaucggcaugucgggaggaaaccagggagcccaagccggccgagacggagucguccgaguuugggacgucaaaaacgcggagcuccucaacaaccaauucggaacgaugcccucccucacacucgccugccucacaaaacaaggccaaguagaucucaacgacgccguccaagcgcucacggaccuagggcucaucuacaccgcaaaauaccccaacaccagcgaccuagaccgacucacccagucacaccccauucucaacaugaucgacaccaaaaaguccucccucaacaucagcggcuacaacuucucccuaggggcagccguaaaagccggcgcaugcaugcuagacgguggcaacaugcucgaaacaaucaaaguuagcccccaaacaauggacggcauccuaaaauccauccuaaaagucaagaaagcacuaggcauguucauauccgacaccccaggcgaacgaaaccccuacgaaaacauccuauacaaaaucugccucuccggagacggcuggccauacauagcgucccggaccuccauaaccggccgcgccugggaaaacacaguagucgaccucgaaagcgacggaaaaccacaaaaagcaggcucuaacaacagcaacaaaucacugcaaagugcaggcuucaccgccggccucaccuauucacaauuaaugacccucaaagaugcaaugcuccaacucgaccccaacgccaaaaccuggauggacaucgaaggccguccagaagaccccgucgaaguagcccucuaccaacccagcucuggaugcuacauccacuuuuuccgcgaacccacagaucuaaaacaguucaaacaagacgcaaaauacagccacggcaucgacgugaccgaccucuucgccgcucaacccggccucaccucagccgucauagacgcacuaccccgcaacaugguaaucacaugccaaggcagcgaugacauccgcaaacuucucgaaucacaaggccgcaaagauauaaaacucaucgacaucgcacucucaaagaccgacucccgaaaauacgaaaacgcuguaugggaccaauacaaagaccucugccacaugcacaccggcgucgucguagaaaagaagaaacgcggaggcaaagaagaaaucacgccucacugcgcccucauggacugcaucauguucgacgccgccgucagcggaggccugaacaccuccguccugcgagccguacugccccgcgacauggucuuccguaccuccacacccagaguuguauuguga

SEQ ID NO: 9726 - RNA, 1710 nt, Artificial Sequence
  derived and/or modified CDS sequence (opt11) from LASV(G2184-SLE-2011;Clade IV)__AIT17237__NP
auguccgcauccaaagaaauaaaaucauuccucuggacccaaucacuccgacgggagcucuccggcuauugcuccaacauaaaauuacaagucgucaaagacgcccaagcccucuuacacggacucgacuucuccgaaguauccaacguccagagacuuaugaggaaagagcgccgcgacgacaacgaucuaaaacgccugcgcgaccuaaaucaagcugucaacaaccucgucgagcucaaauccacacaacaaaaauccauccuaagggugggcacacucacgucagacgaccuacuuauccucgccgccgaccucgaaaagcucaagucgaagguaacacgaaccgaacgcccacucuccgccggcguauacaugggcaacuuaagcucacaacaacuugaucaacgacgcgcacuccuaagcaugaucgguauguccggcggcaaccaaggcgcacgcgcaggccgcgacggagucgucagagucugggacguuaaaaacgccgaacuccuaaacaaccaauucggaacaaugcccucacuaacacucgcaugccugacaaagcaaggccaagucgacuuaaacgacgccguacaagcccucaccgaccucggcuuaaucuacacugcaaaauacccaaacacuucagaccucgaccgacucacucaaucacaccccauccucaacaugaucgacaccaagaaaucaucucucaacauaagcggauacaauuucucccucggcgcugccguaaaggccggcgcaugcaugcuagacgguggaaacaugcucgaaacaaucaaaguauccccacaaaccauggacgguauccugaaaucgauccucaagguaaagaaagcacucggcauguuuauaagcgacacaccaggcgaacgcaacccauacgaaaacauccucuacaaaaucugccucagcggcgacggcuggcccuacaucgcaucacgcaccuccaucaccggccgcgccugggaaaacaccgucguugaccucgaaucagauggcaaaccacagaaagcaggcuccaacaacagcaacaaaucacuucaauccgccggcuucaccgccggccugaccuacucccaacuaaugacccugaaagacgccaugcuccaacuagaccccaacgccaaaaccuggauggacaucgagggccgccccgaagaccccgucgaaguagcccuauaccagcccuccucgggcugcuacauacacuucuuccgagaaccaaccgacuuaaaacaauucaaacaagacgcuaaauacagccacggaaucgaugucacagaccuauucgccgcacagcccggccuaaccuccgcaguuaucgacgcccucccccgcaacauggucaucaccugucagggcuccgaugacauccguaaacuccuggagucacaaggacgcaaagacaucaaacugaucgacauagcacucucaaagaccgacucccgcaaguacgaaaacgcagucugggaccaguacaaagaccucugccacaugcacacgggaguagucgucgagaaaaagaaacgaggaggcaaagaggagaucacuccccauugcgcccucauggacugcaucauguucgacgccgccgucuccggaggacugaacacaagcguccuccgagccguacucccccgcgacaugguauucagaaccucuaccccacgagugguccucuaa

SEQ ID NO: 9727 - RNA, 1710 nt, Artificial Sequence
  derived and/or modified CDS sequence (opt11) from LASV(G2197-SLE-2011;Clade IV)__AIT17241__NP
augagcgcauccaaagaaaucaaauccuuccuauggacacaaagccucagacgcgaacucucaggcuauuguuccaacaucaaacuacaaguaguuaaagacgcccaagcucuccuacacgggcuugauuucucggaaguaagcaacguacaacggcugaugcgaaaagaacgccgcgacgacaacgaccuaaagcgccuccgagaccuaaaccaagccguaaacaaccucguagaacucaaaagcacccaacaaaaauccauccuccgagucggcacauuaacaagcgacgaccuccuaauccucgcagccgaccucgaaaagcucaaauccaaaguaacacgcaccgaacgcccccucucagccggagucuauaugggcaaccucucgucacagcaacucgaccaaagacgagcacuccuaagcaugaucggcaugaguggcggaaaccaaggcgcucgagccggacgagauggagucguccgaguaugggacgugaaaaacgccgaauuauuaaacaaucaguucgggacuaugcccucucucacccuagccugccucacuaagcaaggccaagucgaccucaacgacgccguacaagcccugacggaccuuggccuaauauacacagcaaaguaccccaacaccuccgaccucgaccgacucacccagucacacccaauccucaacaugaucgacaccaagaaaucaucacugaacauaagcggauacaacuucucacuaggggccgccgucaaagccggcgccugcaugcuggacggcggcaacaugcuggagacgaucaaagucuccccacaaacaauggacggcauccucaaauccauccuaaaaguaaagaaagcacuaggcauguucaucagcgacacccccggcgaacggaaucccuacgaaaacauccucuacaaaaucugccuauccggcgacgguuggcccuacaucgccagccgaaccuccauaaccggccgugcaugggagaauaccguagucgaccucgaaucagacggcaaaccacaaaaagcaggcucuaacaacuccaacaaaucucuccaaucagccggauucaccgccggauuaacauacucccaacucaugacacugaaagacgccaugcuacagcucgaucccaacgccaaaacauggauggacaucgaaggccgccccgaggaccccguagaaaucgcucuuuaccagcccuccucuggcugcuacauacacuucuuccgcgaaccaacagaccucaaacaauucaaacaagacgccaaauacagccacggaaucgacguaaccgaccucuucgccgcacaaccuggacuaaccagugccgucaucgacgcucucccacgcaacauggucauaacaugucaaggcuccgacgacauucgaaaacucuucgaaagccaaggacgcaaagacaucaaacucaucgacauagcucucucaaaaacagacucccgaaaauacgaaaacgccguaugggaccaguacaaagaccuaugccacaugcacaccggagucgucgucgagaaaaagaaacgcggcggaaaagaagaaauaacaccgcacugugcccuuauggacugcauaauguuugacgcagccguaagcggaggccuaaauaccucaguacucagagcaguccuaccacgcgacauggucuuccgcacauccacaccacgagucguccucuaa

SEQ ID NO: 9728 - RNA, 1710 nt, Artificial Sequence
  derived and/or modified CDS sequence (opt11) from LASV(G2222-SLE-2011;Clade IV)__AIT17245__NP
augucagccagcaaagaaauaaaaucauuccucuggacccagucucucagaagagaacuauccggauacugcuccaacaucaaacuccaaguagucaaagacgcccaagcacuccuccacggacuagacuucucggaagucuccaacguccaacgcuuaaugcgaaaagaacgucgagacgacaacgaccugaaacgccuucgagaccuuaaccaagcaguaaacaaccuugucgagcucaaauccacccaacaaaaaucuauccuccgcgucgggacccucaccagcgacgaccuacuaauacucgccgccgaccuagagaaacuaaaauccaaaguuacccgcaccgaaagaccucuuucagccggcguauacaugggcaaccucucaucccaacaacuagaccagagacgcgcacuccugaacaugauaggcauguccggcagcaaccagggcgcccgcaccggaagagacggagucguccgagucugggacgucaaaaacgccgaacuccucaacaaucaauucggcacaaugccaucucuaacccucgccugccucaccaaacaaggccagguagaccucaacgacgcaguccaagcccucacagaccucggccucauauacaccgcaaaauaccccaacacaucugaccuagaccgccucacccaaucccaccccauccuaaacaugaucgacacaaagaaauccucacuaaacauuagcggcuacaacuucagccucggcgcggccgucaaagccggcgcaugcauguuagacggaggcaacaugcuggaaaccauaaaagucucgccccaaaccauggacggaauccuaaaauccauacuaaaagucaagaaagcccuaggcauguucaucuccgacacccccggggaaagaaauccauacgaaaacauccucuacaaaaucugccuaucaggcgacggcuggcccuacaucgccagcagaacaucaaucaccgggcgagccugggaaaacaccguagucgaccuagaaagcgacggcaaaccacaaaaagccggauccaauaacucgaacaaaucccuccaauccgccggacucaccgccggccugaccuacucccaacucaugacgcucaaagacgccaugcuccaacuggaccccaacgccaaaacauggauggacauagaaggccgaccggaagauccaguagaaaucgcgcuauaccaacccucauccggcugcuacauacacuucuuccgagagcccaccgaccuaaaacaauucaaacaagacgccaaauacucucacggaaucgacgucgcagaccuauucgcggcacaacccggacuaaccuccgccgucauagacgcacuuccacgcaaccuaguaauaaccugucaaggcagcgacgacauccgcaaacuccuagaaucacaaggacgcaaagacaucaaacuaaucgacauagcacucagcaagacagacagccguaaauacgaaaacgccgucugggaccaguacaaagaccucugccacaugcacaccggcaucgucgucgaaaagaagaaacgaggaggcaaagaagaaaucaccccacacugcgcauuaauggacugcauaauguucgacgccgcaguaucaggagggcucaacgccuccguacuccgcgccguucucccacgagauaugguuuuccgcacauccacccccaggguaguccucuag

SEQ ID NO: 9729 - RNA, 1710 nt, Artificial Sequence
  derived and/or modified CDS sequence (opt11) from LASV(G2230-SLE-2012;Clade IV)__AIT17247__NP
auguccgccuccaaagaaaucaaaucauuucuauggacccaaucacuccgucgagaacucagcgguuacugcuccaacauaaaacuccaaguagucaaggacgcacaggcccuucuccacgggcucgacuucuccgaagucucgaacguacaacgccuaaugagaaaacaacgccgagacgacuccgaccuaaaacgccugcgagaccugaaccaggccgucaauaaucucgucgaacucaaauccacgcaacaaaaauccguauuacgaguaggcacccuaaccuccgacgaccuacuaauccuagcggcagaccucgaaaaacuaaaaucaaaagugauccgcaccgaaagaccgcuauccuccggcgucuacaugggcaaccucuccucucaacaacuggaccaacgacgagcacuccuaaacaugaucggcauguccggcggcaaccaaggagcccagguaggaagagacggcgucguacgcguaugggacgucaaaaacgccgacuuacucaacaaccaauucggcaccaugccaucacuaacccucgcaugccucaccaaacagggacaaguagaccucaacgacgucguacaagcccuaaccgaccucggacuaaucuacacggcaaaauaccccaacacauccgaccuagaccgccucgcccagagccacccaauccuuaacaugauagacacaaagaaauccucacucaacauaucaggauacaacuucucucuuggcgccgccgucaaagccggagcuugcaugcucgacggaggaaacaugcuagaaacaaucaaagucagcccccaaaccauggacggaauacuaaaauccauccuuaaagucaagaaagcccuaggaauguucauaucagaaacaccaggcgaacgcaaccccuacgaaaacauccucuacaaaaucugccucagcggcgacggcuggcccuauaucgcaucccgcaccuccaucacaggacgagcaugggagaacaccaucguugaccuagaaucagacggcaaaccacaaaaagccggcuccaacaacuccaacaaaagccuucagagcgcaggauucaccgcaggacucacauauucacaacuaaugacccucaaagacucaaugcuccaacuagacccaaacgcaaaaacuuggauggacauagaaggacgcccagaagaccccguagaaguagcccuauaccaacccuccucuggaugcuacauacacuucuuccgcgaacccaccgaccucaaacaauucaaacaagacgccaaauacagccacggaauagacguaacagaccucuucgccgcacaacccggauuaaccuccgcaguaaucgaagcacucccacgaaacaugguuauaaccugccaaggcuccgacgacauccgcaaacuacuugaaucccaaggaaggaaagacaucaaacuaaucgacaucgcccucaacaaaaccgacagcagaaaauacgaaaacgccgucugggaccaauacaaagaccucugccacaugcacacaggcgucguaguagaaaagaagaaacgcggcggcaaagaagaaaucaccccucacugcgcacuaauggacugcaucauguucgacgccgcagucuccggcggccucaaaacccucguccuccgcgccguccucccacgugacaugguuuuccgcaccucuaccccaaaaguuguuuuauaa

SEQ ID NO: 9730 - RNA, 1710 nt, Artificial Sequence
  derived and/or modified CDS sequence (opt11) from LASV(G2259-SLE-2012;Clade IV)__AIT17251__NP
augagcgccucaaaagaaaucaaaucuuuccuuuggacccaaagccuccgccgcgaacucuccggauauugcucaaacauuaaacuccaagucgucaaagacgcccaagcucuccugcacggccuagacuucagcgaagucagcaacguacaacgccucaugcgaaaacaacggcgagacgacucggaccuaaaacgccuccgggaccuuaaccaagccguuaauaaucuaguggaacuaaaaucuacccaacagaaaagcgugcuacgcguuggaacccuaaccagcgacgaccuacuaauccuagccgcagaccucgagaaacuaaaaagcaaagucauccgcacugaacgcccccuaaguuccggcguauacaugggaaaccuauccucccaacaacuggaccaacgaagggcccuccuaaacaugaucggcaugucaggugggaaccaaggggcgcaagucggccgagacggagugguccgagucugggacguaaagaacgcagaccuacucaacaaccaauucggaacaaugcccucccucacccucgcaugucuuaccaaacaaggccaagucgaccuuaacgacguaguccaagcacuaaccgaccucggccucaucuacaccgccaaauacccaaacaccagcgaccuagaccgccucgcacaaucccacccaauacugaacaugauagacacaaagaaguccucccuaaacaucagcggauacaacuucucccuaggcgccgcagucaaagccggcgcaugcauguuagacggcggcaauaugcuagagacgaucaaagucagcccgcaaaccauggacggcauacuaaaauccauccuaaaagucaagaaagcgcugggcauguucaucuccgaaacacccggcgaacgcaacccauacgaaaacauacuauacaaaauuugucucuccggcgacggcuggcccuacaucgccucccgcaccagcaucaccggcagagcaugggaaaacacaaucguagaccucgaaagcgacggcaaaccccagaaaaccggcagcaacaacucaaacaaaucccuacaauccgccggcuucacugcaggccucacauacucacaacucaugacccuaaaagacuccaugcugcaacucgacccaaacgcaaaaacauggauggacaucgaaggccgaccagaagacccuguagaagucgcacucuaccaaccguccucaggcuguuacauacacuucuuccgcgagcccacagaccucaaacaauuuaaacaagacgccaaauacucccacggcaucgauguaacagaccucuucgcugcccaaccuggccucaccagcgccgucauagaagcccuaccccgcaacauggucauaaccugccaaggcuccgacgacauccgcaaacuccuugaaucccaaggccgcaaagacaucaaacucaucgacaucgcccuaaacaaaacagacucgcgcaaauacgaaaacgccgucugggaccaauacaaagaccucugccacaugcacacuggcgucguagucgaaaagaagaaacgagguggcaaagaggagauaacaccccauugcgcauuaauggacugcauuauguucgacgcagccguauccggcggacuuaaaacccucguccuccgcgcaguccucccccgagacauggucuucagaaccaguacacccaaggucguacuauaa

SEQ ID NO: 9731 - RNA, 1710 nt, Artificial Sequence
  derived and/or modified CDS sequence (opt11) from LASV(G2263-SLE-2012;Clade IV)__AIT17255__NP
augucagcaucaaaagaaaucaaaucauuccuauggacccaaucccugcggcgcgaacucuccggauacugcucaaacauuaaacuccaagucgucaaagacgcacaagcccuacuacacggccucgacuucucagaaguuuccaacguucagcgacucaugcgaaaagaacgccgcgacgacaacgaccucaaaagacucagggaccucaaccaagcagucaacaaccuaguagagcucaaaucaacccaacaaaagucaguccuccgcguaggcacccucaccagcgacgaccuccuagugcucgcagccgaccucgaaaaacucaaauccaaagucacacgaaccgaaagaccacucagcgcuggcguauacaugggcaaccuauccucgcaacaacucgaccaacgccgagcccuccucucgaugaucggaaugagcgguggcaaccaaagagcacaagcaggucgagacggcgucguacgagucugggacgucaaaaacgcggaacuacucaacaaccaauucggcaccaugccaucacucacacuggcaugccuaaccaaacaggggcaaguagaccugaaugacgccguccaagcccucaccgaccucggccucaucuacaccgucaaauaccccaacgccuccgaccucgaccgccuaacccaaucccaccccauccuuaacaugauagacaccaagaaaucaucccuuaacaucucaggcuacaacuucucccuaggcgcugcagucaaggccggagccugcaugcuggacggcggcaacaugcucgaaaccaucaaggucucaccccaaacaauggacggcauacucaaauccauccucaaagucaaaaagaccuuagguauguucauaagcgacacacccggcgaacgcaacccauacgaaaauauccucuacaaaaucugccucuccggagacggcuggcccuacauugccucccgaacauccauaacaggcagagccugggaaaauacagucgucgaccuagaauccaacggcaaaccccaaaaagccgacucgaacucaagcaacaaaagccugcaaagcgcuggcuucaccgcaggccuaacauacagccaacuaaugacccugaaagacgccaugcuccaacucgaccccaacgcaaaaacauggauggacaucgaaggaagaccagaagacccuguagaaaucgccuucuaccaaccaucaucgggcugcuacauacacuucuuccgagaacccacagaccucaaacaauucaaacaagacgcgaaguacucacacggcaucgacguaaccgaccuuuucgcagcacagccaggacucaccucugccgucaucgacgcgcucccccgcaacauggucauaaccugccaaggcuccgacgauauccgcaaacugcuagaaucccaaggcagaaaagacaucaaacucaucgauauagcacucuccaaaaccgacagccgaaaguacgaaaacgccgugugggaccaauacaaagaccucugccacaugcacacuggaguagucguggaaaagaagaaacgcggcgguaaagaagaaauuacuccccacugcgcccucauggacugcauaauguucgacgcagcagucaguggcggccuaaacacccucguccucagggcaguccuuccccgugacauggucuuccgcaccuccacaccccgaguaguucucuaa

SEQ ID NO: 9732 - RNA, 1710 nt, Artificial Sequence
  derived and/or modified CDS sequence (opt11) from LASV(G2280-SLE-2012;Clade IV)__AIT17259__NP
augucagcaucaaaagaaauaaaauccuuccucuggacccaaucccuaagacgcgaacucagcuccuacugcuccaacauaaaacuccaagucgucaaagacgcccaagcccuacuccacgggcucgacuucuccgaagucucaaacguacaacggcucaugcggaaagaacgccgcgacgacaaugaccucaaacgccuacgcgaucucaaccaagcaguaaacaaccucguggaacuaaaaucaacacaacagaaaucaauccuccgaguaggcacccucacgucagacgaccuucuaauacucgcagccgaccuagaaaaacucaaaagcaaagucacucgaaccgaaagaccccucucggcaggagucuacaugggaaaccucucuucacagcagcuagaccaacgccgcgcacuccuaaacaugcucgggauguccggcuccaaucaaggcgcacgcgccggcagagacgggguaguccgcguuugggacguuaaaaaugcagaacuacucaacaaccaauucggcaccaugccuagccucacacuagcaugccucacaaaacaaggccaaguagaccuaaacgacgcaguccaagcacucaccgaccucggccucaucuacaccgcaaaauaccccaacacauccgaccucgaccgacuuacccaaucucaccccaucuuaaacaugauagacaccaagaaauccucccucaacaucuccgguuacaacuuuucacucggagccgccgucaaagccggcgccugcaugcucgacggcggcaacaugcuagagacaauaaaagucagcccccaaacaauggacgguauccucaaaagcauacucaaagucaagaaagcacucggaauguucauaagcgacacacccggcgaacgaaaccccuacgaaaacauacuauauaaaaucugccucagcggagacggcuggccauacaucgccagcagaaccucaaucacgggccgcgccugggaaaacaccguagucgaccucgaauccgacggaaaaccccaaaaagccggcuccaacuccucuaacaaaucccuucaaucagcaggauucaccgcaggccugacauacucacaacuaaugacucucaaagacgccaugcuucaacucgaucccaacgccaaaacauggauggauaucgaaggaagacccgaagaccccgucgaaaucgcucuuuaucagccaucuagcggcugcuacauacacuucuuccgagaacccaccgaccucaaacaauucaaacaagacgcaaaauacucacacggcauagacgucaccgacuuauucgcagcccaacccggacuaaccuccgcagucaucgacgcacucccccgaaauauggucaucacaugccaaggaucggacgacaucaggaaacuccucgaaagucaaggccgaaaagacaucaaacucaucgacaucgcccucagcaaaacagacucacgcaaauacgaaaacgccguaugggaccaguacaaagaccuaugccacaugcacacaggaaucgucgucgagaagaagaaaagaggagggaaagaagaaaucacaccccacugcgcccuaauggacugcaucauguucgacgccgcagucuccggaggacucaacgcaucgguccucagagcagucuuaccacgcgacaugguguuccgcacaagcacaccccgagucguccucuga

SEQ ID NO: 9733 - RNA, 1710 nt, Artificial Sequence
  derived and/or modified CDS sequence (opt11) from LASV(G2295-SLE-2012;Clade IV)__AIT17263__NP
augagcgccagcaaggaaauaaaauccuuccuauggacccaaucccuaagacgcgaauuauccggcuacugcucaaacaucaaacuacaaguaguaaaggacgcacaagcacuccuccacggccucgacuucuccgaagucuccaacguacaacgccuuaugcgaaaagaacgaagagacgacaacgaccucaagcgacugcgcgaccuaaaucaagccgucaacaaccucgucgaacuaaaauccacccaacagaaaagcguacuacgaguaggcacccucaccucagaugaccuucucauccucgcagcagaccuagaaaagcugaaauccaaagugauccgaacugaacgcccccuaucagcaggcgucuacaugggaaaccucagcucccaacaacuagaccaacgacgagcacuacucaacaugaucggcaugggaggcucaaaccaaggcgcucgagccggccgagacggcgucguacgaguaugggauguaaagaacgcagaacuccucaacaaccaauucggcaccaugcccucccugacccuagccugccuaacuaaacaaggccaaguagaccucaacgacgcagugcaagcccucaccgaccuaggccucauauacacggcaaaauaccccaacaccuccgaccucgaucgccugacacaaucacacccuauccucaauaugaucgacaccaagaaaagcucccucaauaucagcggcuacaacuucagucucggcgccgcggucaaagccggagccugcaugcuagacggcggcaacaugcucgaaaccaucaaagucucuccacaaacaauggacggaauccucaaaucaauccucaaaguaaagaaagcacucggcauguucauaagcgacaccccaggcgaacgcaacccauacgaaaacauacuauacaaaauaugcuuaucuggugacggcuggccuuacauugccucccgcacaucaaucaccggccgcgcaugggaaaacaccgucgucgaccucgaaagcgacggcaaaccccaaaaagccggcucaaacggcagcaacaaaucccuccaauccgccggcuuuaccgccggccuaacauacucucaacucaugacccuaaaagacgccaugcuccaacuugaccccaacaccaaaaccuggauggacauagaagggagaccagaagacccggucgaagucgcacuauaccaaccuucaagcggcugcuacauccacuucuuccgcgaacccaccgaccuaaaacaauucaaacaagacgccaaauacucucacggaaucgacguaacagaccucuucgcugcccaaccaggccuaaccuccgccgucaucgacgcccucccucgcaacaugguuauaacaugccaaggcuccgacgacauccgcaaacuacuggaaagccaaggccgcaaagacaucaaacuuauagacaucgcccucaguaaaaccgacucucgcaaguacgaaaacgccgucugggaucaauacaaagaccuaugccauaugcacaccggaaucguggucgagaaaaagaaaagaggaggcaaagaagaaaucacaccccacugcgcccuaauggacugcauaauguuugacgcggccguaagcggaggccucaacaccucaguacuucgagccguacugccgcgcgacauggucuuccgcaccucgacaccccgcgucguccucuaa

SEQ ID NO: 9734 - RNA, 1710 nt, Artificial Sequence
  derived and/or modified CDS sequence (opt11) from LASV(G2315-SLE-2012;Clade IV)__AIT17267__NP
augucagccagcaaggaaaucaaauccuuccucuggacccaaucccuccgccgagaacucuccggguacugcucaaacaucaaacugcaaguagucaaggacgcccaggcccuccuacacggcuuagacuucuccgaagucuccaacguccaacgacucaugcgaaaagaaagacgcgacgacaacgaccuaaagcgccuccgugaccuuaaccaagcagucaauaaccuaguagaacugaaauccacccaacaaaaaucaguacuccgcgucggaacccucacaucagacgaccuccuaauacucgcagcggaccuggaaaagcucaaguccaaaguaacccgaaccgaacgaccccucuccgccggcgucuacaugggcaacuuaucaucccagcaguuagaccaaagacgagcccuccucaacaugauaggcaugagcggaggaaaccaaggagccagagccggccgcgacggcgucguccgaguuugggaugucaaaaacgccgagcuccucaacaaccaauuuggcaccaugcccucacugacccucgccugccuaaccaaacagggccaagucgaccugaacgacgccguccaggcccuuaccgaccuaggccucaucuacacagcaaaauaccccaacaccucagaccucgaccggcuaacucagucccaccccauacucaacaugauagacaccaagaaauccucccucaacauauccgguuacaacuucucccuaggcgccgcugugaaagccggcgccugcaugcuagacggaggcaauaugcucgaaaccaucaaagucucaccccaaacaauggacucaauacuaaaaagcauccucaaagucaagaaagcgcucggaauguucaucuccgacacccccggcgaacgaaacccuuacgaaaacauccuauacaaaaucugccucucaggcgacggcuggcccuacaucgcaagccgaaccucaaucaccggccgcgccugggaaaacacagucgucgaccuagaauccgacggaaaaccucaaaaagccggcuccaacaacagcaacaaaucacuacagucugccggauucgccgccggccucacguacucucaacucaugacacucaaagacgcaaugcuccaacuagaccccaacgccaaaacauggauggacauagaaggccgccccgaagaccccguggaaaucgcccucuaccaaccauccuccggcugcuacauccacuucuuccgagaacccacagaccucaaacaauucaaacaagacgccaaauacucucacggaaucgacgucacagaccucuucgccgcacagcccggccucaccuccgcuguaaucgacgcacuaccccgaaacauggucauaaccugccaaggaucagacgacauccgaaaacuccucgaaagccagggacgcaaagacaucaaacuuaucgacaucgcacucuccaaaaccgacuccagaaaauacgaaaacgccguaugggaccaauacaaagaccucugccacaugcacaccggcguaguugucgagaaaaagaaacgcggcggaaaagaagagaucaccccacacugcgcccuaauggauugcaucauguucgacgccgccgucuccggcggccuuaacaccuccguccuacgcgccguccucccccgcgacaugguauuccgcaccacaacgccccgcgucguucuauaa

SEQ ID NO: 9735 - RNA, 1710 nt, Artificial Sequence
  derived and/or modified CDS sequence (opt11) from LASV(G2318-SLE-2012;Clade IV)__AIT17271__NP
auguccgccucaaaagaaaucaaaucguuccucuggacacagucucuacgccgcgaacucucaggcuauuguuccaacaucaaacuccaagucgucaaagacgcacaagcccucuuacauggccucgauuucuccgaagucuccaacguccaaagacuaaugcgcaaagaacgcagagacgacaacgaccuaaagcgccuacgcgaucuuaaccaagcagucaacaaccucgucgaacucaaaagcacacaacaaaaaucuaucuuacgcgucggcacccucaccagcgacgaccuacucauccuagcggccgaccuugaaaaauuaaaaagcaaagugacucgaaccgaacgaccccuaucagccggcgucuacaugggcaaccuauccucacaacaacuagaccaacgccgcgcacuacucaauaugauaggaaugagcggcgggaaccaaggagcccgcgccggccgcgacggagucguacgcguaugggacgucaaaaaugccgaacuccucaacaaccaauucggcaccaugccuucccuaacccuggcaugccuaaccaaacaaggccaaguugaccuuaacgacgccguacaagcacuaacagaccuaggucuuaucuacacggccaaauaccccaacacauccgaccucgaccgacucacccaaucacaucccauccuaaacaugaucgacaccaagaaaucgucacuaaacaucagcggcuacaacuucucccucggagccgcaguaaaagcaggcgccuguaugcuagacggaggcaacaugcuagaaacaaucaaaguauccccucaaaccauggacggcauccucaaaaccauccucaaagucaaaaaggcacuaggcauguucauaucugacacuccaggagaacgcaacccauacgaaaacauccuauacaagaucugccucucgggcgacggauggcccuacauagccagccgcaccucuaucaccggccgcgccugggagaacacagucgucgaccuagaaucugacggcaaaccccagaaaaccggcucaaacaacagcaacaaaucacuccaaucagccggcuucgccgcaggccuaaccuacagccagcuaaugacccucaaagacgccaugcuacagcucgaccccaacgccaagaccuggauggacauagaaggccgccccgaagaccccguagaaaucgcccuauaccaacccuccagcggcugcuacauacacuucuucagagaacccaccgaccuaaaacaauucaaacaagacgccaaauacagccacggcaucgacgucaccgaccucuuugccgcccagcccggucucacaucagcagucaucgacgcgcuuccccgaaacauggucauaaccugccaagguuccgacgacauccgcaaacuccuagagucacaaggcagaaaggacaucaaacucaucgacaucgcacucagcaaagcugacagccgcaaauacgaaaacgccgucugggaccaauacaaagaccuaugccacaugcacacaggcguaguuguagagaaaaagaaacgaggaggcaaagaagaaauaaccccacacugcgcccucauggacugcaucauguacgacgcagccgucagcggaggacucagcacaucgguccuccgcgcaguucucccacgcgacaugguauuccgcacaucgacgccucgcguuguacucuaa

SEQ ID NO: 9736 - RNA, 1710 nt, Artificial Sequence
  derived and/or modified CDS sequence (opt11) from LASV(G2363-SLE-2012;Clade IV)__AIT17275__NP
augagcgcguccaaagaaaucaaaucuuuccuauggacccaaucccuaagacgagaauuaucaggcuauugcuccaacaucaaacuccaaguggucaaagacgcccaagcccuacuacacggccuagacuucagcgaagucagcaacguccaaagacuuaugcguaaacaacgccgcgacgacggcgaccugaaacgacuccgcgaccucaaccaagccguaaacaaccucgucgaacucaaaucaacccaacagaaauccguccucagaguaggcacccuaaccagcgacgaccuccucacacucgccgccgaccucgaaaaacucaaauccaaagugacacgcacagaacgcccccucucagcuggcguauauaugggaaaccuaucaucacaacaacuggaccagcgucgggcacuccucaacaugaucggaaugucaggaggcaaccaaggcgcacggaccggaaaagauggcgugguacgaaucugggacgucaaaaacgccgaccuucuuaacaaccaauuugggaccaugccaagccuaacacucgcgugccuaacuaagcaaggacaaguagaccucaacgacguaguacaagcacucaccgaccuaggccucauauacaccgcaaaauaccccaacauauccgaccucgaccgccucgcccaaagccaucccauccucaaaaugaucgacaccucaaaauccucccuaaacaucuccggauacaauuucagccucggcgcagccgucaaggccggugccugcaugcucgacggcggcaacaugcucgaaaccguuaagguaucaccacaaacaauggacggcauccuaaaaucaauccucaaggucaagaaaucccuaggcauguucaucuccgacacgcccggcgaaagaaaccccuacgaaaacauccucuacaaaaucugccucuccggagacggcuggcccuacaucgccucccgaaccuccaucaccggacgagccugggaaaacaccguaguagaccucgagucagacggcaaaccacaaaaagucggcuccaacaacucaaacaaaagccuacaaucaacaggcuucaccgcagggcuuaccuacucccaacuaaugacccucaaagacgccaugcuacaacucgacccaaacgccaaaaccuggauggacaucgaagggcguccagaagaccccgucgaaaucgcccucuaccaacccuccuccggcugcuacauccacuucuuccgugaacccacagacuugaaacaguucaaacaagacgcaaaguacucccauggcaucgacguaacugaccuauucgccgcccaacccggacuuacaagcgccgucaucgacacacuuccccgcaacaugguaaucacuugccaaggcucagacgacauaggaaaacuacucgaaucccaaggacgcaaagacaucaaacucauagauaucgcacucuccaaaacggauucucgcaaauacgaaaacgccgucugggaccaauacaaagaccuaugccacaugcacaccggcgucguagucgaaaagaagaaacgcggcggcaaagaagaaauuacaccccacugcgcacucauggacugcaucauguucgacgccgccguaagcggaggacugaacgccuccguacuacgcgcaguccucccccgggacaugguauuccguaccucaacaccccgagucgucuuauga

SEQ ID NO: 9737 - RNA, 1710 nt, Artificial Sequence
  derived and/or modified CDS sequence (opt11) from LASV(G2384-SLE-2012;Clade IV)__AIT17277__NP
augagcgcaucaaaagaaaucaaauccuuucuguggacccaaucgcuaaggcgcgaacuguccucuuacugcagcaacaucaaacuucaagucgucaaagacgcucaagcgcuccuccacggccucgacuucucagaagucagcaacgugcaaagacuaaugagaaaagaacgacgcgacgacaacgaucucaaacgccuacgcgaccucaaucaggccguuaacaaccucgucgaacucaaauccacacaacaaaaaucaauacuccgaguaggcacacuaaccucagacgaccuccuaauccucgcagccgaccuagaaaaacugaaaucgaaaguaacccgaaccgagcgaccccucuccgccggcgucuacaugggaaaccuaucuagccagcaacuagaccaacgacgcgcacuccucagcaugauuggaaugucuggcuccaaccaaggcgccagagcaggacgcgacggcguaguccgagucugggacgucaaaaacgcagaauuacucaacaaucaauucgguacaaugcccagccucacacuagcaugccuaaccaagcaaggacaggucgaccugaacgacgccguacaagcccucacagaccucggacugauauacacagccaaauacccaaacacauccgaccuugacagacuaacacaaucacacccaaucuuaaacaugaucgacacaaagaaauccagccucaauauauccggcuacaacuucagccucggggccgcagucaaagccggcgccugcaugcuagacggaggcaacaugcucgaaacaaucaaagucucgccccaaaccauggacggcauccugaaaucuauccuaaaagucaagaaagcccucggaauguucaucagcgacaccccaggagaacggaacccauacgaaaacauccuauacaaaaucugccuaagcggcgacggcuggcccuacauagcauccagaaccucaauaaccggacgcgcaugggaaaacaccguggucgaccuugaguccgacggaaaaccacaaaaagcaggcuccaacaacuccaacaagucucuccaaagcgccggcuucacagccggccucaccuacagccaacuuaugacccucaaagacgccaugcuccaacuggacccaaacgccaaaaccuggauggacauagaaggccgccccgaagaccccgucgaagucgcacucuaccaacccuccucaggcugcuacauccacuucuuccgggaaccaacagaccucaaacaauucaaacaagacgccaaauauagccacggaauagacguuacagaccucuucgcagcccaacccggccucaccucggccgucaucgacgcucucccccgaaacauggucauaaccugccaaggauccgacgacauccgcaaacuccuugaaucacaaggacgcaaagacaucaaacucaucgacaucgcgcuaucaaaaacagacuccagaaaauacgaaaacgccgucugggaccaauacaaagaccucugccacaugcacaccggcguagucgucgagaaaaagaaacggggcggcaaggaagaaauaacaccacacugcgcacucauggacugcaucauguucgacgcagccguaagcggcggccuaaacaccagcguccuuagggccguccucccccgagacaugguuuuccggacauccacaccccgugugguccucuga

SEQ ID NO: 9738 - RNA, 1710 nt, Artificial Sequence
  derived and/or modified CDS sequence (opt11) from LASV(G2392-SLE-2012;Clade IV)__AIT17281__NP
augagugccuccaaagaaauuaaauccuuccucuggacacaaucccucaggcgagagcuauccggcuauugcuccaacauaaaacuccaagucgucaaagaugcacaggcccuccuacauggacucgacuucuccgaaguaucaaacguacaaagacucaugcgcaaagaacgcagagacgacuccgaccuaaaacgucuucgcgaccucaaccaagccgucaacaaccuagucgaacucaaaagcacacagcagaaaagcguacuucgcgucggaacccucaccuccgacgaccugcucguccuagccgccgaccucgaaaagcucaaauccaaagucacacgcaccgaaagaccucucucagcaggcgucuacaugggaaaccuaagcucacaacagcucgaccagcguagagcucuccugucaaugaucggcaugagcggaggaaaccaaggcgccagagcaggcagagacggagucguacgcaucugggacgucaaaaacgccgaacuacucaacaaccaauucggcaccaugcccucccucacccucgcaugccucaccaaacaagggcaggucgaccucaacgacgucguccaagcccuaacagaccucggacucaucuacaccgccaaauaccccaacaccuccgaccuagaccgccuaacacaaucucaccccauccugaacaugauagauaccaagaaauccucucugaauaucucaggauacaacuucagccucggcgcugcaguaaaagccggagcaugcaugcuugacggggguaacaugcuggagaccaucaaagucucaccccaaaccauggacggaauccucaaaagcauccucaaaguaaagaaagcccuagggauguucauuuccgacacccccggagaaagaaacccauacgaaaacaucuuguacaaaaucugccucagcggcgacggcuggccuuacaucgccucccggacuuccaucaccggcagagcaugggaaaacacuaucguagaccuagaaagcgacggcaaaccacagaaaacauccaccacaaauuccaauaaaucccuccaaagcgccggauucgcagcaggccucaccuacucacaacuuaugacacucaaagacgccaugcuccaacuagacccuaacgcaaaaacauggauggacauagaaggacgccccgaggacccagucgagaucgcccucuaccagcccaguuccggcugcuacauacacuucuuccgagaacccacagaccucaaacaauucaaacaagacgccaaauacucacacggcauagacgucacagaccuauucgccgcccaaccaggauuaaccuccgcagucaucgauacccucccacgcaacauggucauaaccugccaggggucugaagacauccgccgccuccucgaaucccaaggcagaaaagacaucaaacucauagacaucgcccucagcaaaacagacagccgcaaauacgaaaacgcagucugggaccaauacaaagaucucugccacaugcacacaggcguagucgucgaaaagaaaaagaaaggaggcaaagaggaaaucacaccgcacugcgccuugauggacugcaucauguucgacgccgccguaagcgguggccuaaacacuuccguacuacgcgcaguacucccccgagacaugguauuccggacaucaaccccacgcgucguccuuuaa

SEQ ID NO: 9739 - RNA, 1710 nt, Artificial Sequence
  derived and/or modified CDS sequence (opt11) from LASV(G2405-SLE-2012;Clade IV)__AIT17285__NP
auguccgccucaaaagaaauaaaauccuucuuauggacccaaagccuccgacgcgaacucucaggcuacugcucaaacauuaaacuccaagucgucaaagacgcccaggcccugcuacacggccucgacuucucagaaguaucaaacguacaacgcucaaugcgaaaagaacgccgagacgacaacgaucuaaaacgccuccgcgaccucaaucaagccguaaacaaccuuguggaacuaaaauccacacaacaaaaauccauccuccggguuggaacccucaccucagacgaccuccucauccucgcagccgaccuagaaaaacuaaaaagcaaagugaccagaaccgaacgcccccucucagcaggaguuuacaugggaaaccuguccucgcaacagcuagaccaacgacgcgcacuucuaaacaugaucggcaugucaggcuccaaccagggcgcccgcgccgggagagacggagugguacgcguaugggacgucaaaaacgccgaacuccuaaacaaccaauucggcacaaugcccucacuaacccuagccugccugaccaaacaaggccaaguagaucuuaacgacgucguccaagcacucaccgaccuuggccucauauacaccgcaaaauaccccaacgccucugacuuggaccgacucacccaaagccacccuauccugaacaugaucgacaccaagaaauccagccuaaacaucucaggauacaacuucucccuaggcgccgcggucaaagccggcgcaugcaugcuagacggaggaaacaugcuagaaaccauaaaagucuccccacaaaccauggacggaauccucaaauccauccugaaagucaagaaagcacucggaauguucauauccgacaccccaggcgaacgcaaucccuacgagaacauccucuauaaaauaugucuuuccggcgacgguuggccauacaucgccagccgaaccuccaucaccggccgcgccugggaaaacacuaucguagaccucgaaagugacggcaaaccccaaaaagcgggcaacaacggcagcaacaagucccuacaaucagcaggauucaccgccggccucaccuacucccaauuaaugacccucaaagacgccaugcuacaacucgaccccaacgccaagacauggauggacaucgaaggacgaccagaagaccccgucgaaaucgcacuguaccaacccucaucaggaugcuauauccacuucuuccgcgaacccaccgaccuaaaacaauucaaacaagacgccaaauacucacauggaauugacgucaccgaccucuucgcagcacaacccggccuaaccuccgcagucauagacgcacuaccgagaaaccuugucaucaccugucaaggcagcgacgauauccgaaaacuucuagaaucccaaggacgcaaagacaucaagcucauagacauagcucucuccaaaacugacucccgcaaauacgaaaacgcagucugggaccaauacaaggaccucugccacaugcauaccggcaucguagucgagaaaaagaaacgcggcggcaaagaagaaauaaccccacacugugcacuuauggacugcaucauguucgacgcagcagucagcggaggccuaaacaccagcgugcucagagcaguacucccccgcgacauggucuuccgcaccagcacuccccgcgucguacuauaa

SEQ ID NO: 9740 - RNA, 1710 nt, Artificial Sequence
  derived and/or modified CDS sequence (opt11) from LASV(G2427-SLE-2012;Clade IV)__AIT17289__NP
auguccgcauccaaagaaaucaaaucauuccuguggacccagucacuccgccgugaacuauccggcuacugcuccaacaucaaacuccaggucguaaaagacgcacaggcacuccuccacggacucgacuucagcgaaguauccaacguccagcgccuaaugcggaaagagcgacgagacgacagcgaccugaaacgccucagagaccucaaccaagccguaaacaaccucgucgaacucaaaucaacccaacaaaaauccguccucagagucggcacccuaacauccgaugaccugcucguccucgcagcagaccucgaaaaacuaaaaucuaaagucacgcgcacggaaagaccccucucagcgggcgucuacaugggcaaccuaagcucccaacaacuagaccaacguagagcacugcuauccaugauaggcauguccggaggcaaccaaggcguacgcgcaggccgagacggaguuguccgcauaugggacgucaaaaacgcagaacuacucaacaaccaauuuggcacgaugcccucacuaacccucgccugccucacgaaacagggacaaguagaccuaaacgacguaguccaagcucugaccgaccucgggcucaucuacacagccaaauaccccaacaccuccgaccucgaccgacucacccaaagccaccccauccuaaacaugaucgacacgaagaaauccucacuaaacaucagcgguuacaacuucagccucggcgccgcagucaaagccggcgccugcaugcucgacggcgguaacaugcucgagaccaucaaagucagcccccaaacaauggacggaauccuaaaaagcauccucaaagucaagaaagcacuaggaauguucaucagcgacacccccggggaaagaaaccccuacgaaaacauacuauacaaaauaugccuaagcggagacggcuggcccuacauagccucaagaaccuccaucaccggccgagccugggaaaacacaaucgucgaccuagaaagcgacggaaaaccgcagaaaacaggcuccauaaacuccaacaaaucccugcaaagcaccggcuucgcagcaggccuaaccuacucacaacucaugacucucaaagacgccaugcuccaacucgaccccaacgccaaaacauggauggacauagaaggacgcccagaagacccagucgagaucgcccucuaccaaccauccucaggcugcuacauacacuucuucagagagcccacagaccucaaacaguucaaacaagacgccaaauacucccacggcaucgacgucacagaccucuuugcugcucaaccaggccucacauccgcagucaucgacgcucuaccucgcaacauggucaucacaugccaagguuccgacgacauccgaaagcuccuggaaagucaaggcagaaaagacaucaaacuaauagacauagcccucagcaaaacagacucuagaaaauacgaaaacgccgucugggaccaauacaaagacuugugccauaugcacaccgggauaguagucgaaaagaagaaacgcggagggaaagaagaaaucacgccacacugcgcacucauggauugcauaauguucgacgcagccguaagcggcggccucaacaccucaguccuaagagcaguccucccacgagacaugguauuccgcaccagcacaccccgcguaguccucuaa

SEQ ID NO: 9741 - RNA, 1710 nt, Artificial Sequence
  derived and/or modified CDS sequence (opt11) from LASV(G2431-SLE-2012;Clade IV)__AIT17293__NP
augucugccuccaaagaaaucaaauccuuccucuggacacaaagucuacgcagggaacuaagcggauacugcucaaacauaaaacuacaagucguaaaagacgcccaagcccuacuucacggacuagacuucuccgaaguaagcaacguccaacgccucaugcgcaaacaacgccgagacgacaacgaccuaaaacgccuacgcgaccucaaccaagccgucaacaaccucgucgaacucaaauccacccaacagaaauccguccuucgagugggcacccucaccucagacgaccuacucguacucgccgcugaccucgaaaaacucaaauccaaggucaccagaacagaacgcccccucucagccgggguauauauggguaaccucuccacccaacagcuagaccaaagacgagcccuccucaacaugaucgggauguccggaggaaaccaaggcgcccgugccggccgcgacggcgucguccgcgucugggacgucaaaaacgccgaccuacuuaacaaccaauuugggaccaugcccagccucacccuagcaugccucaccaaacaaggccaagucgaccucaacgacgucguacaagcccucaccgaccuaggucuaaucuacacagccaaauaccccaacacaucagaccucgaucgccucacccaaagccacccaauccuuaauaugauagacaccaacaaauccucccucaacaucucaggcuacaacuucucacucggagccgcggucaaggccggggccugcaugcucgacggaggcaacaugcuagagaccaucaaaguaagcccccaaaccauggacggcauacucaaauccauccucaaagucaagaaagcccucggcauguucaucuccgacacccccggcgaacgcaacccuuaugaaaacauucucuacaaaauaugccucuccggagacggcuggcccuacauagccuccagaacauccauaacaggccgggcuugggaaaacaccgucgucgaccucgaauccgacggcaagccccaaaaggcaggaggaaacaacucuaacaaaucgcuccaaagcgcaggguucaccgcgggccugaccuacucccaacucaugacccuuaaagaugccaugcugcaacucgacccaaacgccaaaaccuggauggacaucgaaggccgccccgaagaccccguagaaaucgcccucuaccaaccaagcagcggcugcuacauccacuucuucagggaaccaaccgaccuuaaacaauucaagcaagacgccaaauacucccacggcaucgacguaacagaccucuucgccgcccagccgggccucacauccgccgucauagacgcccuccccagaaacauggucaucacaugccaaggaucagacgacauccgcaaacuccuagaaucgcaagggcgcaaagacauaaaacuaauagacauagcccuaucaaaaaccgacuccagaaaauacgaaaacgcagucugggaccaguacaaggaccucugcaacaugcacaccggaaucguagucgagaaaaagaaaagaggcggcaaagaggaaauaacaccacacugugcacucauggauugcaucauguucgacgccgcugucuccggcggaaugaacacuagcguacuccgcgccguucuccccagagacaugguauuccgcacaucaacaccccgcguaguacuauaa

SEQ ID NO: 9742 - RNA, 1710 nt, Artificial Sequence
  derived and/or modified CDS sequence (opt11) from LASV(G2511-SLE-2012;Clade IV)__AIT17295__NP
augagcgccucgaaagaaaucaaaucauuccuauggacacaaucccugcgacgcgagcucuccggcuacugcucaaacaucaaacuacaagucgucaaagacgcccaagcccuccuacacggacucgacuucucagaagucagcaacguacaacgacucaugcgaaaagaacgacgcgacgacaacgaccucaaacgacuccgcgaccucaaccaagcaguaaacaaucucguggaacucaaaucuacacaacaaaaaucaguccucagagucggcacccuaaccucagacgaccuccucauacuagcagcagaccuggaaaaacugaaauccaaaguaauccgcacagagcguccgcucucagccggcguauacaugggcaaccucagcagccaacaacucgaccagcgacgagcccuacuaaacaugaucgguaugggaggcagcaaccagggcgccagagcaggccgcgacggcguaguacgcgucugggacgugaaaaacgccgagcuacucaacaaucaauucggaaccaugcccucccucacccucgcgugccuaacaaaacaaggucaaguugaccucaacgacgccguacaagcccucaccgaccucggccucaucuacaccgcaaaauacccaaacacaagcgaccuagaccggcuaacacaaagccaccccauacuaaacaugaucgacaccaagaaaucaucacucaacauauccggauacaacuucucacucggcgcagcagucaaagccggcgccugcaugcuagacggcggcaacaugcuagaaacaaucaaagucagcccccaaacgauggacggcauacucaaaucaauccuaaaaguaaagaaagcucucggcauguuuaucuccgacaccccaggcgaaagaaaccccuacgaaaacauccuauacaaaauaugccuaucaggcgacggcuggccauacaucgcaagccgaacauccauaacuggccgcgccugggaaaacaccaucgucgaccuugaaucagacggcaaaccacaaaaagccgguagcaacggaagcaacaaaagccuccaaucagccgguuucacagcgggacucacauacagccaacucaugacccuaaaagacgcaaugcuccaacuagacccaaacgcaaaaaccuggauggacaucgaaggccgccccgaggacccagucgaaaucgcacucuaccagccaagcagcggcugcuacauccacuucuuccgugaacccaccgaccuaaaacaauucaaacaagacgcaaaauacagccauggcauagacgucacagaccuauucgccgcccaaccaggccuuaccuccgcaauaaucgacgccuuaccaagaaacaugguaauaacgugccaaggcucagacgacaucagaaaacugcuagaaucccaaggccgcaaagacauaaaacucauagacauagcacuaagcaaaaccgacucucgaaaguacgaaaacgccguaugggaccaguacaaagaccuaugccacaugcacaccggaauagucguagaaaagaagaaacgcggcggcaaagaggaaaucacaccccacugcgcccucauggacugcauaauguucgacgcagccguaagcggcggccucaacaccuccguucuacgcgcaguccuaccccgggauauggucuuccgaaccagcacgccccgggucgugcuauaa

SEQ ID NO: 9743 - RNA, 1710 nt, Artificial Sequence
  derived and/or modified CDS sequence (opt11) from LASV(G2554-SLE-2012;Clade IV)__AIT17299__NP
auguccgccuccaaagaaaucaaauccuuccuauggacccaaucccuacgccgagaacucuccgguuacugcucaaacaucaaacuucaggucguaaaagacgcccaagcucuacuucacggacuggacuucuccgaagucagcaacguacaacgccucaugcgaaaagaacgucgcgacgacaacgaccucaaacgccuacgcgaccucaaucaagccguaaacaaccucguugaacuaaaaagcacacagcaaaagagcguccuccguguaggcacccucaccuccgacgaccuccucguacucgcggccgaccucgaaaaacuaaaaucaaaggucacccgcaccgaacgaccgcugagcgcaggcguauacaugggaaaccuaagcucucagcaacuugaccaacgaagagcacugcuaagcaugauaggcauguccggcggcaaccagggcgcacgcacuggccgcgacggcgucguucgugucugggacgucaaaaaugccgaacuccuaaacaaccaauucggcacaaugccaucacuaacccuagcaugccucaccaaacaaggacaagucgaccucaacgacguaguccaagcccucacagaccugggccucaucuacacagcuaaauacccaaacaccagcgaccucgaccgccuaacacaaucacauccaauacucaacaugauagacacaaaaaaaucgucauuaaacauuuccggcuacaacuucucgcuuggcgcagcagucaaagcaggcgccugcaugcucgacggcggcaacaugcucgaaaccauaaaaguaagcccccaaaccauggacggcauacucaaaucgauacugaaaguaaaaaaagcccucggcauguucauaagcgacaccccgggugaaagaaauccuuacgaaaacauccucuacaaaaucugccuauccggcgacggauggcccuacaucgcaucacgaaccucaaucaccggccgcgccugggaaaacaccgucgucgaccucgagagcgacggcaaaccacaaaaagccggaagcaacaacuccaacaaaucgcuccaaagcgcaggauucacagccggucucaccuacucacaacuaaugacccucaaagaugccaugcuacaacuggacccgaacgccaaaaccuggauggacaucgaaggccgccccgaagaccccgucgaaaucgcucucuaccaacccucaucaggcugcuacauccacuucuuccgugaacccagcgaccuaaaacaauucaaacaagacgccaaauacagccacggcauagaugucacggaccucuucgccgcacaaccuggccucaccucugccguuaucgacgcccucccccgcaacaugguuaucaccugccagggcuccgacgacauacgcaaacucuucgaaucacaaggacgcaaagacauaaaacucaucgacauagcucucuccaaaacagacucacgaaaauacgaaaacgcaguaugggaccaauacaaagaccucugccacaugcacaccggaguagucguagaaaaaaaaaaacgaggcggaaaagaggagaucaccccacacugcgcccuaauggacugcaucauguucgacgccgccgucucagggggccucaacucccuaguacuaagagccguccuaccacgagacauggucuuccgaacauccaccccccgcgucguccuguga

SEQ ID NO: 9744 - RNA, 1710 nt, Artificial Sequence
  derived and/or modified CDS sequence (opt11) from LASV(G2557-SLE-2012;Clade IV)__AIT17303__NP
augagcgcuucaaaagaaauaaaauccuuccuuuggacacaaucgcuccgacgcgaacuauccggcuacugcuccaacauuaaacuccaaguugucaaagacgcccaagcgcuccuacacggccucgacuucuccgaagucuccaauguccaacgccugaugcgaaaacaacgccgagacgacagcgaccucaaaagacuccgcgaccucaaccaagcagucaacaaccuagucgaacuuaagucaacacaacaaaaauccguccuccgcguaggcacucuaaccagcgacgaccugcuaguccucgccgcagaccuagaaaaacugaaaucgaaaguaauccgcacggaacgaccacucucuagcggaguauacaugggcaaccucagcagccaacagcuggaccaacgucgcgcgcuacucaacaugauaggcauguccggcgguaaccaaggugcccaagucggccgagacggcguaguccgcgucugggacgucaagaacgccgaccuucuaaacaaucaauucggaacaaugccaucgcucacucuugccugccucaccaaacagggccaagucgaucucaacgacguagugcaagcacucaccgaccucggacuaauauacaccgccaaauacccaaacacauccgaccucgaccgccuaguacaaucccacccaauacucaacaugaucgacaccaagaaaagcagccuuaacaucucaggcuacaacuucucacucggugccgcgguaaaagcaggggccugcauguuagacggcggcaacaugcucgaaacgauaaaaguuaguccccaaacaauggacggcauccucaaauccauacucaaagucaagaaagcccuaggcauguuuaucuccgaaaccccaggcgaacgaaaccccuaugaaaacauccuuuacaaaaucugucucucuggcgacggcuggcccuacaucgcaagucguaccucuaucacaggacgcgccugggaaaauacaauaguagaccuagaaagcgacggcaaaccccaaaaagccggcuccaacaacuccaauaaaagccuccaauccgccggcuucaccgcugggcugaccuacucccaacucaugacccucaaagacuccaugcuccaacuagaucccaacgccaaaacauggauggacauagagggccggccagaagaccccgucgaagucgcccuauaccaacccucuuccggcugcuacauccacuucuuccgcgaaccaacagaucucaaacaauucaaacaagacgccaaauauucacacggcaucgaugucaccgaccucuucgccgcacagccuggccuaaccucagccguaaucgaagcccucccccggaacauggucaucacaugccaaggcagcgacgacauccgaaaacuccuugaaucacaaggacgcaaagacaucaaacuaaucgacaucgcgcuaaacaaaaccgacucccgcaaauacgaaaacgccgucugggaccaauacaaagaccuaugccacaugcacacaggcgucgucgucgagaaaaagaaacgcggcggcaaggaagaaaucaccccucacugcgcacucauggacugcaucauguucgacgccgccguauccggcggccugaaaacucucguccuccgagcaguccuaccccgagacauggucuuuagaaccuccaccccaaaagucguccuauga

SEQ ID NO: 9745 - RNA, 1710 nt, Artificial Sequence
  derived and/or modified CDS sequence (opt11) from LASV(G2565-SLE-2012;Clade IV)__AIT17307__NP
augucagccagcaaagaaauaaaaucauuccucuggacccagucccuacgacgugaacucucaggcuacugcucaaacauaaaacugcaaguagucaaagacgcccaagcacuccuacacggccuagacuucuccgaaguuucaaacguccaacgccucaugcgaaaagaacgccgagacgacaacgaccucaaacgacuccgcgaccucaaccaagcagucaacaaccucguagaacucaaaucaacccaacaaaaaucaguacuccgcgucggcacccuaacaucugacgaccuccucauccuagccgccgaucucgaaaaacucaaauccaaagucaccagaacagaacgaccauuaucagcuggcgucuacaugggcaaccucagcucccaacaacuugaccaacgccgagcucuauuaucgaugauuggcaugucaggaggcaaccaaggcgcacgaaccggcagagacggcgucguacgcgucugggacgucaaaaacgcagaacugcucaacaaccaauucgguaccaugcccagccucacacuugccugccuuaccaaacagggacaggucgaccuaaacgaugucguacaagcucuaacagaccucggccucaucuacacagcaaaauaccccaacacaucggaccucgaccgucucacacaaagccaccccauacucaacaugaucgacaccaagaaaucaucccuuaacauaagcggcuacaacuucucacucggcgcagccguaaaagccggcgcaugcaugcuagacggaggcaacaugcuugaaaccaucaaagucagcccacagaccauggacggcauccuaaaauccauauuaaaagucaaaaaagcccuaggaauguucauauccgacaccccuggcgaacgcaaccccuacgaaaacauccuguacaagaucugucucucuggcgaugguuggcccuacauagcgucacgaaccuccaucacuggacgcgccugggaaaacaccgucgucgacuuagaaucagacgggaaacuccagaaaacugguucaaacaacagcaacaaaagccuccaauccgccggcuuuaccgccggccuuaccuauucccaacucaugacccucaaagacgcaaugcuccagcucgauccaaacgcaaaaaucuggauggacaucgaaggccggccagaagacccagucgagaucgcacuauaccaacccuccagcgggugcuacauccacuucuuccgagaacccaccgaccucaagcaauucaaacaagacgccaaauacucccacggaaucgacguaacggaccuauucgcagcccaaccaggccuaacauccgcagugaucgacgcacuaccccgcaacauggucaucacuugucaaggaucugacgacauacgcaaacuucucgaaucucaaggucgaaaagacaucaaacuaauagacauagcacuaaacaaaaccgacagccgcaaauacgaaaacgccgucugggaccaauacaaagaccucugccacaugcacacaggaguagucgucgaaaaaaaaaaaaaaggcggcaaagaagaaauaaccccacacugcgcucucauggacugcaucauguucgacgcagcaguaagcggcggacucaacaccagcguacugcgggccguacucccacgagacauggucuuuagaaccucaaccccucgagucguccuauaa

SEQ ID NO: 9746 - RNA, 1710 nt, Artificial Sequence
  derived and/or modified CDS sequence (opt11) from LASV(G2587-SLE-2012;Clade IV)__AIT17311__NP
augagcgccagcaaagaaauuaaauccuuccuguggacccaaucacuccgccgcgaacucucaggauacugcucaaacaucaaacuacaaguggucaaagacgcgcaagccuuacuccaugggcucgacuucuccgaagucuccaauguccaacgacucaugcggaaagaaagaagagacgacaaugaccucaaacgacuacgcgaccuaaaccaagccgucaacaaccuagucgaacuaaaauccacccaacaaaaaucaguccucagaguuggcacacuaacuagcgacgaccuccucauacucgccgccgaucucgaaaaacucaaaucgaaaguuauccgcaccgagcggccucucuccgcaggagucuacaugggaaaccucaguagccaacaacucgaucagaggcgcgcccuacucaacaugaucggcaugggcggcuccaaucaaggcgcgcgagcaggacgcgacgggguaguccgaguaugggacgugaaaaacgccgaacuacucaacaaccaauucggcaccaugccaucgcuaacccuagccugccucaccaagcagggacaaguagaccugaacgacgccguccaagcgcucaccgaccucggacugaucuacaccgccaaauaccccaacaccucagaccucgacagacucacccaaucacacccaauccugaacaugaucgacacaaagaaauccucacuuaacauauccgguuacaacuucucacucggcgccgccgucaaagccggcgcaugcaugcucgacggcgguaacaugcuugaaacaaucaaagucucaccccagaccauggacggaauccucaaauccauccuaaaagugaagaaagcccucggaauguucaucuccgacaccccaggagaacgaaaccccuacgaaaacauacucuacaaaauaugccuauccggcgauggcuggcccuacaucgcguccagaacauccaucaccggacgcgccugggaaaacaccgucgucgaccucgaauccgacggcaaaccccaaaaagccgguucaaacggauccaacaaaucccuccagucagccggcuucaccgcgggccucaccuauagccaacuaaugacccucaaagacgcaaugcuccagcucgaccccaaugcaaaaacauggauggacauagaaggcagaccggaagaccccguagaagucgcucuauaccaacccucauccggcugcuacauacacuuuuuccgcgaacccaccgaccuaaaacaauucaaacaagacgcaaaauacucccacggaauagacgucacagaccucuucgccgcacaacccggccucacauccgccguaaucgacgcccuaccacgaaacauggucauaaccugccaaggaagcgacgacauccgcaagcuccuggaaagccaagggcgcaaagacaucaaacuaaucgacauagcccucuccaagaccgacucaagaaaguacgaaaacgcagucugggaccaauauaaggaccuaugccacaugcacaccggcaucguugucgaaaagaagaaacggggcggaaaagaagaaaucacgccccacugcgcccucauggacugcaucauguucgacgcagccgucuccggcggccuaaacaccucaguccuccgcgcaguccucccccgggacaugguauuccgcaccuccacaccccgcguaguccucuaa

SEQ ID NO: 9747 - RNA, 1710 nt, Artificial Sequence
  derived and/or modified CDS sequence (opt11) from LASV(G2612-SLE-2012;Clade IV)__AIT17315__NP
auguccgcuagcaaagaaaucaaauccuuccucuggacccaaagccuacgccgcgaacucuccggauacugcucaaacaucaaacuccaagucgucaaagacgcacaagcgcuacuacacggccucgacuuuucggaagucagcaacguccaacgacucaugcgcaaagaacgaagagacgacaacgaccucaagcgucuacgcgaccucaaccaagccguaaacaaccuaguugaacucaaaagcacacaacaaaaaucaguccuaagaguaggaacccucacaagcgaugaccuccuaauccuagcagcggaccucgaaaaacucaaaucaaaaguaacccgaacugaacggccccuaucagccggcgucuacaugggaaaccucuccucccaacaacucgaucaacgucgggcccuccugaacaugauaggaauguccggauccaaccaaggagcccgcgccggaagagacggaguaguccgcgucugggacgucaaaaacguagaauuacucaacaaccaauucgguaccaugccaagucucacccucgcaugccuaacaaaacaaggacaagucgaccugaacgacgccguacaagcacuaacagaccuaggccugaucuacaccgccaaauaccccaacacaucagaccuagaccgccucacacagucccaccccauacucaacaugauugacaccaagaaaucgucccuuaacaucagcggauacaacuucucccuaggcgcagccgucaaagccggcgcgugcaugcuagacggaggcaacaugcuagaaacaauaaaagucagcccacaaacaauggacggaauccucaaauccauccuaaaagucaagaaagcgcuaggcauguucaucuccgacacacccggagaaagaaaccccuacgaaaacauccuguacaaaaucugccucuccggagacggauggcccuacaucgcuucccggaccaguaucaccggacgcgccugggaaaacacaguuguagaccucgaaagcgacggcaaaccgcaaaaagccgguuccaacucaagcaacaaaucacuccaaucagcaggcuucaccgccggacucaccuacucccagcucaugacacucaaagacgccaugcuccaacucgacccaaaugcaaaaaccuggauggacaucgaaggccgccccgaagaccccguagagauagcccucuaccaaccuucauccggcugcuacauucacuucuuuagagaacccacggaucuaaaacaauucaaacaggacgcuaaauacucacacggcaucgacgugacagaccucuuugcagcccaacccggacugaccucagcggucaucgacgcacuaccacgaaacaugguaaucacuugccaaggaucggacgacauacgcaaacuacucgaaucccaaggaagaaaagacauaaaacucauugacaucgcccucucaaaaacagacucaagaaaauacgaaaacgccgucugggaccaauacaaagaccuaugccacaugcacaccggcaucgucgucgagaaaaagaagaaaggaucaaaagaagaaauaacaccacacugcgcccuaauggacugcauuauguucgacgcagccgucucaggcggccucaacgccuccguccugcgagcaguacuaccacgagacaugguuuuccgcacauccacaccacgugucguacucuaa

SEQ ID NO: 9748 - RNA, 1710 nt, Artificial Sequence
  derived and/or modified CDS sequence (opt11) from LASV(G2615-SLE-2012;Clade IV)__AIT17319__NP
augagcgcauccaaagagaucaaauccuuccucuggacccaaucccuccggagagaacucuccggcuacugcucgaacaucaaacuacaggucgucaaagacgcacaagcccuccuacacggccuugacuucagcgaaguaagcaacguacaacgccugaugcgcaaacaacgacgcgacgacuccgaccucaaacgacuaagagaucuaaaccaagcagucaacaaccuagucgaacuaaaaagcacacaacaaaaauccguacuacgcgucgggacccuaaccagcgacgaccuccucguccuagccgccgaccuagaaaaacucaaauccaaagugaucagaacagaaagaccccuauccuccggcguguacaugggaaaucucaguagccaacagcucgaccaaagacgcgcccuccucaacaugaucggcauguccggcggcaaucaaggagcacaagugggccgcgacggcguaguccgcguaugggacgucaaaaacgcugacaugcucaauaaucaauucggaaccaugcccucccuaacacucgccugccucaccaaacagggacaagucgaucuuaacgacgucgugcaggcccuuacagaccuuggcuuaaucuacacagccaaauacccaaacacaucagaccucgaccgacucgcacagucacacccgauacucaacaugaucgacaccaagaaaagcagccuuaacaucucaggauacaacuucucacucggagccgcagucaaagccggagccuguaugcucgacggaggcaacaugcucgaaacaauaaaagucagcccccaaacgauggacggcauccucaaaucaaucuuaaaagucaagaaagcccucggaauguucauaagcgaaacccccggcgaacgcaacccauacgaaaacauacucuauaaaaucugccucuccggcgacggcuggcccuacaucgccagccggacaucgaucacuggacgagccugggagaacaccaucgucgaccucgaaagcgacggaaaaccccaaaaagcaggcuccaacaacucaaacaaaucccuacaauccgcaggauucaccgcgggccuaacauacagccaacucaugacucuuaaagacucgaugcuccaacucgacccaaacgccaaaaccuggauggacaucgaaggccggcccgaagaccccgucgaagucgcacuuuaccaacccagcuccgggugcuacauacacuuuuuccgcgaaccaaccgaccuaaaacaauucaaacaggacgcaaaauacagccacggcaucgacgucaccgaccucuucgccgcccaaccaggacuaaccagcgcagugaucgaagcacucccgagaaacauggucaucacaugccaaggcagcgacgacauccgaaaacugcucgaaucucaaggccgaaaagacauaaaacucaucgacaucgugcuaaacaaaaccgacagccgcaaauacgaaaacgccgucugggaccaauacaaagaccuaugccacaugcacaccggcguggucguggagaaaaagaaacgcggcggaaaagaagaaaucaccccacacugugcacucauggauugcaucauguuugacgcagccguaucgggcggccuaaaaacaaugguccuacgagccguacucccccgcgacauggucuuccguaccucaaccccgaaggucguacucuaa

SEQ ID NO: 9749 - RNA, 1710 nt, Artificial Sequence
  derived and/or modified CDS sequence (opt11) from LASV(G2723-SLE-2012;Clade IV)__AIT17323__NP
augucagcuuccaaagaaaucaaauccuuccuauggacacagucccuacgucgcgaauugucaggcuacugcucaaacauaaaacuccaagucguaaaagacgcacaagcccuccuacacggacuagacuuuucagaggucuccaaugugcaacgacuaaugcgcaaacaacguagagacgacucggaccucaaacgccuacgagaccucaaccaagcagucaacaaccucgucgaacucaaauccacccaacaaaaauccguccuccgggucggcacccucaccuccgacgaccuucucguacuagcagccgaccucgaaaaacucaaauccaaagucauacgcacugaacgcccccucucauccggcgucuauaugggcaaccuaucaucacaacaacuugaucaaagacgagcccuacucaacaugaucggcauguccggcggaaaccagggagcgcaagugggacgagacggcguaguacgcguaugggacgucaaaaacgcagaccuacucaacaaccaguucggaaccaugccaucccucacccuagccugccucaccaaacagggccaaguagaccucaacgacgucguccaagcccucaccgaccucggacucaucuacaccgcaaaauaccccaacacaagcgaccucgaccgacuagcacagucccaccccauacucaacaugaucgacaccaagaaauccucccucaacaucucaggcuacaacuucagccucggcgccgcaguuaaagcaggagccugcaugcuagacggcggcaacaugcuagaaacaaucaaggucucaccccaaaccauggacggaauccucaaguccauacugaaagugaagaaagcccucggaauguucauauccgaaacccccggagaacgcaacccuuaugaaaacauccucuacaagauaugccuauccggcgacggauggcccuacaucgccagccggacauccauaacaggacgcgccugggaaaacaccauaguggaccucgaguccgacggcaaaccacaaaaagcaggaucaaacaacucaaacaaaucacuccaauccgcaggcuucacagccggucuaaccuacucacaacuaaugacccucaaagacagcaugcuacagcuagauccaaacgccaagaccuggauggacaucgaaggccgcccagaagaccccgucgaggucgcccucuaccaaccuagcagcgguugcuacauacacuuuuuccgcgaacccacggaccucaaacaauucaagcaagacgccaaauacucccacggaaucgacgucacagaccuauuugcggcccaaccgggacuaaccuccgcugucaucgaggcacucccgcgaaacauggucaucacaugccaaggcuccgaugacauccgcaaacuccucgaaagccaaggaagaaaagacauuaaacucaucgacaucgcucuaaacaaaacagacucgcgcaaauacgaaaacgcaguaugggaccaauacaaagaccucugccacaugcacaccggcgucguaguagaaaagaagaaacgcggagguaaagaagaaaucaccccacacugcgcccucauggacugcauaauguucgacgccgccgucagcggcggccuaaaaacccuaguacuaagagccguucucccaagggacauggucuuccgcaccucaacccccaaagucguccuguag

SEQ ID NO: 9750 - RNA, 1710 nt, Artificial Sequence
  derived and/or modified CDS sequence (opt11) from LASV(G2789-SLE-2012;Clade IV)__AIT17325__NP
augucagccagcaaggaaauaaaauccuuucucuggacacaaagccuucgaagagagcuuagcggauacugcuccaacauaaagcuacaggucgucaaagacgcucaagcccuacugcacggccuggauuucucugaaguaagcaacguucagcgccucaugcgaaaacaacgccgagacgacaacgaucucaaacgccuccgugaccucaaccaggcaguuaauaaucuagucgaacucaaaagcacccagcaaaaauccguucuacgggucggcacacuaacauccgacgaccuccuaguccucgccgcagaccucgaaaaacucaaaucaaaaguaacccgcacugagcgaccacucagcgccggcgucuacaugggaaaccucagcucacaacaacucgaccaacgucgcgcccuacucaacaugaucggcaugaccggcggcucaagaggcgcccaagccggcggcgacggugucguccgcgucugggacgucaaaaacgccgaccuccuaaauaaccaauucggcacaaugcccuccuuaacacuagccugccucaccaagcaaggccaagucgaccucaacgacgucguccaagcacucaccgaccucggacuaauauacacggcaaaauacccgaacaccuccgacuuagaccgucuaacccaaucacacccuauccucaacaugaucgacaccaagaaauccagccucaacaucuccggcuacaacuucucgcucggcgccgccgucaaagcgggcgccugcaugcucgacggcggcaacaugcuggaaaccaucaaagugucaccccaaaccauggacggaauccucaaauccauacucaaagucaagaaaagccuuggcauguucaucuccgacaccccaggcgagcgcaacccauacgagaacauccucuauaaaaucugccucuccggagacggguggcccuauaucgccucccgaaccucaaucacuggccgugccugggaaaacacagucgucgaccucgaguccgacggcaaaccucaaaaagccggaggcaacaacuccaacaaaucacuccaaagcgcaggcuucacagccggccugaccuacucacaacuuaugacccucaaggacacaaugcuacagcucgaccccaacgcaaaaacauggauggacaucgaaggccguccagaagacccagucgaagucgcucucuaccaaccauccuccggcugcuacauccacuucuuccgugaaccaaccgaccucaagcaauucaaacaagacgccaaauacucucauggcauagacguaaccgaccucuucgcagcgcaaccaggccucacauccgccgucauagaagccuuacccagaaacaugguaauaacaugccaaggguccgaugacauccgcaaacuccuagaaucacaaggacgcaaagacaucaaacuaauagacaucgcccuaucaaaagucgacucccgaaaguacgaaaacgccgucugggaccaauacaaagaccuaugccacaugcacaccggcgucgucguagagaaaaagaaacgcggaggcaaagaagaaaucacaccccauugcgcccuaauggacugcauaauguucgacgcggcagucuccggaggacuaaauacccucguccuacgcgcaguccucccccgugacaugguauuccgcacauccacccccaaagucguccucuaa

SEQ ID NO: 9751 - RNA, 1710 nt, Artificial Sequence
  derived and/or modified CDS sequence (opt11) from LASV(G2868-SLE-2012;Clade IV)__AIT17329__NP
auguccgccagcaaagaaaucaaauccuuccuauggacccaaucccuaagacgcgaacucucaggcuacugcuccaacauaaaauugcaaguagucaaggacgcacaagcgcuccuccacggccucgacuucuccgaagucuccaacguccaacgacugaugcgaaaagaaagacgagacgauagcgaccucaaacgccuacgcgaccucaaccaaaccgucaacaaccuagucgaacuaaaaagcacccagcaaaaaucaauccuaagaguaggaacacucacauccgacgaccuacuaauacucgcugccgaccuagaaaaacuaaaauccaaaguuauacguaccgaacgcccccucucagccggcguuuacauggggaacuuauccucccagcaacuugaccaacgacgagcccuccucaacaugaucgggaugucaagcggcaaccaaggcgcccaagcgggcagggacggagucguacgcgucugggacgucaagaacgcagagcuacuaaauaaccaguucggcacaaugccaucucucacccuugcaugccuaaccaaacaaggacaagucgaccuuaacgacgccguccaagcccucacagaccuaggccuaaucuacaccgccaaguaucccaacacauccgacuuagaccgucucacccaaucacaccccauccucaacaugauagacacaaagaaaucaucccucaacauaagugguuacaacuucucccucggcgcagccgucaaagccggcgcaugcaugcucgacggcggcaacaugcuugaaacaaucaaagucucaccacaaacaauggacggaauccucaaaucaauccucaaagucaagaaagcacuaggcauguucaucucagacaccccaggcgaacgcaauccauacgagaacauacucuacaaaaucugccuauccggcgacggcuggcccuacauagccagccgcaccucuaucaccggacgcgccugggaaaacaccgucgucgaccucgaaagcgacggcaugccccaaaaagccggauccagcagcucaaacaaaucacuccaaucugccggcuuugucgccggccucaccuacucccaacuaaugacacucaaagacgccaugcuacaacucgacccaaacgccaaaaccuggauggacaucgaaggccggcccgaagaccccguagaaaucgcacucuaccaaccguccucuggaugcuauauucacuucuucagagaaccaaccgaccuaaaacaauuuaaacaagacgccaaauacagccacggcaucgacgucacggaucucuucgccgcacaacccggccucaccagcgcagucauagacgcccucccccgcaacauggucauaaccugccaaggcagcgacgacauuagaaaacuccuagaaagccaaggacgcaaagacaucaaacucauagacauagcccugucuaaagcagacucucgcaaauacgaaaacgccgucugggaccaauacaaagaccucugucacaugcacaccggugucgucguagagaaaaagaaacgcggaggcaaagaggaaauaaccccgcacugcgcccucauggacugcaucauguacgacgccgcagucagcgguggacucaacacaaguguacuccgcgcaguccuacccagagacauggucuuccgcacuucaacaccccgggucguccuauaa

SEQ ID NO: 9752 - RNA, 1710 nt, Artificial Sequence
  derived and/or modified CDS sequence (opt11) from LASV(G2903-SLE-2012;Clade IV)__AIT17333__NP
auguccgcaagcaaagaaaucaaaucauuccucuggacccaaucccuaagacgcgagcuuuccgguuacugcucuaacaucaaacuccaaguagucaaagacgcccaagcccuacuccacggccuugacuucagcgaaguuuccaacguccaacgccucaugagaaaagaacguagagacgauaacgaccuuaaacgucuccgcgaccucaaccaggcagucaacaaccucgucgaacucaagagcacccaacagaaguccguccuacgcguaggcacacucaccuccgacgaccugcuaauccuggccgccgaccucgaaaaacucaaaagcaaagucacacgcacagagcgcccccuaucagcaggagucuacaugggcaaccugagcucccaacaacucgaccaacgccgcgcacuacucaacaugaucggcaugucuggaggaaaccaaggugcccgagccgggcgagacgggguaguacgggucugggacgucaaaaacgcagaacuccucaacaaccaguucggaaccaugccaucacucacucuagccugccuaacaaaacaaggacaaguagaccucaacgacgccguccaagcccucaccgaccuuggacucaucuacacagcaaaguacccaaacacgagcgaucuagaccgccuaacacaaucacacccgauccuaaacaugaucgacacuaagaaaucaagucucaacaucagcggcuacaacuucucucuaggagccgccgucaaagcuggcgccugcaugcuagacggcgguaacaugcucgaaaccaucaaaguaagcccccaaacaauggacuccauccucaaaucaauccucaaagucaagaaagcacuaggaauguucauaucggacacccccggcgaacgcaaccccuacgaaaacauccuguacaaaauauguuuauccggcgacggauggccauacauagcuucacgaaccucaauaaccgggcgagccugggaaaauacagucgucgaccuagaaagcgacggcaaaccccaaaaagcaggcucaaacaacuccaacaaaucccuccaaucagcaggcuucgccgccggacuaacauacucacaacugaugacacucaaagacgccaugcuccaacuagaccccaacgcaaaaacauggauggacaucgaaggccggcccgaagacccugucgaaaucgcucucuaccaacccagcuccggaugcuacauccacuucuuccgagaacccaccgaccuaaaacaauucaagcaggacgcaaaauacucucacggaaucgacgucaccgaucucuucgccgcccaaccuggccucacaucagcagucauagacgcccucccccgcaacaugguaaucacaugucaaggcagcgacgauaucagaaaacuacucgaaagccaaggccgcaaagacaucaaacuaaucgacaucgcccuguccaaaaccgacucaagaaaauacgagaacgccguaugggaccaguacaaagaccucugccacaugcacacaggaaucgucgucgaaaagaagaaacgcggcggcaaagaagaaaucacaccccacugcgcucuaauggacugcaucauguuugacgccgcaguaucagggggccucaacaccagcgugcuccgcgccguccuacccagagacauggucuuccgcaccuccacaccccgaguagucuuauaa

SEQ ID NO: 9753 - RNA, 1710 nt, Artificial Sequence
  derived and/or modified CDS sequence (opt11) from LASV(G2906-SLE-2012;Clade IV)__AIT17335__NP
augagcgccucaaaagagaucaaauccuuccucuggacccaaucacuccgccgcgaacuaagcggcuacugcagcaacauaaaacugcaaguaguaaaagacgcccaagcccuccuccacggccucgauuucucggaagucucaaacguccaacgucucaugcgcaaagagcgacgcgacgacagcgaccuaaaacgccuccgcgaccucaaccaagcuguaaacaaccucguagagcuaaaaucaacccaacaaaaauccauccuacgagucggcacucuaaccuccgacgaccuccuaauacuagcagccgaccucgaaaaacuaaaaagcaaagucacccgaaccgaacgaccacucuccgccggcguauacaugggcaaccucucaucccaacaacucgaccaacgucgggcacuccucuccaugaucgguauguccucagggguucaaggcgcccgcgcagggcgugacggcguaguacgagucugggaugugaaaaaugccgaacugcuuaacaaucaauucggcaccaugcccagccucacacucgccugccucaccaaacaagggcaaguagaccuaaacgacgucguccaagcucucacagaucucggacucaucuacacagccaaauacccgaacacuuccgaccucgaccgcuuaacccaaagccacccaauccugaacaugaucgauaccaagaaauccucccucaacaucucaggcuacaacuucucacuaggcgcugcaguaaaagccggugcuugcaugcuagacggaggcaacaugcuggaaaccaucaaagucagcccccaaacaauggacggcauccucaaaagcauccuaaaaguaaagaaagcucugggcauguucaucucagaaacaccaggggaacgaaaccccuacgaaaacauacucuacaaaaucugccuaucaggagacggguggcccuacauagccagccgaaccuccaucacaggccgagccugggagaacacaguugucgaccuagaaagcgacggcaaaccccaaaaagccggcuccaacaauucuaacaaaucacugcaauccaccggcuucgccgccggacuaacguacagucaacucaugacccugaaagacgccaugcuacaacuagaccccaacgccaaaaccuggauggacauagaagggcguccagaagaccccgucgaagucgcccuauaccaacccuccucaggcuguuacauucacuucuuccgcgaacccacggaccuaaaacaauucaaacaagacgcaaaauacucccacggcauagacguaaccgaccucuucgccgcccaacccggccucacguccgcaguaaucgacgcccucccccgaaacauggucauaaccugccagggcucagacgacaucaagaaacuacucgaaucucaaggccgaaaagacauuaaacuaaucgacauugcccucucaaaaacagacagccgcaaauacgagaacgccgucugggaccaauacaaagaccucugucacaugcacaccggagucgucgucgaaaagaagaaacgcggcggcaaagaagaaaucacuccccacugcgcccucauggacugcaucauguucgacgcagcgguaucgggaggacugaacaccuccguacuccgagccguacucccccgugacauggucuuccgaaccucuacccccagagucguccucuaa

SEQ ID NO: 9754 - RNA, 1710 nt, Artificial Sequence
  derived and/or modified CDS sequence (opt11) from LASV(G2944-SLE-2012;Clade IV)__AIT17341__NP
augucagcaucaaaagaaaucaaaucauuccuuuggacccagagccuccgccgcgaacucuccggcuauugcaguaacauaaaacuccaagucgucaaagacgcccaagcccuccuccacggccuagauuucuccgaagucuccaacguccaacgccucaugcgaaaagaacgaagagacgacaacgaccucaaacgccucagagaccuuaaccaagcagucaacaaccucguagaacuaaaauccacccaacaaaaaucaauccuccgcgucgguacgcucacaagcgacgaccuccucauccucgccgccgaccuagaaaaacuaaaauccaaagucacccgcaccgaacgaccccucuccgcgggcgucuauaugggaaaccucagcucccaacaacucgaccaacgccgcgcccuauugaauaugaucggaaugagcggcggaaaucaaggcgcccgagcaggccgagacggcgucguccgaguaugggacgucaaaaacgcagaacuccuaaacaaccaguucggaaccaugccaagccuaacccuagccugccugaccaaacaaggacaaguagaccucaacgaugcaguccaagcccuaacagaccucggacucaucuacaccgccaaauacccuaauaccagcgaccucgaccgccuaacccaaucccacccuauacuaaacaugaucgacaccaagaaaucaagccucaacaucagcggauacaacuucagucuaggagcagccguuaaagccggagcauguaugcuagacggaggcaacauguuggaaaccauaaaaguaucaccgcaaaccauggacggcauccucaaaucaauccugaaagugaagaaagcccucggcauguucaucuccgacgcccccggcgaacgcaacccauacgaaaacauacuauacaaaaucugccucucaggcgacggcuggcccuacaucgccagccgcaccucaauaaccggccgcgccugggaaaacaccgucguagaccucgaaagcgacggcaaaccucaaaaagccggcucaaacggcucaaacaaaucccugcaaagcgccgguuucaccgcaggccuaaccuacucacagcuaaugacccucaaagacgcaaugcuccaacucgaccccaacgccaaaacauggauggacaucgaaggccgccccgaagaccccgucgaaaucgcguuauaccaacccuccagcggcugcuacauccacuucuucagggaacccaccgaccucaaacaauucaaacaagacgcuaaauacucccacgguaucgacguaacagaccucuucgcagcucaacccggccucaccucagcaguuaucgacgcccuucccagaaacaugguaauaaccugccaagguucagacgacauacgcaaacucuucgaaucucaaggacgcaaagacauaaaacuaaucgacaucgcccucucaaaagcagacucccgcaaauacgaaaaugccguuugggaccaauacaaagaccuaugucacaugcacaccggaguaguagucgagaaaaagaaacgcggcggcaaagaagaaaucaccccgcacugcgcacuaauggacugcauaauguucgacgccgccguauccggcggccucaacaccagcguccuacgagcaguccuaccgcgcgacaugguauucagaaccucaacuccccgagucguccucuag

SEQ ID NO: 9755 - RNA, 1710 nt, Artificial Sequence
  derived and/or modified CDS sequence (opt11) from LASV(G3010-SLE-2013;Clade IV)__AIT17345__NP
auguccgccucaaaagaaaucaaauccuuccucuggacacaaagccuccgccgcgaacucuccggauacugcucaaacaucaaacuucaaguagucaaagacgcccaggccuuacuacacggucuggacuucagugaaguuuccaacguccaacgccucaugcgaaaagaaagacgcgacgacaacgaccuaaaacgccuccgagaccucaaccaagcugucaacaaccuggucgaacuaaaauccacacaacaaaaaucaauccuacgaguaggcacccucaccucagacgaccuccucauccucgcagccgaucucgaaaaacuaaaaucaaaagucacccgcaccgaacgaccacucuccgccggcgucuauaugggaaaccugucaagccaacaacucgaccaacgccgcgcacuacucagcaugauuggcaugucaucaggcguccaaggcgcccgcgccggccgugacggcguaguacggguaugggacguuaagaacgcagaacuccucaacaaucaguucggcaccaugcccucccuaacacucgcuugccucaccaaacaaggacaaguagaucuaaacgacgucguacaagcgcuaacugaccucggacuuauauacaccgcaaaauacccaaauacaucagaccucgacagacuaacccaaagccacccaauccucaacaugaucgacacuaagaaauccucccuaaacauaucaggauacaacuucucccucggcgcagcagucaaagccggggcaugcaugcucgacggcgggaacaugcuagaaaccaucaaagucucgccccagaccauggacggcauccuaaaaagcauacucaaagucaagaaagcacucggcauguucaucuccgaaaccccaggcgagcgcaaccccuacgaaaacauucuauacaaaaucugccucucgggggacggcuggccauacaucgccucacgaaccucaaucacugguagagccugggaaaauaccgucguagaucucgaaagcgauggcaaaccucaaaaagcaggaucaaacaacaguaacaaaagccuucaauccgcaggcuuuacggccggccuuacuuacucccaacuaaugacccucaaagacgcaaugcuacaacuagaccccaacgccaaaaccuggauggacaucgaaggccgacccgaggacccugucgaggucgcucuuuaccaacccagcucaggaugcuacauccacuuuuuccgcgagcccaccgaccucaaacaauucaaacaagacgccaaauacucccauggcaucgacgucacagaccuauucgccgcccaaccaggccuuaccucagcagucaucgacgcccuacccagaaacauggucauaaccugccaaggcucagacgacauaaagaaacuacucgaaucccaaggacgcaaagacaucaaacucaucgacauagcacucuccaaaaccgacucacgcaaauacgaaaacgccgucugggaccaauacaaagaccuaugccauaugcacacaggcguugucgucgagaaaaagaaacgcggaggaaaagaagaaaucacaccccacugcgcccuaauggacugcaucauguucgacgcugcagucagcgguggccuaaacacgagcguccuccgcgcaguccucccccgcgacaugguuuucagaaccuccacuccccgagucguucucuaa

SEQ ID NO: 9756 - RNA, 1710 nt, Artificial Sequence
  derived and/or modified CDS sequence (opt11) from LASV(G3016-SLE-2013;Clade IV)__AIT17349__NP
augagcgcaagcaaagaaaucaaaucauuccucuggacccaaagccuccgacgagaacucuccggcuacugcucaaacaucaaacugcaagucgucaaagacgcacaagcacuccuacacggccucgacuucagcgagguauccaacguccaacgccucaugaggaaagagcgccgcgacgacuccgaccucaaacgccuccgugaccucaaccaagccgucaacaaccuggucgaacucaaauccacacaacaaaaaucgauccuccgcguaggcacacucaccuccgacgaccuccuaauccuagccgcagaccucgagaaacugaaauccaaaguaacccggaccgaacgcccccucuccgccggcgucuauaugggaaacuuaucaagccaacaacucgaccaacgccgagcucucuuaaacaugcucggcauguccggcucaaaccaaggugcacgcgccggccgagacggagucguacgcgucugggacgucaaaaacgcagaacuacucaacaaccaauucggaaccaugcccucccucacacuugccugccuaaccaaacaaggacaagucgaccucaacgacgcaguacaagccuuaacugaccucggccuuauauauaccgcaaaauaccccaacaccuccgaccucgacagacuaacccaaucgcaccccauccugaacaugauugacacaaagaaauccucgcucaacaucagcggauacaacuucagccucggcgccgcagucaaagcaggcgcaugcaugcuagacggcggcaacaugcuagaaaccaucaaagucuccccacaaaccauggacggcauccuuaaguccauacucaaagucaaaaaggcccucggaauguucaucuccgacacaccgggagaaagaaaucccuacgaaaacauccucuauaaaauuugccuaucaggcgacggauggcccuacaucgcaagcaggaccucaauaacgggaagggccugggaaaacaccgucgucgaccucgaaagugacgaaaaaccccaaaaagcaggaucaaacuccuccaacaagucacuccaauccgccggauuuaccgccggccuuaccuacucccagcugaugacacuaaaagacgcuaugcuucaacuagacccaaacgccaaaaccuggauggacaucgaaggccgccccgaagacccaguagagaucgcacuauaccagcccagcuccggcugcuacauccacuucuuccgagaaccaacagaccucaagcaauucaaacaagacgcaaaauauagucacggcaucgacgucaccgaccuauucgcagcacaaccagggcucacaucagccguaauagacgcccucccucgcaacauggucauaaccugccaaggcuccgacgacauccgcaagcuacuagaaucgcaaggccgcaaagauauaaaacucaucgacaucgcgcuaucaaaaacggacucccgaaaauacgaaaacgccguaugggaccaauacaaggaccucugccacaugcacacaggcaucguagucgaaaagaagaaaagaggcggcaaagaagaaauaaccccacacugcgcgcugauggauugcauuauguucgacgccgcagucagcggcggcuuaaacgcauccguacuccgugccgugcucccuagagacaugguguuccgcacaucaacaccccgcguuguacuguaa

SEQ ID NO: 9757 - RNA, 1710 nt, Artificial Sequence
  derived and/or modified CDS sequence (opt11) from LASV(G3034-SLE-2013;Clade IV)__AIT17351__NP
augagcgccuccaaagaaauaaaaucauuccucuggacacaaucgcuccgccgcgaacucagcggauacugcuccaacaucaaacuacaagucguaaaagacgcccaggcacuccuacacggccucgacuucagcgaaguaagcaacguccaacgccucaugcgaaaacaaaggagggacgacggcgaccucaaacgccuaagggaucuaaaccaagcagugaacaaccuugucgaacucaaauccacccaacagaaaagcguucuccgaguaggaacccucacauccgacgaccuauuaauucuagcagccgaccuagaaaaacucaaauccaaagucauccgaacagaacgcccccuauccgcaggaguauauaugggcaaccuuagcucccaacaacucgaacaacgacgagcacuccucaacaugauuggcaugucuaguggcaaccaaggagcacgaacgggcaaagacggcgucguacgcauuugggacgucaaaaaugcagaccuacuaaacaaccaauucggcacaaugcccucacuaacccucgccugccucacaaaacaaggacaagucgaccucaaugacguaguccaagcccuaaccgaccucggccucaucuacacugccaaauaccccaacacauccgaccuagaccggcucacacaaagccaccccauacucaauauggucgacacauccaaauccucccuaaacaucagcggcuacaacuucucacuaggcgcggcagucaaagcaggggccugcaugcuugacggaggcaacaugcuagaaaccaucaaagucucaccacaaaccauggacggcauacuaaaaucuauacucaaaguaaagaaaucgcuaggcauguucguauccgacacacccggugaaagaaaccccuacgagaacauucuauacaaaaucugccuauccggcgacggcuggcccuacaucgcaucccgaaccaguauaaccggucgggcgugggagaacacgguagucgaccucgaguccaauggcaaaccccaaaaagcaggaagcaacaacagcaacaaaucacuccaauccacuggcuucaccgcaggccucaccuacagccaauuaaugacccucaaagacgccaugcuccaacuggaccccaacgcaaaaacuuggauggacauagaaggccgcccagaagacccagucgaaauagcccuauaccaacccucauccggcugcuacauacacuucuuccgcgaacccacagaccucaaacaauucaaacaagacgcaaaauacucccauggaauagacgucaccgaccucuucgcagcccaaccgggccuaacaucagccgucaucgauacccugccacgcaacauggucauaaccugccagggauccgacgacauccgcaaacuccuagaaucccaaggccgaaaagacaucaaacucaucgacaucgcccuuagcaaaauagacucacgcaaauacgagaacgccgucugggaccaauacaaagaccuuugccacaugcacacaggcgucgucgucgagaaaaagaaacgcgguggcaaagaagaaaucacuccacacugcgcacucauggacugcauuauguucgacgccgccguaucaggaggacuaaacgccagcgugcucagagccguccucccccgcgacaugguuuuccgcaccuccacgccacgcguaguacuauaa

SEQ ID NO: 9758 - RNA, 1710 nt, Artificial Sequence
  derived and/or modified CDS sequence (opt11) from LASV(G3110-SLE-2013;Clade IV)__AIT17361__NP
augagcgccaguaaagaaauaaaaucguuccucuggacgcaaucccuccgacgcgaacuauccggauacugcagcaacaucaaacuccaggucgucaaagacgcccaagcccuacugcacggccucgacuucagcgaaguuagcaacguccaacgccuaaugagaaaagaaagacgcgacgacucagaccuaaaacgacuccgugaccugaaccaagcggucaacaaccucgucgaacucaagagcacccagcaaaaaucaguccuacgagucggaacccuaacauccgacgaccuccucguccuagcugccgaccucgaaaaacuaaagucaaaagucacacgcaccgaacgcccccuaucagccggcgucuacaugggcaaccucuccagucagcaguuagaccaaagacgcgcacuacucaacaugauaggcaugagcggcggaaaccaaggcgcacgcgccggccgagacggagucguacgcauaugggacgucaaaaacgccgagcugcucaacaaccaauucgggacaaugcccucccuaacacucgcaugccugaccaaacaaggucaaguagaccucaacgacgucguccaggcacuaaccgaccucggccuaaucuacaccgccaaauaccccaacaccuccgaccucgacagacuaacgcagucccaccccauacuaaacaugaucgacacaaagaaaucaucccuaaacaucucuggcuacaacuucucccucggagccgccgucaaagcaggcgccuguaugcucgacggcggaaacaugcucgaaacaauaaaagucucaccccaaaccauggacggcauccucaaauccauccucaaaguaaagaaagcacucggaauguucauauccgacacacccggcgaaagaaacccauacgaaaacauacuguacaaaaucugccucuccggcgauggguggcccuacaucgccagccgaaccuccauaaccggccgcgcaugggaaaacaccaucgucgaccucgaaagcgacggcaaaccacagaaaaccaauaacacuaacucuaacaaaucccugcagagcgccggauucgcugccggucuaaccuacucacaacucaugacccucaaagacgcgaugcuacaacuugaccccaacgcaaaaaccuggauggacaucgaaggccgccccgaagaccccguggaaaucgcccuauaccaacccagcuccggcugcuacauccacuucuuccgcgagcccaccgaccucaaacaguucaaacaagacgcgaaauacucccacggcaucgacgucaccgaccucuucgcugcccaaccaggccucaccucggcagucauagacacccuacccagaaacauggucaucacaugccaaggcucagaagacauccgccgccuacuagaaagccaaggacgcaaagauauuaaacuaaucgacauagcccucucgaaaaccgacucccgcaaauacgaaaacgccguaugggaccaguacaaagaccucugccacaugcacacuggcguggucguagaaaagaaaaagaaaggcggaaaagaagaaaucacaccacacugcgcacucauggacugcauaauguucgacgcagcaguaagcggcggccucaacaccucuguacuccgugcaguccuaccccgagauauggucuuucgcacaagcacaccccgcgucguauuauag

SEQ ID NO: 9759 - RNA, 1710 nt, Artificial Sequence
  derived and/or modified CDS sequence (opt11) from LASV(G3148-SLE-2013;Clade IV)__AIT17365__NP
augucagcuucgaaagaaaucaaaucuuuccuguggacacaaucccuacgaagagaacuguccggauacugcagcaacaucaagcuacaggucguaaaagacgcccaagcccuacuccacggacuagacuucagcgaagucuccaacguacaacgacucaugcgcaaggagcgcagagacgacaacgaccucaaacgccuccgagaccuaaaccaagcgguaaacaaccucguagaacucaaaucuacacaacaaaaguccauacucagagucggaacccucacauccgacgaccuccucauccuagcagcagaccucgaaaaacuuaagagcaaagucacccggaccgaacgcccacucuccgccggcgucuacaugggcaaccuauccucccaacaacucgaccaacgacgcgcacuacuuaacaugaucggcaugagcggcuccaaccagggcgcacaagcaggccgcgacggagucguccgcguaugggacgucaaaaacgccgaacuccuaaacaaccaauucggaaccaugcccucacuaacucucgccugccucaccaaacaaggccaaguagaccucaacgaugccguacaagcccucaccgaccugggccucaucuacaccgccaaauaccccaacaccagcgaccuggaccgccuaacccaaucccacccuauacugaacaugauagacaccaagaaauccagccuuaacaucagcggcuacaauuucucacucggugccgcagucaaagccggagccugcauguuagacggaggaaacaugcucgaaaccauaaagguauccccacaaaccauggacggcauccucaaauccauccucaaggugaagaaagcacugggcauguucauaagcgacgccccaggagaacgaaacccauaugaaaacauccucuacaaaaucugccugucgggagauggauggccauacauugcuagccguacaucaauaaccggacgcgcaugggaaaacaccgucgucgaccuagagagcgacggaaaaccccagaaagcugggucaaacggcuccaacaaaucccuccagucagccggauucacagcaggccuuacguacagccagcucaugacccucaaagacgccaugcugcaacuagacccaaaugcuaaaacauggauggacaucgaaggccgcccagaagaccccgucgaaaucgcccucuaccaaccaucaagcggcugcuacauacacuucuuccgggaaccaacagaccucaaacaauucaaacaagacgcaaaauacagccacggaauagacgugaccgaccuauucgccgcccaaccuggacucaccuccgccguuauugacgcgcuaccccgaaacaugguaauaaccugccaaggcagcgacgacaucaggaaacuauucgaaagccaaggccgaaaagacaucaaacucaucgacaucgcccucuccaagacagacucccgaaaauacgaaaacgccgucugggaucaauacaaagaucucugccacaugcacaccggaaucguagucgaaaagaagaaacgcgggggcaaagaagagaucacaccacacugcgcccucauggacugcaucauguucgacgccgccgucuccggaggccuaaacaccuccguacuacgcgccguacuaccacgcgacauggucuuccgaacauccacccccagaguaguccucuaa

SEQ ID NO: 9760 - RNA, 1710 nt, Artificial Sequence
  derived and/or modified CDS sequence (opt11) from LASV(G3151-SLE-2013;Clade IV)__AIT17369__NP
augagcgccuccaaagaaaucaaauccuuccuauggacccaaucacuccgacgcgaacuuucgggauacugcuccaacauaaaacuccagguaguaaaagacgcacaagcccuacuacacggccucgacuucagcgaaguauccaacguccagcgucuaaugcguaaagaacgacgagacgacagcgaccuuaaacgccuucgcgaccuaaaccaagcaguaaacaaccucgucgagcugaaauccacacaacagaaaucaguccuccgcgucggaacccucaccuccgacgaccuccucgugcucgccgccgaccuagaaaaacuaaaauccaaagucaccagaaccgaacgcccgcucucagccggcgucuacaugggaaaccugucuucacaacaacucgaccaacgccgcgcacuccuuagcaugaucggaaugucaggcggcaaccaaggcgcccgcgcuggccgagacggggucgucagaaucugggacgucaaaaacgccgaacuccuaaacaaccaauuuggaacaaugcccucucucacccucgccugccuaacaaaacaaggccaagucgaccugaacgacguuguccaagcccuuacagaccuaggccugauauacaccgccaaguacccaaacacuuccgaccucgacagacugacacaaucccacccaauacucaacaugaucgacaccaagaaaucaucccuaaacaucagcggguacaauuucucccucggagcagccguuaaagccggagcaugcaugcuagacggagggaacaugcuagaaaccauuaaagucucaccccaaaccauggacggcauccuaaaauccauccucaaaguaaagaaagcccuagggauguucauaagcgacaccccgggagaacgcaaccccuacgaaaacauacucuacaaaauaugccucuccggagauggauggcccuacaucgcgucucgcaccucgaucaccggccgagcaugggaaaacacaaucguagaccucgaguccgacggcaaaccccagaaaaccucaaacaccaacucaaacaaaucacuccaaucagccggcuucgccgccggacuaacauacagccaacucaugacacucaaagacgcaaugcuccaacucgaccccaacgccaaaacuuggauggacaucgaaggucgacccgaggaccccgucgaaauagcccucuaccaaccuucauccggcugcuacauccacuucuuccgagaaccgaccgaccucaaacaauucaaacaagaugccaaauacucccacggaauagacguaaccgaucucuucgcagcccaacccggucuaaccuccgccguaaucgacgcacucccgcgcaacauggucauaaccugccaaggaagcgaagacaucagaaaacuccuggagucccaaggcagaaaagacaucaaacuaaucgacaucgcccuauccaaaacagacagucgcaaauacgaaaacgccguuugggaucaauauaaagaccucugucacaugcacaccggcgucguagucgaaaagaaaaagaaaggcggaaaagaagaaaucacaccccacugugcauugauggacugcaucauguucgacgccgccgucuccgguggacucaacaccuccguccuccgagccguccuaccccgcgacauggucuuccgaaccuccacuccccgcgucguccucuaa

SEQ ID NO: 9761 - RNA, 1710 nt, Artificial Sequence
  derived and/or modified CDS sequence (opt11) from LASV(G3157-SLE-2013;Clade IV)__AIT17371__NP
auguccgcauccaaagaaauaaaauccuuccuauggacccaaagccuccgacgcgaacuauccggcuacugcuccaacaucaaacuacaaguaguaaaagacgcccaggcacuccuacacggacuagacuucuccgaagucuccaacguccaaaggcucaugcgcaaagaacgccgagacgacaacgaccuaaaacgccucagagaccucaaccaagccgucaacaaccugguggaacucaaauccacgcagcagaaauccauccucagaguaggcacccucaccuccgacgaccuacuuauucuagcagccgaccuugaaaaacucaaaagcaaagugacccgaacagaaagaccucucucagccggcgucuacaugggcaaccucagcucccaacagcucgaccaaagacgcgcccuucuaaacaugaucggcaugagcggauccaaccaaggcgcacaagccggacgagacggcguaguccgcgucugggacgucaaaaacgcagaacuacuaaacaaccaauucgguaccaugccaucccucacacucgccugccuaacaaaacagggccaagucgaccuaaacgacgccguccaagcccucaccgaccuaggccucauauacaccgccaaauaccccaacacauccgaccucgaccgccucacccaaucacaccccauacucaacaugaucgacacuaagaaauccuccuuaaauaucucaggcuacaacuucucacucggagccgccgucaaagcaggcgcuugcauguuagacggaggcaacaugcucgaaaccaucaaagucagcccccaaaccauggacggaauccuuaaaucaauccucaaaguaaagaaagcccuagguauguucauauccgacgcccccggcgaacgaaaccccuacgaaaacauccucuacaaaaucugucuauccggcgauggcuggccauacaucgccagccgaacauccauaaccggccgugccugggaaaacaccgucgucgaccucgaaagcgacggcaaaccacaaaaagcaggcucaaacuccuccaauaaaucacuccaaagcgcaggauucacagcgggccuaaccuacucucaacuuaugacucuuaaagacgccaugcuccaacuagacccaaaugccaaaacauggauggacauagaaggacgccccgaagaucccgucgaaaucgcucucuaccaacccucauccggcugcuauauccacuucuuccgcgaaccaaccgaucuuaaacaauucaaacaagacgcuaaauacucccacggcaucgacguaaccgaccucuucgccgcacaacccggccucacaagcgccgucaucgacgcccucccgcgcaacauggucaucaccugucaaggcuccgaugacauacguaaacucuucgaaucccaaggccgaaaagacaucaagcucaucgacaucgcacuaucuaaaacugacucacgcaaauacgagaacgccguaugggaccaauacaaggaccucugccacaugcacaccggaaucguaguagaaaagaagaaaagaggagggaaagaagaaaucaccccucacugcgcccuaauggacugcaucauguucgacgcagccgucuccggcggacucaacaccuccguccuaagagccguucucccgcgcgacaugguauucagaacauccacaccacgcguaguccucuaa

SEQ ID NO: 9762 - RNA, 1710 nt, Artificial Sequence
  derived and/or modified CDS sequence (opt11) from LASV(G3206-SLE-2013;Clade IV)__AIT17379__NP
augucagccuccaaagaaauaaaaucuuuccuuuggacccaaucccuaagaagggaacucucaggauacugcucuaacaucaaacuccaggucgucaaagacgcucaagcacuacuccacggccucgacuucagcgaagucuccaacguccaacgccuaaugcgaaaagagcgacgcgacgacagcgaccucaaacgccuccgcgaccucaaccaagccgucaacaaucucguagaacucaaauccacccaacaaaaaucaguacuccgcgucggcacccuaaccuccgacgaccuacucauacucgccgcagaccucgaaaaauuaaaaagcaaggucaccagaaccgagagaccacugagcgccggagucuacaugggaaaccucagcucccaacaacucgaucaacgcagagcacuccucaacaugaucggaaugucauccgguaaccgcggcgcccaagccggccgcgacggcguaguccgagucugggacguaaagaacgcagaacuccucaacaaccaauucggcacaaugcccucacucacccucgcuugccuaaccaaacagggccaagucgaccucaacgaugcaguccaggcccucacagaccuaggccucauauacaccgccaaauacccaaacaccuccgaccuagaucgccugacccagucacacccaauacuaaauauggucgacacuaagaaaucaucccuaaacaucagcggauacaacuucucacucggcgccgccgucaaagccggugccugcaugcucgacggcggaaacaugcuugaaacaaucaaagucagcccccaaacuauggacggaauacuaaaguccauccuuaaagucaagaaagcccucggcauguucaucucugacacaccaggggagaggaaccccuaugaaaacauccuauacaaaauaugccucuccggcgacggcuggcccuacaucgccucacgaacauccaucaccggccgcgcaugggaaaacaccgucgucgaccuagaaucagacggcaaaccccaaaaagcaggcagcaacaacuccaacaaaagccuccaauccgcaggcuucgcagccggccucacauacucacaacuaaugacucucaaagaugcuaugcuccaacucgacccuaaugcaaaaacauggauggauaucgaaggccgacccgaagaccccguugaaaucgcccucuaccaacccuccucaggcugcuacauccacuucuuccgcgaaccaaccgaccuaaaacaauucaaacaagacgccaaauacagccacggcauagacguuaccgaccuguucgccgcucaaccaggccugacauccgcggucaucgacgcccuaccccgcaacauggucaucacgugccagggaagcgacgacauccgaaaacuacuggagucccaaggccggaaagacaucaaacucaucgacauagcccuauccaaaacagacucacgcaaauacgagaacgcaguaugggaccaauacaaagaccucugccacaugcacaccgguaucgucgucgagaaaaagaaacgcggcggcaaagaagagaucacaccccacugcgcucucauggacugcaucauguucgaugccgccguaucagggggacuaaacaccuccguccuucgcgccguccucccaagagacaugguauuuagaaccucuacaccccgaguaguacucuaa

SEQ ID NO: 9763 - RNA, 1710 nt, Artificial Sequence
  derived and/or modified CDS sequence (opt11) from LASV(G3234-SLE-2013;Clade IV)__AIT17389__NP
augagcgcuagcaaagaaaucaaauccuuccuguggacccaaucccuccgccgagaauuaucaggcuacugcuccaacauaaaacuacaagucgucaaagacgcacaagcacuacuucacgggcucgacuucucagagguauccaauguacaacgccuaaugcgcaaacagcgccgagacgacggcgaccucaaacgccuucgcgaccucaaccaagccguaaacaaccuaguagaacucaagagcacccaacagaaguccguccuacgcgucggcacccucacauccgacgaccuacucauucucgccgccgaccucgagaaacucaaauccaaaguaacccgcaccgagcgcccccucucagcaggcgucuacaugggcaaccucuccucacagcaacuagaccaaagacgagcccuccuaaacaugaucggcaugucaggcggaaaccaaggagcacgaacaggcaaggacggcgucguccgaaucugggacgucaaaaacgcagaccuacuaaacaaccaauucggaacaaugccaagccucacacucgcaugccucacaaaacaagggcaggucgaccucaacgacguaguccaagcgcucacagacuuaggccuaaucuacacagccaaauacccaaacaccagcgaucucgacagacucacccaaucccaccccauccuaaacaugaucgacaccuccaaaucaucccucaacauaagcggauacaacuucagcuuaggagcugcagucaaagcaggcgcgugcaugcuagacggcggcaacauguuagaaacuauaaaagucagcccacaaaccauggacggaauacuaaaauccauccugaaagucaagaaaucacugggaauguucauaagcgacacccccggagaacgcaaccccuacgagaacauccucuacaaaauaugccucagcggcgacggauggcccuacaucgccagccgaacaucuaucaccggccgagcaugggaaaacaccguagucgaccucgaauccgacggaaagccucaaaaagccggcuccaacaacucaaauaagucccuccaguccaccggcuucaccgccggccuaacauacagccaacucaugacccugaaagacgcgaugcuucaacucgacccaaacgccaagacauggauggacaucgaaggccggcccgaagaccccguagaaauagcacucuaccaacccagcucaggcugcuacauccacuucuuccgagaacccacagaccucaaacaauucaaacaggacgcaaaauacagccacggcaucgacgucaccgaucuuuucgcagcacaacccggccucaccucagcaguaauagacacccuaccaagaaacaugguaauaaccugccaaggcagcgacgacauccgcaagcuccuugaaagccaaggucgaaaagacaucaaacugaucgacaucgcccuauccaaaacggacucacgaaaguacgaaaacgcagugugggaccaauacaaagaccucugccacaugcacacaggcguaguugucgaaaagaagaaacgcggaggcaaagaagaaauaacuccccacugcgcucucauggacugcaucauguucgacgcagccgugagcggcggacucaacguaucagugcuaagggccguccucccccgcgacaugguauuccguaccuccacaccaagagucguccucuag

SEQ ID NO: 9764 - RNA, 1710 nt, Artificial Sequence
  derived and/or modified CDS sequence (opt11) from LASV(G3278-SLE-2013;Clade IV)__AIT17399__NP
auguccgcauccaaagaaauuaaauccuuccucuggacacaaucccuccgccgcgaacucagcggauacugcuccaacaucaaacuccaaguaguaaaggacgcucaagcccuccuccacggccucgacuucucugaaguuagcaacguccaacgacucaugagaaaacaaagacgcgacgacuccgaucuaaaacgauuacgcgaccuuaaccaagcaguaaacaaccucgucgaacuaaaauccacccaacagaaaagcguccuccgcgucggcacccucaccuccgacgaccuccucguauuagcggccgaccucgaaaaacucaaaucaaaggucauccgcaccgaacgaccccuauccagcggugucuacaugggcaaccucucuucccaacaacuagaucaacgccgagcccuccucaacaugaucggaaugucgggcggcaaccaaggcgcccaagucggacgcgacggagucguccgcgucugggacgucaaaaacgccgaccuacucaacaaccaauucggcacaaugcccucacucacccuugcgugccuaacaaaacaagggcaagucgaccucaacgacgucguccaagcccuaacugaccugggccuuaucuacaccgccaaauaccccaacaccagcgaccuagacaggcuugcgcaaucacacccuauccuuaacaugaucgacaccaaaaagucaucacucaacaucuccggcuacaauuucagccuuggagcagccguaaaagcaggcgcaugcaugcucgacgggggcaacaugcucgaaacaaucaaagucacaccccaaaccauggacggaauacucaaguccauccuuaaaguaaagaaagcacuuggaauguucaucagcgaaaccccgggcgaaaggaacccauaugaaaacauccucuacaaaaucugccugucaggagacggcuggcccuacaucgccucgcgaaccucaaucaccggacgcgccugggaaaacaccguagucgaccucgaaucagacggaaaaccacaaaaagccgguaacaacaacagcaacaaaucgcuacaaagcgcuggcuucaccgccggucucaccuacagccaacucaugacccuuaaagacagcaugcuacagcucgacccaaaugcaaaaacauggauggacaucgaaggccgcccagaagacccagucgaagucgcucuauaccaaccaagcagcggcugcuacauccacuucuuccgcgaaccaaccgaccuaaaacaauucaaacaagacgcaaaauacucccacggcaucgacgucaccgaccucuucgcaacacaacccggucugaccuccgccguaaucgaagcccucccccgcaacauggucauaaccugccaaggcagcgacgacauccgaaaacuccuugaaagccaaggccgcaaagacauaaaacuaaucgacauagcccuuaauaaaaccgacucucgcaaauacgagaacgcggucugggaucaauacaaagaccucugccacaugcacaccggaguagucgucgaaaagaagaaacgaggaggcaaagaagaaaucacaccccacugcgcccucauggacugcauaauguucgacgccgcagucuccggcggauuaaaaacccuagcacuccgcgcaguccucccacgcgacaugguuuuccguaccuccaccccuaaaguaguccuauaa

SEQ ID NO: 9765 - RNA, 1710 nt, Artificial Sequence
  derived and/or modified CDS sequence (opt11) from LASV(G502-SLE-2009;Clade IV)__AIT17127__NP
auguccgccuccaaagaaauaaaauccuuucuauggacccaaucccuucgccgcgaacucuccggcuacugcuccaauaucaaacuccaagucgucaaagacgcccaagcacuacuacacggccuagacuucucagaagucucaaacguccaacgacucaugcgaaaagagagacgcgacgacaacgaccuaaaacgccuaagagaccucaaccaagccguaaacaaccucgucgaacuuaaaagcacgcaacaaaaauccauccuccgaguaggcacccuaaccucagacgaccuacuuauacuagcagcggaccucgaaaaacucaagagcaaggucauccgcacugaacgcccacuauccgcaggcgucuacaugggaaaccucucaucccaacaacucgaccaacgccgggcccuacucuccaugaucggcauguccgguggaaaccaaggagugcgagcaggcaaagacggcgucguacgcguaugggacgucaaaaacgcugaacuccucaacaaccaauuuggaacaaugcccagccucacccuugccugccucaccaaacaaggccaaguagaccuaaacgacgccguacaagcccuaaccgaccuaggacucauuuacacagccaaauacccuaacaccuccgaccuagaccgccucacacaaucccacccgauccuaaacaugauagacaccaaaaaguccucccucaacauauccggcuacaacuucagccucggagcugcagucaaagcaggcgccugcaugcucgacggcggcaacaugcucgaaaccaucaaagucagcccccaaaccauggacggcauacuaaaguccaucuugaaaguaaagaaagcgcuaggcauguucaucuccgacacaccaggagaaagaaaccccuacgaaaacauccuauacaaaauaugccucuccggagacggcuggccauacaucgccucacgcaccuccaucacaggccgugcaugggaaaacaccgucgucgaccuagaauccgacggcaaaccacaaaaagcaggcuccaacaacuccaacaaaucacuccaaucagcuggcuucaccgcuggucuaacauacucccagcucaugacccugaaagaugccaugcugcaacuagacccaaacaccaaaaccuggauggacaucgaaggacgacccgaagauccagucgaaauagcccucuaccaaccaucguccggcugcuacauccacuucuuccgcgaaccaacugaccucaaacaauucaaacaggacgcaaaauacucccacggaaucgacgucaccgaccuauucgcagcacaaccaggcuuaacauccgcugucaucgaugcccucccccgcaacaugguaauuacaugccaaggcuccgacgacauccgaaaacuacucgaaucccaaggacgcaaagacaucaaacucauagacauagcccucaacaaaaccgacucccgcaaauacgaaaacgcagucugggaccaauauaaagaccucugccauaugcacaccggugucgucgucgaaaagaagaaacgaggcgguaaagaagaaauaaccccgcacugcgcccuuauggacugcaucauguucgacgccgccgucucaggcggccucaauaccagcguacuccgggcaguccucccccgggacaugguauuccggacaagcacaccccgcguaguccucuag

SEQ ID NO: 9766 - RNA, 1710 nt, Artificial Sequence
  derived and/or modified CDS sequence (opt11) from LASV(G503-SLE-2009;Clade IV)__AIT17131__NP
auguccgcaaguaaagaaaucaaguccuuccucuggacccaaucguuacgacgagagcucucaggcuacugcuccaacaucaaauuacaagucgucaaagaugcccaagcccuauuacacggccuagauuucucagaaguaagcaacguccagcgccuaaugcgcaaagaacgaagagacgacaacgaccuuaaaagacuacgcgaccucaaccaagcaguaaacaacuuaguagaacugaaauccacccaacaaaaaucuauccucagaguaggaacccucagcuccgacgaccuacucguacuagccgcagaccucgaaaaacugaaauccaaagucaccagaaccgaacgcccccucucagccggagucuacauggggaaccucuccucacaacaacucgaccaacgacgcgcacuucugaacaugauaggaaugucaggcggaaaccaaggagccagggccggccgcgacggcguaguaagaguaugggacgucaaaaaugcagaacuccucaauaaccaauucggcaccaugcccucacugacacucgccugccuaacaaaacaaggacaaguagaccuaaacgacguaguacaagcccucacugaccuaggacuuaucuacacagcaaaauaccccaacaccucggaccucgaccgccucacacaaucccacccaauccucaauaugguagacaccaagaaauccucccuuaacaucuccggcuacaacuucagccuaggagccgccguaaaagccggcgcaugcaugcucgacggaggcaacaugcucgaaaccaucaaaguaagcccacaaaccaucgacgguauccucaaauccauccucaaaguaaagaaagcucucggaauguucauaagcgauacccccggcgaacgcaacccauacgaaaacauccucuacaaaaucugccucagcggcgauggauggcccuacaucgcaucccgaacauccaucaccggccgcgcaugggaaaacaccgucguagaccucgaauccgacgguaaaccccaaaaagcgggcuccaacaacuccaacaaaucccuccaaagcgcaggcuucaccgccggccucaccuacucacaacuaaugacccucaaagacgccaugcuccaacuagaccccaacgccaaaauauggauggacaucgaaggacgccccgaagacccugucgaaaucgcgcucuaccagcccucaucaggaugcuacauacacuucuucagagaacccacagaccuaaaacaauucaaacaagacgcaaaauacucccacggaaucgacguaaccgaccucuucgccgcccaaccaggccuuaccuccgcaguaaucgacgcccuuccacguaacauggucauuaccugccagggcgccgaugacaucagaaaacugcucgaaucccaaggccgcaaagacaucaaacuaaucgacaucgcacuaaacaaagccgauucacgcaaauacgaaaacgccguuugggaccaauacaaagaccuaugccacaugcacaccggugucgucguagagaaaaagaaacgcggcggcaaagaagagaucacaccccacugcgcucuaauggacuguaucauguucgacgccgccgucagcggcggccuuaacaccuccguccuacgcgcaguacucccccgcgacauggucuuccguaccuccacgccccgcguuguucucuaa

SEQ ID NO: 9767 - RNA, 1710 nt, Artificial Sequence
  derived and/or modified CDS sequence (opt11) from LASV(G610-SLE-2009;Clade IV)__AIT17135__NP
augucagcauccaaagaaauaaagagcuuccucuggacccaaucacuccgacgggaacuaagcggcuacugcucaaacauaaaacuccaagucgucaaagacgcacaagcacuacuacacggccucgacuucuccgaaguaagcaacguccaacgccucaugcgaaaagaacgccgagacgacaacgaccuaaaacgccuccgcgaccuuaaccaagccgucaacaaccuagucgaacuaaaaagcacccaacagaaaagcauccuccgagucggcacccucacaagcgacgaccuccuaauccuagcagccgaccucgagaaacucaaaucaaaagucacucgcaccgagcgaccccuaucagcaggcgucuacaugggaaaccucuccucccaacaacuagaccaacgccgcgcacuacucagcaugaucggaaugucuggaggaaaccaaggcgcgcgagcaggacgagacggcgucguacgcgucugggacgucaaaaacgcagaacuccuaaacaaccaauucggcaccaugccaagccuaacccucgccugccucaccaaacaagggcaagucgaccucaacgacgucguccaagcacuaaccgaccucggacugaucuacaccgcaaaauaccccaacaccucagaccuggaccgccuaacccaaagccacccaauccucaacaugaucgacacaaagaaaagcagccuaaacauauccggguacaacuucucacuaggagcugccgucaaagccggagccugcaugcuagacggagggaacaugcuagaaacaaucaaaguaucaccacaaacaauggacgguauacuuaaauccauccuuaaagucaagaaagcccuaggcauguucaucuccgacaccccgggcgaacgaaaccccuacgaaaacauccucuauaaaaucugccuaagcggagacggcuggccauacaucgccagcagaaccuccauaacgggccgcgccugggaaaacaccguagucgaccucgaauccgacggcaaacuacaaaaagcaggcucaaacaauucaaauaaaucacuacaauccgccggauucaccgcaggccuaaccuacucacaacuaaugacccucaaagaugccaugcuacagcuggacccaaacgcaaaaaccuggauggacauugaaggacgcccagaggauccugucgaaaucgcgcucuaccaaccaaguucaggcuguuacauacacuuuuucagagaaccaaccgaucucaaacaauucaaacaagacgcaaaauacucccacggcauagacgucaccgaccucuucgcagcccaaccaggccucacauccgccgugaucgacgcccugccccgcaacauggucauaacuugccaaggcagcgacgacauccgcaaacuccuggaaagccaaggaagaaaagacauaaaacucaucgacaucgcccuaaacaaaacagacagccgaaaauacgaaaaugccguaugggaccaauacaaagaccucugccacaugcacaccggcgucgucgucgaaaagaaaaagaaaggcggcaaagaagagauaacaccccacugcgcacucauggacugcauaauguucgacgccgcagucagcggaggccucaacaccuccgugcuacgcgcaguccuaccaagagacaugguauuccgaaccucuacaccccgugucguccucuaa

SEQ ID NO: 9768 - RNA, 1710 nt, Artificial Sequence
  derived and/or modified CDS sequence (opt11) from LASV(G636-SLE-2009;Clade IV)__AIT17139__NP
augucggccagcaaagaaaucaaauccuuccuauggacccaaagccuacgccgcgaacucuccggcuacugcagcaacauuaaacuacagguagucaaagacgcccaagcacuacuucacggccuggacuucucagaaguaucuaacguacaacgacucaugcgaaaagaaagacgggacgacaacgaccuaaaacgccuccgagaccuuaaccaggccgucaacaaccucgucgaacuaaaaucaacccaacaaaaaucuguccuccgcgucggaacccuuacauccgacgaccuccucauacuagccgccgaccucgaaaaacucaaauccaaagucacccgaaccgaacgcccccuaucugccggcgucuacaugggcaaccuuagcucacaacaacuagaucaacgccgcgcacuccuaaacaugaucggcaugucaggcggaaaccaaggagcccgcgccggccgagacggcgucgucagagucugggacguaaagaacgccgaauuauuaaacaaccaauucggcacaaugcccagccuaacucucgcaugccucaccaagcaaggacaagucgaccucaacgacgccguccaagcccucaccgaccucgggcuaaucuacaccgcuaaguaccccaacaccucagaccucgaccgccuaacacaaagccaccccauccuaaacaugaucgauaccaaaaaguccucgcucaacauaagcggguacaacuucagccucggcgcggccgucaaagccggagccugcaugcucgacggaggaaacaugcucgaaacaauaaaaguuagcccccaaaccauggacuccauccugaaaucaauucuaaaaguuaagaaagcccuaggcauguucaucagcgacaccccaggcgaacgcaaccccuaugaaaacauccucuacaaaaucugccucucuggugacggcuggccauacaucgcuucacgcaccuccauaacaggccgagccugggagaacaccguaguagaccucgagagcgacgguaaaccccaaaaagccggcuccaauaacucuaacaaaucccuacaaucagccggcuucgccgcgggccucacauacucacaacucaugacccucaaagacgccaugcuccaacucgacccaaacgccaaaaccuggauggacauagagggccggccagaagaccccguagaaauagcgcucuaccaacccuccuccgggugcuacauacacuucuucagagaaccaaccgaucucaaacaauucaaacaagacgcaaaauacagccacggaaucgacguaacagaccucuucgcagcacaaccaggccucaccuccgccgucaucgacgcacuaccccgcaacauggucauaaccugccaaggcagcgaugacaucagaaaacuucucgagucccaagggagaaaagacaucaaacucauagacaucgcccucagcaaaacagacagccgcaaguacgaaaacgccgucugggaccaauacaaagaccuaugucacaugcacaccggcaucguagucgagaaaaagaaacgaggcggaaaagaagaaauaacgccccacugcgcacucauggauugcaucauguucgacgccgccgucuccggcggacugaauaccagcguacuacgagccgugcuaccccgugauaugguauuccguaccaccacaccccgcgucguccuguaa

SEQ ID NO: 9769 - RNA, 1710 nt, Artificial Sequence
  derived and/or modified CDS sequence (opt11) from LASV(G676-SLE-2009;Clade IV)__AIT17143__NP
augucagccuccaaagagaucaaauccuuccuauggacccagucgcuccgcagagaacugagcggauacugcagcaacaucaaacuacaaguuguaaaagacgcccaggcccuucuacacggacuggacuucagcgaaguaucaaacguucaacgccucaugcgcaaagaacgucgcgaugacaacgaccucaaaagacuccgcgaccucaaccaagccgucaauaaccuagucgaacucaaaucaacccaacaaaaauccauccuccgcgucggaacacuaaccuccgacgaccuacucauccuagccgccgaccuagaaaagcucaaaucaaaaguaacccgcacagaacggccccucagcgccggcgucuacaugggcaaccucucaagccaacaacuagaccaacgacgcgcccuacuaaacaugaucggcaugucagggagcaaccaaggcgcccgagcaggacgcgacggggucguacgagucugggacgucaaaaacgccgagcuacucaacaaccaauucggcacaaugcccucccuaacccuggccugccugaccaaacaagggcaaguagaccucaacgacgcaguacaagcacuaaccgaccucggccuaaucuacaccgccaaauacccaaacacaagcgaccuugaccgccucacacaaucacaccccauacuaaacaugaucgacacaaagaaaagcucccuaaauauaucuggcuacaacuucucccuaggcgccgccgucaaagcgggcgcauguaugcucgacggaggcaacaugcuugaaacaaucaaaguaagcccucaaaccauggacgguauccuuaaauccaucuuaaaagucaagaaagcacuagguauguucauauccgacaccccaggcgaaaggaacccuuacgaaaacauccucuacaaaauaugccuaagcggagacggauggcccuauauagccucccgcacauccauaacgggccgagcaugggaaaacacagugguggaccucgaauccgacggaaaaccgcagaaagccggaaacaacggaucaaacaaaucccuacaauccgccggauucaccgcaggacucacguacucccaacucaugacccuaaaagacgccaugcugcaacuagaccccaacgccaaaaccuggauggacauagaagggcgaccagaagaccccgucgaaaucgcgcuauaccaacccagcuccgguuguuacauacacuuuuuccgcgaaccaaccgaccuuaaacaguucaaacaagacgccaaauacucccacggcaucgacgucacagaccucuucgccgcccaaccagggcuuaccagcgccgucaucgacgcccuaccccgcaaccucguaauaacaugccaaggcuccgacgacauccgaaaacuccuagaaagccaaggacgaaaagacaucaaacuaauugacauagcacucuccaaaaccgacagccgcaaauacgaaaacgccgucugggaucaguacaaagaccuaugccacaugcacaccggcauugucguagaaaagaagaaacgaggcggcaaagaagagaucacuccccacugcgcacuaauggacugcaucauguuugacgcugcggucucaggcggccucaacaccagugugcuccgcgcaguccugccccgagacaugguauuccgcaccuccacaccccgggucguacuauag

SEQ ID NO: 9770 - RNA, 1710 nt, Artificial Sequence
  derived and/or modified CDS sequence (opt11) from LASV(G692-SLE-2009;Clade IV)__AIT17147__NP
augagcgccuccaaagaaaucaaauccuuccuguggacccaaagccuacgccgggaacuaucaggauauugcucaaacauuaaacuccaagucgucaaagacgcccaagcacuccuccauggccucgacuucagugaaguguccaacguacaacgccucaugcgcaaagaacgucgcgacgacaacgaccuaaaacgacucagagaccuaaaccaagccguaaacaaccucgucgagcucaaauccacccaacaaaaauccguccuaagagucggcacacuaaccagcgacgaccuacucauacuagccgccgaccuggaaaaacucaaguccaaagucacacgcacggaacgcccccuuagcgcaggcguauacaugggcaaccucucaagccaacagcucgaacaacgccgagcccuucucaacaugauaggcauguccggaucaaaccaaggcgcgcaagccggccgcgacgguguagugcgagucugggacgucaaaaaugccgaacuacuaaacaaccaguucggaaccaugccaucccucaccuuagccugccuaaccaagcaaggccaaguugaucucaacgacgccguccaagcucuuacagaccucggacuaaucuacaccgucaaauaccccaacacuuccgaccucgaccgucucacccaaagccaccccauacuaaacaugaucgacaccaaaaaguccucacucaacauaucaggcuacaacuuuucacucggcgcagcaguaaaagccggcgccugcaugcuagacggaggaaacaugcucgaaaccaucaaaguaagcccccaaaccauggacggcauacuaaaauccauacuuaaggucaagaaagcccucggcauguucauauccgacacgcccggcgaaagaaacccauacgaaaacauccucuacaaaaucugccugucaggggacggcuggccuuauauagccucccgcacaaguauaaccggccgcgcuugggaaaacaccguaguagaucuagaaagcgacggcaaaccccaaaaagccgacuccaacagcucaaacaaaucccuccaaucagccggcuucaccgcuggucuaaccuacucccaacuuaugacacucaaagacgcaaugcuacaacuagaccccaacgcaaagacauggauggacauagaaggccgcccagaagaccccguagaaguagcccuauaccagccauccuccggcugcuacauccauuucuuccgcgaacccacggaccucaaacaauuuaaacaggacgcaaaauacucacacggaauagacgucacagaccucuucgcagcccaacccgggcuaacaagcgcgguuauagacgcccuccccaggaacaugguaauuacaugucaaggcuccgacgacauccgcaaacuccucgaaucccaaggccgaaaagacaucaaacuaaucgacaucgcccuaucaaaaaccgacucaagaaaauacgaaaacgcagucugggaccaauacaaagaccuaugccacaugcacacaggaguagucgucgaaaagaagaaacguggcggcaaagaagaaaucacaccacacugcgcccuaauggacugcauaauguucgacgcagccgucuccggcggccucaacaccuccguccucagagccguccuaccccgagacauggucuucagaaccagcacaccccgggucguccuguaa

SEQ ID NO: 9771 - RNA, 1710 nt, Artificial Sequence
  derived and/or modified CDS sequence (opt11) from LASV(G733-SLE-2010;Clade IV)__AIT17155__NP
augucugccagcaaagaaaucaaauccuuccucuggacucaaucacuccgccgcgaacuaagcggauacugcucgaacauuaaacuucaagugguaaaagacgcccaagcccuccuccacggacucgacuucucagaaguaucaaacguccaacgccuaaugcgcaaagagcggcgcgacgacaacgaccucaaacgccuccgcgaccucaaccaagcagucaacaaccucgucgaacucaaaucaacacaacaaaaaucaguacuacgcgucggcacauuaacaagcgacgaacuucucguacucgcagccgaccucgagaaacugaaauccaaaguuaucagaacagagcgaccccucuccgccggagucuacaugggaaaccucuccucccagcaacucgaccaacgacgcgcccuccucagcaugaucggcauguccggcggcaaccaaggcgcccgcacaggccgcgacggcguaguccgaguaugggacguuaaaaacgccgaacuccucaacaaccaauucggaacaaugccaucucuuacacucgcuugccuaaccaaacaaggacaaguagaccuaaacgacgccgugcaagcacuaaccgacuugggccucauauacaccgccaaauaccccaacaccuccgaccuagaccgccucacacaaucacacccaauacucaacaugaucgacaccaaaaagucaagucucaacauaagcggcuacaacuucucacucggcgccgccgucaaagccggcgcaugcaugcuggacggaggaaacaugcucgaaacaaucaaagucucaccccaaaccauggacggaauccucaaauccauacucaaagucaagaaagcccuaggcauguucauaagcgauacacccggcgaacgcaaccccuacgaaaacauccuauacaaaauaugccucuccggagauggauggcccuacaucgccucacgcaccagcaucacgggccgcgcuugggaaaacacaguagucgaccuagaaagcgacggcaaaccacaaaaagcaggcuccaacaauuccaacaaaucgcuucaguccgcuggcuucaccgccggccuaaccuacucacaacucaugacccugaaagacgcuaugcuccaacucgaccccaacgcaaaaacauggauggacaucgagggcagacccgaggaccccgucgaaauagcccucuaccaaccuuccuccggcugcuacauacacuucuucagagaacccaccgaccucaaacaauucaaacaagacgccaaauacucccacggcaucgacgucaccgaccucuucgccgcccagccaggacucaccuccgccgucaucgacgcccuccccaggaacaugguaauuaccugccaaggauccgacgacauccgcaaacuccucgaaucacaaggacgcaaagacaucaaacuaauagacaucgcccuaucaaaaauagacucccgcaaauacgaaaaugccguaugggaccaauacaaagaucugugccacaugcacaccggagucgucgucgaaaagaagaaacgcggcggaaaagaagaaauaacuccccacugcgcacuaauggacugcauaauguucgacgcagccgucuccggaggacuaaacucacucguccuaagagcagugcucccccgcgacaugguauuccgcacguccacaccccgcguaguccuauaa

SEQ ID NO: 9772 - RNA, 1710 nt, Artificial Sequence
  derived and/or modified CDS sequence (opt11) from LASV(G806-SLE-2010;Clade IV)__AIT17161__NP
auguccgccuccaaagaaaucaaaucauuccuauggacccagucacuacgacgugaacuuucaggcuacugcaguaacaucaaacuccaggucguaaaagacgcccaagcccuacuccacggccuggacuucuccgaagugucaaacguccaacgacucaugcgcaaagaacgccgcgacgauaacgacuuaaaaagacuccgugaccuuaaccaagcugucaacaaccucgucgaacucaaauccacccaacaaaaguccauacuccgaguugggacccucaccuccgacgaccuccucauacucgccgcagacuuagaaaaacucaaaucaaagguaacccgaaccgaacgcccacucagcgcaggcgucuacauggggaaccucucaagccaacaacucgaccagagacgcgcccuacucaauaugauaggcauguccggcuccaaucaaggcgcccguacaggccgcgacggcgucguccgagucugggacgucaaaaacgccgaacuacuuaacaaccaauucggcaccaugcccagccucacacucgccugccuaaccaaacaaggccaagucgaccuaaacgacgcaguccaagcccucaccgaucucggccuaauuuacaccgccaaauaccccaacaccagcgaccuagaccgccuaacccagucucacccaauccuaaauaugaucgacaccaagaaaucaucccucaacaucuccggcuacaacuuuucacucggcgccgcagucaaagccggcgcaugcauguuagacggcggcaacaugcucgaaaccaucaaggucucaccacaaaccauggacggcauccucaaaagcauacucaaaguuaagaaagcacuaggcauguucauauccgacacccccggcgaacgcaacccuuacgaaaacauacuauacaaaaucugucuuuccggcgacggcuggcccuacauagccucacgaaccucuaucaccgggagagccugggaaaacaccguagucgaccuagaaagcgacggcaaaccgcaaaaagccggcuccaauagcucaaacaaaucccuccaaucagcaggacucacagccgggcuaacauacucacaacucaugacacuaaaagacgcaaugcugcaacuugacccuaacgccaaaacauggauggauaucgaaggccgcccagaagaccccgucgaaaucgcccucuaccaaccaagcuccggaugcuacauacacuucuuucgagaaccgacagaccucaaacaauucaagcaagacgccaaguacucccacggcaucgacgugaccgaccuauuugcggcccaacccggacucaccagcgccguaaucgacgcccuaccacgcaaccucgucaucacaugccaaggaucggacgacauacgaaaacuccucgaaucccaaggccggaaagauaucaaacucaucgacauagcccuauccaaaaccgacucccgcaaauacgaaaacgccgucugggaccaguacaaagaccucugccacaugcacaccggcauagucgucgaaaagaagaaacgcggcggcaaagaagagaucaccccacacugcgcccuaauggacugcaucauguucgacgcagccgucuccggaggacuuaacgccuccguacuccgagcaguacugccccgcgacauggucuucagaacaagcacaccacgcgucguacucuaa

SEQ ID NO: 9773 - RNA, 1710 nt, Artificial Sequence
  derived and/or modified CDS sequence (opt11) from LASV(G808-SLE-2010;Clade IV)__AIT17165__NP
augagcgccagcaaagaaauaaaaaguuuccuauggacccaaucacuacggcgcgaacucuccggauacugcuccaacaucaaacugcaaguugucaaagacgcccaggcccuacuacacggccuagacuucuccgaagucaacaacguccaacgccuaaugagaaaagaacgacgcgacgauaacgaccugaaaagacuacgcgaccugaaccaagcaguaaacaaccuagucgaacuaaaauccacccaacaaaaaucuauccuacgcgucggcacgcucaccagcgacgaccuacuaauacuggccgcggaccucgaaaaacuuaaaucaaaggucacccgcaccgaacgcccacuaucggcgggagucuacaugggcaaccucuccucccaacaacucgaccaaagacgggcacuccuaaacaugaucggcaugagcaacggcaaccagggcacgcgagccggacgcgacggcgucgugcgcgugugggacgucaaaaacgccgaacuacuaaacaaccaauucggcacaaugccaucccugacccuagccugccugaccaaacaaggccaaguagaccugaacgacguaguacaagcgcucaccgaccuaggccuaauuuacacagccaaauacccaaacaccagcgaccuagaccgccucacacaaucgcaccccauccuaaacaugaucgacaccaagaaaagcucucuaaacaucagcggguauaacuucucacuaggcgcugccgucaaagccggcgccugcaugcucgacggaggcaacaugcuagaaaccaucaaaguaucaccacaaacaauggacggcauacuaaaaucaauccucaaagugaagaaagcacucggcauguucauauccgacacacccggcgaaagaaaccccuacgaaaacauccuguacaaaaucugccucucaggggauggcuggccguacaucgccagcaggacaucuaucaccggacgcgccugggaaaacaccgucgucgaccucgagagcgacggcaaaccccaaaaagccgacucaucaaacagcaacaaaucacuccaaagcgccggcuucacagccggccuaacguacucucaacugaugacccucaaagaugcaaugcuacaacucgaccccaacgccaaaacuuggauggacaucgaaggccgacccgaagaccccgucgaaguagcacucuaccaacccagcucaggcugcuacauacacuucuuccgagaaccaaccgaccuaaaacaauucaaacaagacgccaaauacucccacggaaucgacgucaccgaccuauucgccgcccaaccaggccucacaagugccgucaucgacgcacuacccagaaacauggucauaacgugccaaggcuccgacgacauccgcaagcuccuggaaucacaaggccgaaaggacauaaaacucaucgacaucgcccucuccaaagcagauagcagaaaauacgaaaaugcuguaugggaccaacacaaagaccuaugccacaugcacaccgguguggucgucgagaaaaagaaacgcggcggcaaagaagaaaucacaccccacugugcacucauggacugcauaauguaugacgccgcagucagcggcgggcugaacaccuccgugcuacgcgccguacucccucgagacauggucuuccgaaccuccacaccccgaguaguccucuga

SEQ ID NO: 9774 - RNA, 1710 nt, Artificial Sequence
  derived and/or modified CDS sequence (opt11) from LASV(Guinea Faranah;Clade IV)__AMZ00380__NP
augagcgucagcaaagaagucaaauccuuccucuggacacaaucccuaaggcgcgaacuuuccggcuacugcagcaacaucaaacuucaagugguaaaagacgcacaagcccuucuacacggacucgacuucuccgaagucucaaacguccaacgccugaugagaaaacaaagacgcgacgacagcgaucuaaaacgccucagagaccuaaaccaggccguaaacaaucuagucgagcucaaaagcacucaacagaaaagcguccuccgcguaggcacccucaccagcgacgaccuacuaauccucgccgccgaccuagagaaacuaaaauccaaaguaacccguacggagcgcccccuauccgccggggucuacaugggcaaccuaucaucacaacaacucgaccaacgccgcgcacuccucaacaugaucggaaugaacggcggcaaccaaggcguacaagcaggccgagacggagucguccgcgucugggacgucaaaaacgccgaacuacuuaacaaccaauucgggaccaugccaagccucacacucgccugccuaaccaaacaaggacaagucgaccucaacgacgccguccaagcacuaaccgaccucggccugaucuacacagcaaaguacccaaacacaucggaccuagaccgccuagcacaaucccaccccauccucaacaugauagacacaaagaaauccucccucaacaucuccggcuacaacuucucccucggcgcggcggucaaagccggcgccugcaugcuagacggcggaaacaugcuagaaaccauaaaagucaguccacagacaauggacggcauacuaaaagcaauacucaaagucaaacggacccuagggauguucgucagcgacaccccuggcgaacgcaaccccuacgaaaacauccuguacaaaauaugccucagcggcgacgguuggccauacauagcaucccgaacauccauaaccggccgagccugggaaaauaccguaguagaucucgaaagcgacggcaaaccccaaaaagucggcaacaacggcucaaacaaaucacuccaaagcgcaggcuuuagcgccggacucaccuacagccaacuaaugacccuaaaagacgccaugcuacaacucgaucccaacaccaaaaccuggauggacauagaaggucgcccagaagaccccguagaaguugcacuauaccaacccagcuccggcugcuauauacauuucuuccgcgagcccacagaccucaaacaauucaagcaagacgccaaauacucccacggcauagacgucaccgaccuauucgccgcccagccaggccucacgagcgcagucauugaagcacuaccccgcaacauggucauaaccugucaaggaagcgaagacauccgcaagcuccucgaaucccaaggccgaaaagauaucaagcucaucgacaucgcccuauccaaagcagauagcagaaaauacgaaaacgcaguaugggaccagugcaaagaucucugccacaugcacaccggcaucgucgucgaaaagaagaaacgaggaggcaaagaagaaauaaccccacacugcgcccuaauggacugcauaauguucgacgccgccguauccggcggccuaaacacccaaguccuaagggcaguccuaccaagagacaugguauuccgaacaaguacaccaaaagucguacuauaa

SEQ ID NO: 9775 - RNA, 1710 nt, Artificial Sequence
  derived and/or modified CDS sequence (opt11) from LASV(GUINEA Z-185a;Clade IV)__AMZ00376__NP
augagcgucucaaaagaaaucaaaucauuccucuggacccaaucacuccgacgcgaacuaucaggauacugcuccaacauuaaacuacagguaguuaaagacgcacaagcccugcuacacggacucgacuucagcgaaguaucuaacguacaacgccuaaugcgcaaacaacgccgggaugauaacgaccucaaacgacuacgcgaccucaaccaggcaguaaacaaccuagucgaacucaaauccacucaacaaaaaucuguccuccgcgucggaacccucaccuccgacgaucuacugauccucgccgccgaccucgagaaacucaaauccaaggucacccggaccgaacgcccccuauccgccggaguauacaugggaaaccucuccucucaacagcuugaccagagacgagcacuccuaaacaugauaggcauguccggcggcaaccagggcgcccaaaccggacgagacggggucguccgaauaugggacgucaaaaacgccgaacuacucaauaaccaauucggcaccaugccaucccugacccuugccugccuaaccaaacaaggacaaguugaccucaacgacguagugcaagcccuaaccgaccuuggccucauauacacggcuaaauacccaaacacauccgaccuagaccgcuuaacccaaucccauccaauccucaacaugaucgacacaaagaaaagcucacuaaacaucagcggcuacaacuucagcuuaggcgcggccguaaaagcuggcgccugcaugcuagacggaggaaacaugcuagaaacuaucaaagucuccccacaaaccauggacggcauccucaaaucaauccuaaaagucaagaaagcacuaggaauguucaucuccgacacaccaggcgaacgaaaccccuacgaaaacauccucuacaaaaucugccucuccggcgacggcuggcccuacaucgcuagcagaaccagcauaacaggccgagccugggaaaacaccgucgucgaccucgaaagcggcgaaaaaccacagaaaaucggcuccaacaacuccaacaaaugccuccaauccgcgggcuucaccgccggcuuauccuacucacaacucaugacccuaaaagacgcaaugcuccagcuugaccccaacgccaaaacauggauggacauagaaggacgaccagaggaccccguugaaaucgcucucuaccaacccucauccggauguuacauccacuucuuccgcgaaccaacugaccuaaaacaauucaaacaagaugcaaaauacagccacggaaucgacguaaccgaccucuucgcggcccaacccggccuuaccucagccgucauagaagcccucccccggaacaugguaaugaccugccaaggcagcgacgacauccggaaacuccucgaaagccaaggccgcaaagacauaaaacugauagacaucgcccucuccaaaacagacucccgaaaauacgaaaacgccgucugggaccaauacaaagaccucugccacaugcacacaggcgucgucgucgaaaagaaaaagaaaggaggcaaagaggaaauaacaccccacugcgcccucauggauugcaucauguuugacgcagcugucuccggaggccucaacaccucuguccucagagccguacucccacgcgauauggucuuccguaccuccacccccaaaguaguacuauag

SEQ ID NO: 9776 - RNA, 1710 nt, Artificial Sequence
  derived and/or modified CDS sequence (opt11) from MOPV/LASV reassortant(IGS-1;Clade IV)__AFY05578__NP
augagcgccagcaaagaaaucaagagcuuccuuuggacgcagucguuacgacgcgaacucuccggcuacugcucaaacaucaaacuacaaguagucaaagaugcccaagcccuacuccacggacucgacuucuccgaagucagcaacgugcaacgccuaaugcgcaaagaacgacgcgacgacaacgaccucaaacgacuccgagaccuaaaccaagccgucaacaaccucguagaacuaaaauccacacaacaaaaauccauauuacgagucggcacccucaccagcgaugaucuucuaauacuggccgcagaccucgaaaaacuucgcucaaaagugauucgcaccgaacgcccacucagcgccggaguuuacaugggcaaucucuccagccaacaacucgaccaacgaagggcccuccucaacaugauugggauguccggaggcaaccaaggagcccgagccggacgcgacggcguaguccgcguaugggacgucaaaaacgcagaacuacucagcaaccaauucggcaccaugcccucacucacgcuugccuguuugaccaaacaaggacagguagaucuuaacgacgcaguccaagcacuaacagaccucggccuaaucuacaccgcaaaauaccccaacaccuccgaccuagaccgacucacucaaucgcaccccauccuaaacaugaucgacaccaagaaaucgagccucaacauuagcgguuacaacuucucccuaggcgccgccgucaaagccggugcaugcaugcuugacggcggaaauaugcuagaaaccaucaaaguauccccacaaacaauggacggaauccucaaaucgauucucaaagucaagaaagcccucggcauguucaucucagacaccccaggagaaaggaacccguacgaaaauauccucuacaaaauaugucucucaggcgacggcuggccauacaucgccucccgcacaaguauaaccggacgagccugggaaaacaccguaguagaccuagaaagcgacgguaaaccccaaaaagcagacucuaacaacagcucgaaaucccuccaaagcgcaggcuucacagcgggccuaaccuacagccagcucaugacccucaaagacgcaaugcuccagcucgaccccaacgcgaaaaccuggauggacaucgagggcagaccagaagacccagucgaaaucgcacucuaccaacccuccuccggcugcuacauccacuuuuuccgcgaacccaccgaccuaaaacaauuuaaacaagacgcaaaauacucccacggcauagacguaacagaccucuucgcaacccagccaggccuaaccuccgccgucaucgacgcacucccccgcaacaugguaauaaccugccaaggcucagacgacauccgcaaacuccucgaaucccaaggcagaaaagacaucaaacuuaucgacauagaucucucuaaaaccgacucccguaaauacgagaacgccgucugggaccaauacaaagaccuaugccauaugcacaccggaguuguagucgaaaagaagaaacggggagguaaagaagaaauaacaccccacugcgcccuaauggacugcauuauguucgacgccgcaguaagcggcggccuaaacaccuccguccuccgcgcaguccucccacgcgacauggucuucagaaccuccacacccagagucguccucuaa

SEQ ID NO: 9777 - RNA, 1710 nt, Artificial Sequence
  derived and/or modified CDS sequence (opt11) from MOPV/LASV reassortant(IGS-11;Clade IV)__AFY05589__NP
auguccgccucuaaagaaauaaaaucauuucucuggacccaaucccuacgccgcgaacuuuccggcuacugcucaaacauaaaacuccaagucguaaaagacgcucaagcccuucuccacggccuggacuucuccgaaguuuccaauguacaacgccuaaugcgcaaagaacgccgagacgacaacgaccucaaacgccuacgcgaccucaaccaagcugucaauaaccuagucgagcucaaaagcacccaacaaaaauccauccuccgcguuggaacccucaccuccgacgaccuacucauacucgcagcagaccuagagaaacucaaguccaaagucaucagaaccgaacgcccccuauccgcaggcgucuacaugggcaaccuauccucacaacaacucgaccaacgcagagcucuccucaacaugauaggcauguccggcggaaaccaaggagcaagagccggccgagacggcgugguucguguaugggacgucaaaaacgcagaacuccucuccaaccaauucggcaccaugcccucccuaacccucgcaugccuaacaaaacaaggccaagucgaccucaacgacgcaguacaagcccucacggaccucggacucauauacaccgcaaaauaccccaacaccucagaccucgaccgacuaacacaaucccaccccauacuaaacaugaucgacaccaaaaaguccagccucaacaucuccggcuacaacuucucccucggcgccgcaguaaaagccggcgcaugcaugcuagacggcggaaacaugcuagaaacaauaaaagucucaccacaaaccauggacggcauccuuaaaaguauacucaaaguaaagaaagcacucggaauguucaucucugacaccccuggcgagcgcaaucccuacgaaaacauccuguacaaaaucugccucagcggagauggcuggccauacaucgccucccgcaccagcaucaccggacgagcuugggaaaacacagucguggaccuagaaagcgacggcaaaccacagaaagcugacagcaacaacagcagcaaaucccuccaguccgcaggcuucaccgcuggacuaaccuacucccaacucaugacacugaaggacgccaugcuacaauuagacccgaacgcaaaaaccuggauggacaucgaaggccgcccggaagaucccgucgaaaucgcccuauaccaaccaagcuccggaugcuauauccacuucuuccgcgaacccaccgaccuaaaacaauucaaacaagacgccaaauacucccacggaaucgacgucacagaccucuucgcuacacaacccggccuaaccucugccgucaucgacgcccuuccaagaaacaugguaauaacaugccaagguuccgacgacauacgcaagcuccuugaaucacagggccguaaagacaucaaauuaaucgacaucgaccuaucaaaaaccgacucgcgcaaguaugaaaacgcuguaugggaucaauacaaagaccucugccacaugcacacuggugucgucgucgaaaagaagaaacgcggaggcaaagaagaaauaacaccccacugugcacucauggacugcauaauguucgacgccgcagucuccggcggccuaaauacaucuguacuccgcgccguucucccccgcgauaugguuuuccgcaccucaacuccccgcgucguccucuaa

SEQ ID NO: 9778 - RNA, 1710 nt, Artificial Sequence
  derived and/or modified CDS sequence (opt11) from MOPV/LASV reassortant(IGS-12;Clade IV)__AFY05591__NP
auguccgcaagcaaagaaaucaaaucauuccuguggacccaaucccuccgacgagagcuguccggauacugcagcaacaucaaacugcaagucgucaaagacgcccaagcacuacugcacggacucgacuucucggaagucucaaacguccaacgccuaaugcgcaaagaacgccgggacgacaacgaccuaaaacgccuccgggauuuaaaccaagccgucaacaaccuagucgaacucaagagcacccaacagaaaagcauucuccgcgucggcacacucacuuccgacgaccuccucauccucgcagcagaucucgagaaauuaaaaucgaaagucauccgaacagaacggccacucucggccggagucuacaugggcaaccuuucaucccaacaacuagaccaacgacgagcacuacugaacaugauaggaaugucuggagguaaccaaggcgcccgagcagggcgcgacggcguaguccgcgucugggacgucaaaaacguagaacuccucucaaaccaauucggaaccaugcccucccucacccucgccugccuaacaaaacaaggacaaguagaccucaacgacgccguccaagcucucaccgacuuaggccucaucuacacagcaaaauacccaaacaccucagaccucgaccgccuagcccaaucacacccuauccugaacaugaucgacacaaagaaaucaucccuaaacauauccggauauaacuucucacucggagccgcugucaaagccggagccugcaugcuggacggcggcaacaugcuagaaaccaucaaagucuccccacaaaccauggacggaauccuaaagucaauucucaaagucaagaaagcacucggaauguucaucagcgacaccccaggcgaacgcaaccccuacgaaaacauacuauacaaaauaugccucuccggcgacggauggccauacaucgccucacgcaccaguaucacaggacgcgccugggaaaacacgguagucgaucucgaaagcgacggaaaaccccaaaaagcagacucuaacaacuccucaaaaucacuccaaucagcaggauucacagcaggccucaccuacucccaacucaugacacucaaagacgcaaugcuccaacucgacccaaaugccaaaacguggauggacaucgaaggacgucccgaagaccccgucgaaaucgcacucuaccaaccaagcagcggcugcuacauacauuucuuccgcgaacccaccgaccucaaacaauucaaacaagacgcaaaauacucccacggcaucgacgugaccgaccucuucgccacacaaccgggacugaccucggccguaaucgacgcccucccccgaaacauggucauaacaugccaaggcuccgacgauauacgaaaacuccucgaaucacaagggcgaaaagauaucaaacucauagacaucgaccucuccaaaacagacucccgcaaauacgaaaacgcaguuugggaccaauacaaagaccuaugccacaugcacaccggagucgucguggagaaaaagaaaaggggcggaaaagaagagauaaccccucacugcgcacucauggacugcauaauguucgacgcagccgucuccggcggccuaaacacaaguguccucagggcagugcucccccgcgacaugguauucagaaccuccacccccagggucguccuauaa

SEQ ID NO: 9779 - RNA, 1710 nt, Artificial Sequence
  derived and/or modified CDS sequence (opt11) from MOPV/LASV reassortant(IGS-14;Clade IV)__AFY05595__NP
augagcgccuccaaagaaauaaagagcuuccucuggacacaaucacuccggcgcgaacuauccggcuacugcucaaacaucaaacuccaaguaguaaaagacgcccaagcucuacuccacggccuggacuucucagaagucucaaacguacaacgucuaaugagaaaagaaagacgcgacgacaacgaccucaagagacuaagggaccuaaaucaagccgucaacaaccuagucgaacuaaaaucgacacagcaaaaguccauacuacgcgucggcacccucaccagcgacgaccuacucauacucgcagccgaccuagaaaaacucaaaagcaaagucaucagaaccgaacgcccacuuucagccggcgucuacaugggcaaccuguccucccaacagcuagaccaacgccgagcccuccucaacaugaucggcauguccggcggcaaccaaggagcccgcgccggacgugacggagucguccgagucugggacguaaagaacgccgaacuccucucgaaccaauuuggcacaaugccaagccucacccucgccugccuaaccaaacaaggacaaguagaccuaaacgacgcaguacaagcccuaaccgaccuaggccucaucuacaccgccaaauacccaaacacauccgacuuagaccgccuagcccaaagccacccaauacuaaacaugaucgacacaaagaaauccagccugaacauauccggcuacaacuucucccucggagccgcagucaaagcaggcgccugcaugcucgacggcggcaacaugcuagaaacaauaaaaguaucaccccagaccauggacggaauccucaaauccauacucaaaguaaagaaagcccucggaauguucauauccgacacccccggcgaacgcaaccccuacgaaaacauccuauacaaaauaugcuuaucuggagacggcuggcccuacaucgccucccgcaccagcaucacaggccgcgcaugggaaaacaccgucgucgaccucgaaucggacggaaaaccccagaaagcagacucaaacaacucauccaaaucucuccaaagcgccggauucaccgcgggccucaccuacucucaacucaugacccucaaagacgcgaugcuccaacuagaccccaacgccaaaaccuggauggauaucgagggccgucccgaggaccccguagaaauagcacucuaccaacccuccuccggaugcuacauccacuucuuccgagaacccaccgaccucaaacaauucaaacaagacgccaaauacagccacggaaucgacgucaccgaccucuucgccacacaacccggccuaaccucagccgucauagacgcacugccccgaaacauggucaucacaugccaaggaucugacgacauacgcaaacuacucgaaucccaaggccgcaaagacauuaaacucaucgacaucgaccucuccaaaaccgacuccagaaaauacgagaacgcagucugggaccaauacaaagaccugugucauaugcacaccgggguugucgucgagaaaaagaagcgcgguggaaaagaagaaaucacgccccacugcgcccuaauggacugcaucauguucgacgccgccgucucaggcggacuaaacaccucaguccuccgcgcuguauugccaagagacauggucuuucgaaccucaacaccacgcguaguacuauaa

SEQ ID NO: 9780 - RNA, 1710 nt, Artificial Sequence
  derived and/or modified CDS sequence (opt11) from MOPV/LASV reassortant(IGS-23;Clade IV)__AFY05610__NP
augucagcaagcaaggaaaucaagagcuuccuauggacccaaucacuaagacgagaacucuccggauacugcuccaacaucaaacuccaagucgucaaagacgcccaggcccuccuccacggacucgacuucagcgaaguaucgaauguccaacgacugaugcgcaaagaacgccgagacgacaacgaccuaaaacgccuccgcgaccucaaccaagccguaaacaaccucgucgaacuuaaauccacccagcagaaaagcauacugcgcgucggaacccuaacauccgacgaccuccuaauacucgccgcggaccuagaaaaacuuaaaagcaaagucauccgcaccgaacgaccccucagcgccggcguauacauggggaacuuauccucacaacaacucgaccaaagacgagcccuacucaacaugauaggaaugagcggcggaaaccaaggagcacgcgccggacgagacggcguuguccgagucugggacgucaaaaacgccgaacuccucuccaaccaauucggcacaaugcccucacucacacucgccugccuuacgaaacaaggccaaguagaccucaacgacgcaguccaagcucuuaccgaccucggcuuaauuuacaccgccaaauacccaaacaccuccgaccucgaccgacucacccaaucccaccccauucucaacaugaucgacaccaagaaauccagccugaacauauccgguuacaacuucucacucggagccgccguaaaagccggcgcaugcaugcuagacggcggaaacaugcucgagacaauaaaagucaguccacaaacaauggacggcauccuaaaauccauucucaaaguuaagaaagcacucggcauguucaucagcgacacucccggcgaacgaaaccccuacgaaaacauccucuacaaaaucugccucuccggugacggcuggcccuacauagcauccagaacaucaaucacaggucgcgcaugggaaaacacagucguagaccuagaaucagacggcaaaccccaaaaagccgacuccaacaacucaagcaaaucacuccaaucagccggcuucaccgcuggccuaacauacucccagcucaugacucucaaagacgccaugcuccaacuagaccccaacacaaaaacguggauggacaucgaaggccgcccagaggacccugucgaaaucgcgcuguaccaacccuccuccggcugcuacauccacuucuucagagaacccaccgaccuaaaacaauuuaaacaagacgcaaaauauucacacggcaucgacguaaccgaccucuucgccacccaaccaggccuaaccagcgcaguuaucgacgcccuaccccgcaacauggucaucacuugccagggcuccgacgacauccgcaaacuccucgagucacaaggacgaaaagacaucaaacuaaucgacaucgaucucucgaagacagacaguagaaaauacgagaacgcuguuugggaccaauacaaagaccuaugccacaugcacacaggcgucgucgucgaaaagaagaaacgcggcggaaaagaggaaaucacaccccacugcgcacucauggacuguaucauguucgacgccgccguauccgguggccuuaacaccucaguccucagagcaguacuaccccgugacauggucuuccgcaccagcacaccccgcgucguccucuag

SEQ ID NO: 9781 - RNA, 1716 nt, Artificial Sequence
  derived and/or modified CDS sequence (opt11) from MOPV/LASV reassortant(IGS-27;Clade IV)__AFY05618__NP
augagcgcaagcaaagaaaucaaauccuuccuguggacgcaaucccuacgacgcgagcuaagcggcuacugcucaaauaucaagcuacaagucguaaaagacgcccaagcacuacuucauggacuagacuucagcgaaguauccaauguucaacgacuaaugagaaaagagcgacgcgaugacaacgaccucaaacgacuccgcgaccuaaaccaagccguuaacaaccuaguagaacucaaaucaacacaacagaaaagcauccuaagaguagggacccugacaagcgacgaccuccuuauacuagccgccgaccuggaaaagcugcgaucaaaagucauccgcaccgaacggccccucuccgcagggguguacaugggcaaccuuagcucccaacaacuggaccaacgccgcgccuuauuaaacaugaucggcaugucaggaggcaaccaaggagcccgcgccggccgagauggcguaguccgcguaugggaugucaaaaacgccgaacugcucuccaaccaauucggcaccaugccaucccuaacccucgccugccucaccaaacaaggccaaguagaccucaacgacgccguccaagcccuaacagaccucggccuaaucuauaccgcaaaauaccccaacaccagcgaccuggaccgacucacccaaucacacccaauacuaaauaugaucgacaccaagaaauccagccucaacauaucaggauacaacuuuagccucggggccgccgucaaagccggcgccugcaugcuagacggcgguaacaugcucgaaaccaucaaaguaagcccccagaccauggacgggaucuuaaaaucuauccuaaaagucaagaaagcucucggcauguucauaagcgacaccccaggagaacgcaaccccuacgaaaacauccuauauaaaauaugccucagcggcgacggcuggcccuacaucgccucccgaacaucaaucacaggcagggccugggaaaacaccgucgucgaccuagaaucagacggaaaaccccaaaaagccgacuccaacaacagcagcaaaagccuccaaucagcaggcuucaccgcaggccugaccuacagccagcuaaugacauuaaaagacgcaaugcuccaacucgauccaaaugccaaaaccuggauggacaucgaaggccgacccgaagacccuguugaaauugcccuauaucaacccucauccggcugcuacauacacuucuuccgcgaacccaccgaccuaaaacaaaaacaauucaaacaagacgcaaaauacucccacggcaucgacguaaccgaccucuucgcaacccaacccggccucacgagcgccgucaucgacgcccucccacguaacaugguaauaaccugccaaggaucagacgacauccggaaacuccuagaaucacagggacgaaaagacauaaaacuuauagacaucgaccucucaaagaccgacucucgcaaauacgaaaacgccguaugggaccaauacaaagaccucugccacaugcacaccggagucgucgucgagaaaaagaaacgcggcggcaaagaagagaucacaccccacugcgcccuaauggacugcauaauguucgacgccgcugucuccggaggccucaauaccuccgugcuccgagcaguccucccacgagacauggucuuccgcaccuccacgccccgagucguacucuaa

SEQ ID NO: 9782 - RNA, 1710 nt, Artificial Sequence
  derived and/or modified CDS sequence (opt11) from MOPV/LASV reassortant(IGS-3;Clade IV)__AFY05580__NP
augucagccuccaaagaaaucaagucuuuccuauggacccaaucccuccggcgagaacugucaggauacugcuccaacaucaaacuucaagucgucaaagaugcccaagcccuccuacacgggcuagauuucuccgaaguaagcaacguccaacgacuaaugagaaaagaacgccgcgacgacaaugaccucaaaagacuccgagaccuaaaccaagcaguaaacaaccucgucgaacuaaagagcacucaacaaaaaucaauccuccgcgucggcacccucacaagcgaugaccuccucauccucgccgccgaccuugaaaaacuccguagcaaagucauccgcaccgaacgcccguuaucagccggagucuacaugggcaaccucagcucacaacaacuagaccaaagacgagcccuacucaacaugaucgggauguccggaggcaaccaaggcgcccgagccggucgcgacggagucguccgcgucugggacgucaagaacgccgaacugcuaucuaaccaauucggaaccauccccucccucacgcuagccugcuuaaccaaacagggccaagucgaccuaaacgacgccgugcaagcacuuacagaccucggccucauuuacacagcaaaauaccccaacaccuccgaccucgacagacucacgcagucccacccaauccuuaacaugaucgacaccaaaaaguccagccuaaacauauccggcuacaacuucucccucggcgccgcugucaaagccggagcuugcaugcucgacgggggcaauaugcuagaaacaauaaaagucagcccccagaccauggacggcauccuaaaauccauccucaaaguaaagaaggcccuaggcauguucaucagugacacaccaggugaacgcaaccccuacgaaaacauccucuacaaaaucugccucuccggcgacggcuggccguacauugccagccgaaccucuaucaccggccgugccugggaaaacaccgucguagaccucgaaagcggcggcaaaccgcagaaagcagauuccaacaacagcucaaaaucacuucaaagcgccggauuuaccgccggccucaccuacucacaacucaugacccucaaagacgccaugcuccaacucgaccccaacgccaaaaccuggauggacauagaaggccgcccagaggaccccgucgaaaucgcucuguaccaaccguccucuggcugcuacauacacuucuuccgugaacccaccgaccucaaacaauucaaacaggacgccaaauacagccacggcauugacguaacagaccucuucgcaacacaacccggacucaccuccgcaguaaucgacgccuuacccaggaacauggucauaacaugccaaggaagcgacgacauccgcaaacuccuagaaucccaaggcagaaaagauauuaaacucauagacauagaccucagcaaaaccgacucccgcaaauacgaaaacgccguaugggaccaguacaaggaccucugccacaugcacaccggagucgucguugagaaaaagaaaaggggcggcaaagaagaaauaacuccccacugcgcgcuaauggacugcaucauguucgacgccgccgucucaggcggcuuaaauaccagcguccuacgcgccgugcucccccgcgacauggucuucagaacauccaccccucgagugguccuauaa

SEQ ID NO: 9783 - RNA, 1710 nt, Artificial Sequence
  derived and/or modified CDS sequence (opt11) from MOPV/LASV reassortant(IGS-4;Clade IV)__AFY05581__NP
auguccgccagcaaagaaaucaaauccuuccucuggacccaaucccucagacgcgaacucucaggauacugcagcaacauaaaacuccaaguagucaaagacgcucaagcacuccugcacggacucgacuucucagaaguaagcaacguucaacgccucaugagaaaagagcgccgcgacgacaacgaccucaaacgccuccgcgaccucaaccaagccgucaacaaccucgucgaacucaaaagcacccaacaaaaaucaauccuaagaguaggcacacucaccagcgacgaccuccuuauacucgccgccgacuuagaaaaacugaaauccaaagugauccgcacggaacgcccccuaucagcaggagucuacauggggaaucucagcucacaacaacucgaccaacgccgagcccuacucaacaugauaggaaugagcggcggaaaccagggugcccgagccggccgagacggcguaguacgcgugugggaugucaaaaacgccgaacuccucucaaaccaauucggcaccauacccucccuaacucucgcaugccugaccaagcaaggccaaguagaccucaacgacgccgugcaagcccucacggaccucggccucaucuacacagcaaaauaccccaacacauccgaccuagaccgccucacacaaucccauccuauccuaaacaugaucgauaccaagaaaucaagccucaacauaagcggauacaacuucucacucggcgccgccguaaaagccggagccugcaugcucgacggcggcaacaugcuugaaaccaucaaaguaucaccacaaacaauggacggcauccuaaaaucaauccuaaaaguaaagaaagcccuaggaauguucauaagcgacacacccggagagcgaaacccauacgaaaauauucuuuacaaaaucugccucucgggcgacggcuggcccuacaucgcgagccgaaccucgauaacgggccgggccugggaaaacaccgucguagaccucgaaagcggaggcaagccccaaaaggcagacucgaacaacagcucaaaaucccuccagagcgcaggcuucaccgcaggccuaaccuacucccaacucaugacccucaaagacgccaugcuccaacucgaccccaacgccaaaaccuggauggacaucgagggacgccccgaagacccagucgaaaucgcccucuaccaaccgagcagcggauguuauauccacuuuuuccgggagcccaccgaucucaagcaauucaaacaagacgccaaguacagccacggcaucgacgucacagaccucuucgccacacagcccggacucaccucagccgugauagacgcccuacccagaaacauggucauaacaugccaaggcagcgacgacauucgaaagcuacuagaaucacaaggacgaaaagacaucaaacuaaucgacaucgaucucuccaaaaccgacucacgaaaguacgaaaacgcagucugggaccaguacaaggaccuaugccacaugcacaccggagucgucguagagaaaaagaaacgcggaggcaaagaagagaucacaccccacugcgcccucauggacugcaucauguuugacgccgccguaagcggaggacuuaacaccagcgugcucaaagccguccuuccgcgcgacaugguauucagaaccucuacaccccgcguaguccuguaa

SEQ ID NO: 9784 - RNA, 1710 nt, Artificial Sequence
  derived and/or modified CDS sequence (opt11) from MOPV/LASV reassortant(IGS-9;Clade IV)__AFY05585__NP
augagcgccaguaaagaaauaaaaucauuccucuggacccaaucccuccgccgagaacucuccggauacuguagcaauauaaaacuccaaguagucaaagacgcacaggcccuacuacacggccucgacuucuccgaagucagcaacguccaacgacucaugagaaaagaacgccgcgacgacaacgaccucaaacgacuacgcgaccuaaaccaagcagucaauaaccuggucgagcuaaaaagcacccaacaaaaaucgauacuccguguaggcacacucaccagcgacgaccuacuuauacucgccgccgaucucgaaaaacuucgcucaaaagucauccgaacugagcgcccccuaagcgccggagucuacaugggaaaccuaagcucacagcaacucgaccaacgccgugcgcuccuaaacaugauagggauguccggcgggaaccaaggcgcccgcgcuggacgagacggugucgugcgagucugggaugucaaaaacgcagaacugcuaucgaaccaauucggaaccauccccagccucacccucgccugcuugaccaaacaaggacaaguagaccugaacgacgccgugcaagcacuaacagacuuaggccuaaucuacacagccaaauaccccaacacaucggaccuagaccgacuaacccaaucacacccgauccucaauaugaucgauacaaaaaaauccaguuuaaacaucucaggauacaacuucucgcucggcgccgcaguaaaagccggggccugcaugcucgacggaggcaacaugcuagaaacuaucaaaguauccccccaaacgauggacggaauccugaaaucaauccucaaagucaaaaaagcacuaggcauguucaucagcgacacccccggcgaacgcaacccauaugaaaacauacuuuacaaaauaugccucucgggcgacggauggccauacaucgcauccagaacauccaucaccggccgagcaugggaaaacaccgucgucgaccuagaaagcgacggaaaaccccaaaaagccgacaguaacaacagcucaaaaucccuacaaagcgcaggcuucacagcaggccuuaccuacagccagcucaugacccucaaagacgcaaugcuccaacucgacccaaacgccaagaccuggauggacauagagggccgacccgaagacccgguagaaauagcccucuaccaacccuccucaggcugcuacauccacuucuuccgagaacccacugaccuaaaacaauucaaacaagacgcuaaauacagccacggaauagacguaaccgaccuauucgccacccaacccggccucaccucagcaguaauagacgcacuucccagaaacauggucaucaccugccaaggcagcgacgacauccgcaaacuccucgaaucucaaggucgcaaagacaucaaacuaauagacauagaccuaagcaaaacagacucccgcaaauacgagaacgccgucugggaccaguacaaagaccuaugccacaugcacaccggagucgucgucgaaaaaaaaaaacgaggcggcaaagaagaaauuacgccccacugcgcacuaauggacugcaucauguucgacgccgccgucagcgggggacucaacaccuccguacuccgcgccguccucccgcgcgacauggucuucagaacauccaccccacgagucguccuguaa

SEQ ID NO: 9785 - RNA, 1710 nt, Artificial Sequence
  derived and/or modified CDS sequence (opt11) from LASV(LM032-SLE-2010;Clade IV)__AIT17803__NP
augagcgccagcaaagaaauaaaaucuuuccuauggacacaaagccucagacgcgaacuaucaggcuacugcuccaacauaaaacuccaaguugucaaagacgcccaagcacuccuccacggucucgacuucucugaaguuagcaacguacaacgucucaugcgaaaagaacgccgagaugauaacgaccucaaacgacuccgagaccucaaccaagccgucaacaaccucgucgagcucaaaagcacccaacaaaaaucaauccuucgaguuggcacccuaacaucagacgaucuacuaauccuagcagccgaccuagaaaaacugaaauccaaaguaauccgcaccgaacgaccccucucagccggcgucuacaugggcaaccuguccucacaacagcucgaccaacgccgcgcccuccucagcaugaucggcauguccggcggcagccaagaagcccgcgccggucgagacggcgucguucgcgucugggacgucaaaaacgccgaacuccuaaacaaccaauucggcacaaugcccucccucacacuagccugucucaccaaacaagggcaagucgaccugaacgacgccguccaagcacucaccgaccuaggacuaaucuacacagccaaauaccccaacaccuccgaccucgaucgccucacccaaagccaccccauccucaacaugaucgacacaaagaaauccuccuugaacaucuccggcuacaacuucucccucggcgccgcaguaaaagcgggugcaugcaugcucgacggaggcaacaugcuagaaacuaucaaagucagcccccaaaccguggacggcauucucaaauccauccucaaagucaagaaagcccucggcauguucauaagcgacacccccggcgaaagaaaccccuacgaaaacauacucuacaaaauaugccuaucaggagauggcuggcccuacaucgccucccgaaccucaaucacgggccgcgcaugggaaaacacggucgucgaccuagaaagcgacggcaaaccccaaaaagcgggcuccaacaacagcaacaaaucccuccaaagcgcuggauucaccgccggccuaacauacucacaacuaaugacccuaaaagacgcaaugcuccagcucgaccccaacgccaaaaccuggauggacaucgaaggccggcccgaagacccagucgaaaucgcccuauaccaacccagcuccggcugcuacauacacuucuuccgcgaaccaaccgaccuaaaacaauuuaaacaggacgccaaauauagccacggcaucgacgucacggaccucuucgcugcccaaccaggucugacaucagccguaauagaugcccuuccacgcaacauggucauuaccugccaagguucugacgacaucagaaaacuccuugaaucccaaggccgaaaagacaucaaacucaucgacaucgcccucuccaaaaccgacucacgaaaauacgaaaacgcaguaugggaccaauacaaagaccucugccacaugcacaccggcgucguagucgagaaaaagaagaaaggcggcaaagaagaaauuaccccacacugcgcccucauggacugcauaauguucgacgcagccguauccggcggauugaacacaagcguacuccgagcggucuuaccccgagacauggucuuccguaccuccaccccacgcguaguccuauga

SEQ ID NO: 9786 - RNA, 1710 nt, Artificial Sequence
  derived and/or modified CDS sequence (opt11) from LASV(LM395-SLE-2009;Clade IV)__AIT17811__NP
augucagcuuccaaagaaaucaagagcuuccuauggacccaaucccugcgccgagaacucuccggauacugcuccaacaucaaacuccagguagucaaagacgcccaagcacuacuacacggacucgacuucuccgaagucucuaacgugcaacgccucaugaggaaagaacgucgcgacgacaacgaccugaaacgacuucgagaccucaaccaagccgucaacaaccucgucgaacucaaaagcacccaacaaaaaucaauacuccgaguaggaacccuaaccuccgacgaccuucucauacucgccgcagaccuagagaaacuaaaaagcaaagucacccgcaccgaacgcccccuuucagccggugucuacaugggaaaucucucaucccaacaacuagaccaacgacgcgcacuucugaacaugauaggcaugucgggaucuaaccagggcgcccgagccggcagagacggugucguacgagucugggacgucaaaaacgcagaacuccucaacaaccaguucggcaccaugccgucucuuacccuagccugccuaaccaaacagggacaagucgaccuaaaugacgccguucaagcccucaccgaccucggacucaucuacaccgcuaaauacccaaacaccucagaccucgaccgacucacccaaagccaccccauccucaacaugaucgacaccaagaaaucaucauuaaacauaucaggcuacaacuucucacucggagccgccguuaaagccggagccugcaugcuagacggcggcaacaugcucgaaacaauaaaagucucaccccaaaccauggacggcauccucaaaucaauucuuaaagucaagaaagcccucggcauguucaucuccgacacaccgggagagcgcaacccauacgagaacauacuuuacaaaaucugccucucaggggacggcuggcccuacaucgccucacgaacauccauaaccggacgcgcaugggaaaacacaguaguagaccucgaauccgacggcaaaccccaaaaagcgggcagcaacggcucaaacaaaucacuacaaagcgcaggcuucaccgcuggccucaccuacucgcaacucaugacccugaaagacgcaaugcuccaacuagacccaaacgccaaaaccuggauggacaucgaaggcagacccgaagaccccgucgagauagcauuuuaccaacccagcucaggcugcuacauccacuuuuuccgcgaacccaccgaccuaaaacaauucaaacaagacgccaaauacucccacggaauagacgucaccgaccucuucgcagcacaaccgggccuaaccuccgccgucauagacgcucuaccuagaaaccucguaauaaccugccaaggcagcgacgacauccgaaaacuauucgaaucccaaggucgcaaagacaucaaacucaucgacaucgcccuaucuaaaaccgacagccguaaauacgagaacgcagugugggaccaguacaaagaccugugccacaugcacacaggaaucgucgucgaaaagaagaaacgaggcggcaaagaagagaucacaccacacugcgcccuaauggacugcauaauguucgacgccgcagucuccggaggacuaaacgcuuccguccugagagccguccuucccagagacaugguauucagaacauccacaccccgcguaguacuguaa

SEQ ID NO: 9787 - RNA, 1710 nt, Artificial Sequence
  derived and/or modified CDS sequence (opt11) from LASV(LM765-SLE-2012;Clade IV)__AIT17815__NP
augucagcauccaaagagaucaaauccuuccuguggacccaaucccuucgacgcgaacuaagcggauacugcagcaacaucaaacuacaagucguaaaagacgcccaagcacuccuacacggccuagacuucuccgagguauccaauguccaacgccucaugaggaaagaacgccgcgaugauaacgaucuuaaaagauuacgcgaccucaaccaggccguaaacaaccuagucgaacucaaaucaacccaacaaaaaucaauacuccgcgucggaacccuuacaucagacgaccuacucauacuggccgcagaccuugaaaaacucaaaucgaaagucacccgcaccgaaagaccccucuccgccggcgucuacaugggcaaccucagcucacaacagcucgaccaacgacgagcgcuccucgacaugauaggcauguccggaagcaaccaaggcgccagagccggcagagacggcgucguacgcgucugggacgucaaaaacgccgaacuccucaacaaccaauucggcaccaugcccucucucacgcucgccugccucaccaagcaaggccaagucgaccucaacgacgcaguacaagcacuaacggaccuaggccugaucuacacagccaaguaccccaacaccucggaccucgaccggcucacccaaagccaccccauccugaacaugaucgacaccaagaaauccucccuuaacauaucaggcuacaacuucucccugggcgccgcaguaaaagccggcgcaugcaugcuagacggaggaaacaugcucgaaacaaucaaagucucgccccaaacaauggauggcauacuaaaauccauccucaaagucaagaaagcccuaggaauguucauaucagaugcccccggcgaacgaaaccccuacgagaacauccuauacaaaauuugccucagcggcgacgguuggccguauaucgccaguagaaccuccaucaccggccgcgccugggaaaacaccguagucgaccuagaaagcgauggcaaaccccaaaaagcaggaaguaacggauccaacaaaagucuacaauccgccggcuucaccgccggucuaaccuacucccaacucaugacccucaaagacgccaugcuacaacuagacccaaacgccaaaaccuggauggacaucgaaggcagacccgaagacccagucgaaaucgcacuguaccaacccagcuccggcugcuacauccacuucuuccgcgaacccacagaccucaaacaauucaaacaagacgccaaauacagccacggcauagacguaaccgaccuauucgccgcacagcccggcuuaaccagcgcagucaucgacgcccuacccagaaacauggucauaaccugccaaggcucagacgacauccgcaaacucuucgagagccaaggcagaaaagacaucaaacucauagacaucgcccucagcaagacugacucccgcaaauacgaaaacgccgucugggaccaauacaaggaccuaugccauaugcacaccgggaucguaguagaaaagaagaaacgaggcggaaaagaggaaauaaccccacauugcgcccucauggacugcaucauguucgacgccgccguaagcggcggccuaaacaccucaguccuuagagccguccucccacgcgacauggucuuccgcaccucuacgccccgaguaguccuauaa

SEQ ID NO: 9788 - RNA, 1710 nt, Artificial Sequence
  derived and/or modified CDS sequence (opt11) from LASV(LM774-SLE-2012;Clade IV)__AIT17821__NP
augagcgcauccaaagaaaucaaaucauuccuuuggacccaaucccuccgccgagaacuuuccggcuacugcagcaacaucaaacugcaagucguaaaagacgcccaagcccuacuccacggccuagacuucucagaagucuccaauguacaacgccucaugcgcaaagaacgucgagacgacaacgaccucaaacggcugagagaccuuaaccaggccguaaacaaccucgucgaacucaaauccacccaacagaaaagcauccuacgcgucggaacccucaccucagacgaccucuuaauccuggccgcugacuuagaaaaacuaaagagcaaagucauacgcacugaacgcccacucuccgccggcguauacaugggcaaucucucaagccaacaacuagaccaacgacgagcccuccuaucaaugaucggcaugucaggcggcaaccaaggagcccgugccggcagagacggcgugguucgcguaugggacgucaaaaacgccgaacuccuaaacaaccaauucgguaccaugccuucccuaacccuagccugccucaccaaacaagggcaagucgaccuaaacgacgccguacaagcccugacugaccuaggccucaucuacaccgcaaaauaucccaacaccucugaccucgaccgccucacccaaucacaccccauccuaaacaugaucgacaccaagaaaucgagccuaaacaucuccggauacaacuucucacuaggagccgccgucaaagcaggggcaugcaugcucgacggcgguaacaugcucgaaacaaucaaagucuccccgcagaccguagacggcauccugaaaagcauccuaaaagucaagaaagcacuagggauguucauaagcgacacccccggagagcgcaacccauacgaaaacauccuauacaaaaucugccuuuccggagacggcuggcccuacauagccucacgcaccuccauaaccggacgagccugggaaaacaccgucgucgaucucgaaucagacggaaaaccccagaaaacaggaucgaacaacuccaacaaaucccuccaauccgccggauucaccgccggccuaaccuacucccaacucaugacccucaaagaugcgaugcuccaacuagaccccaacgccaaaaccuggauggacauagagggccgaccagaagaccccguagaagucgcacucuaucaacccuccucaggcugcuacauacauuucuuccgcgaaccaacagaccuaaaacaauucaagcaagacgccaaauacucccacggcauagacgucacagaccuauucgcagcccagcccggccucacguccgcugucauagacgcccuuccccgcaauaugguaauaaccugccaaggauccgacgacauucgaaaacuccucgaaucacaaggccgcaaagacauaaagcuaauagacaucgcccuaagcaaaaccgacagccgaaaauacgaaaacgccgucugggaccaauacaaagaccucugccacaugcacaccggagucgucgucgagaaaaagaaacgaggaggcaaagaagaaauaacaccacacugcgcacuaauggacugcauaauguucgacgccgcaguaucaggaggacucaacaccucaguacucagagcagucuuacccagagacaugguguuccgaaccagcacacccaggguaguccuauaa

SEQ ID NO: 9789 - RNA, 1710 nt, Artificial Sequence
  derived and/or modified CDS sequence (opt11) from LASV(LM776-SLE-2012;Clade IV)__AIT17825__NP
augucagccuccaaagaaaucaaauccuuccucuggacccaaucccuccgccgcgaacuauccuccuacugcuccaacaucaaacuacaagucgucaaagacgcccaagcccuccugcacggacucgacuucucagaagucagcaacguacaacgacucaugcgaaaagaacgaagagacgacaacgaccucaaacgacuuagagaccucaaccaagcagucaacaaccucguagaacuaaaaucuacccaacaaaaaucaauacuccgcgucggcaccuuaacaagcgacgacuuacucauccucgcugccgaccucgaaaaacuaaaauccaaaguaacccgcaccgaacgcccccucucagccggcgucuacaugggcaaccucucaucccaacagcuagaccaacgcagagcccuccucuccaugauuggaauguccggaagcaaccaaggugccagagcaggccgagacggagucguccgcguuugggacgucaagaacgcagaacuccuaaacaaccaguucggcacaaugcccucccucacacuagcgugucucaccaaacaaggucaagucgaccuaaacgacgcaguacaagcccucacagaccucggccuaauauacacagccaaauacccaaacaccagcgaccucgaccgccucacccaaagccaccccauauuaaacaugauagacaccaagaaauccucucucaacaucuccggcuacaacuucucacuaggcgcagcaguaaaagccggcgcaugcaugcuggacgguggcaacaugcucgaaacaaucaaagucucaccccaaaccauggacggcauccuaaaauccauacucaaagucaagaaagcacucggaauguucaucucagacacccccggcgaacgcaaccccuacgaaaacauacucuacaaaauuugccucuccggcgacggcuggcccuauaucgccuccagaacauccaucaccggccgcgccugggaaaacaccguaguagaccuugaauccgacggaaaaccucagaaagccggaagcaacaacucaaacaaaucccuacaaucagccggauucaccgccggucuaacauacagccaacucaugacccuaaaggacgccaugcuacaacucgacccgaacgccaaaaccuggauggacaucgaaggccgacccgaagaccccgucgaggucgcccucuaccaacccagcagcggcugcuacauccacuucuucagagaaccaaccgaucucaagcaauuuaaacaagacgcgaaauacucccacggcauagaugucaccgaccucuucgcugcccaacccggccucaccucagccgucaucgacgcccuucccagaaacauggucaucacgugccaaggcuccgacgauauacgaaagcuacucgaaucgcaaggccgcaaggacaucaaguuaaucgacaucgcgcucuccaaaaccgacuccagaaaauacgaaaacgccgucugggaccaauacaaagaccucugccacaugcacaccggagucgucgucgaaaagaagaaaagaggcggcaaagaagaaauuaccccgcacugcgcacuaauggacugcaucauguucgacgccgcagucuccggaggccucaacaccucgguccuccgcgcgguacucccccgcgacauggucuuccguacaucaacaccccgcguaguccucuaa

SEQ ID NO: 9790 - RNA, 1710 nt, Artificial Sequence
  derived and/or modified CDS sequence (opt11) from LASV(Mad39;Clade IV)__ANH09723__NP
augucagcauccaaagaaaucaaguccuuuuuauggacgcaaucacuccgacgcgaacuauccggcuacuguuccaacaucaaacuccaaguagucaaggacgcacaagcacuucuccacggccuagacuucucagaagucagcaacguacaacgacuaaugcgcaaacaacggcgcgacgacaaugaccuaaagcgccucagagaccuaaaccaagccgucaacaaccuuguagagcuaaaguccacccaacaaaaauccguccugcgcguuggaacccuaacaagcgacgaccuccucacacucgcagcggaccuagaaaagcucaaauccaaggucacacgaacagagagaccccuaaccgcaggagucuauaugggcaaccuaagcucccaacaacuagaccaaagacgggcacuccucaacaugauaggaaugagcggcggaaaccaaggugcaagaaccggacgggacgggguaguccgagucugggacgucaagaacgcagaacuacuaaacaaccaguucgguaccaugcccucccucacccucgccugccugacaaaacaaggccaagucgaccucaacgacguuguccaagcacuaacagaccucggccuaauauacaccgcaaaguaccccaacacaucagaccuggaccgacuaacccaaucccaccccauccucaacaugaucgacaccaacaaguccucccuuaacauuagcggcuacaacuucagccucggagccgcagucaaggccggcgccugcaugcuagacggcggcaacaugcuagaaaccaucaaagucucaccccaaaccauggacggcauccucaaaagcauuuuaaaagucaaaaagucacuaggcauguucaucagcgacacccccggagagagaaaccccuacgaaaauauccucuacaaaauaugccucucaggcgacggcuggcccuacauagcaagccgaaccagcaucacaggcagagcaugggaaaacaccgucgucgaucuagaaucaggcggcaaaccccaaaaagccggaucaaacaacuccaacaaaucucuacaaagcgccggcuucgccgcaggacucacauacucccaacucaugacccuaaaagacgccaugcuucagcucgacccgaacgcaaaaaccuggauggacauagaaggcagacccgaagacccaguagaaauagcacuauaccagcccaucucaggguguuacauccacuucuuccgcgaaccgaccgaucuaaaacaauucaaacaagacgccaaauacucccacggcaucgacguaaccgaccuguuugcagcucaaccaggccucaccuccgccgucauagaagcccucccccgaaacauggucauaaccugccaaggcagcgacgacauccgcaaacuauucgaaucacagggcagaaaagacaucaaacucaucgacaucgcacucagcaaaaccgacucacguaaguacgagaacgcggucugggaccaauacaaagaccucugccacaugcacaccggugucgucgucgaaaagaaaaagaaaggcggaaaagaagaaauaaccccucacugcgcccucauggacugcaucauguuugacgccgccgucagcggaggccuaaacacgcuaguccuacgagcaguacucccacgcgacaugguauuccgcacaucaacccccaaaguagucuuauaa

SEQ ID NO: 9791 - RNA, 1710 nt, Artificial Sequence
  derived and/or modified CDS sequence (opt11) from LASV(Mad41;Clade IV)__ANH09725__NP
augagcgccagcaaagaaaucaagagcuuccucuggacccaaagccuacgccgagaacuguccggauacugcuccaauauaaaauuacaagucgucaaagacgcccaggcacuccuccacggccuggacuucuccgaaguaucaaacguccaaagacuaaugagaaaacaaagacgcgacgacaacgaccucaaacggcuacgcgaccucaaccaagccguaaacaaccucgucgaacucaaaagcacccaacagaaaagcguacuccgcguagguacccuaaccagcgacgaucugcuaauacuagccgccgaccucgagaaacuaaaaucgaaaguaacccgaacagagcggccacucuccgccggcgucuacaugggaaaccucuccucccaacaacucgaccaacgcagagcacuacucaacaugaucggcaugucagguggcaaccagggcgcacgagcaggccgagacggaguaguacgagucugggaugucaaaaaugccgaccuauuaaacaaccaauucggaaccaugccuagccugacacuagccugccuaacaaaacaagggcaaguagaccucaacgacguuguccaagcccucaccgaccucggccuuaucuacacagccaaauaccccaacaccuccgaccucgacagacucacccaaagccaccccauccuaaacaugaucgacaccaacaaaagcucccucaacauuucaggcuacaacuucucucucggcgcggcagucaaagcgggagccugcaugcuagacgguggcaacaugcucgaaacgaucaaggucuccccacaaacaauggacggcauauuaaaauccauccucaaagucaagaaaucccuuggaauguucaucucagacacccccggcgaaagaaacccguacgaaaacauccucuacaaaauaugccugucaggagacggauggcccuauauagcaucacgcacaagcaucaccggccgcgccugggaaaacacagucgucgaccuugaaagcggcggaaaaccgcaaaaagccggcagcaacaacucaaacaaaucauugcaaucagcaggguuugccgcaggacuaaccuacagccaacuaaugacccuaaaagacgccaugcuacagcuggacccgaacgccaaaacauggauggacaucgaaggccgccccgaagaccccguagaaaucgcccucuaccaaccaauaagcggcugcuacauacacuucuuucgcgaaccaacggaucuaaaacaauuuaaacaagacgccaaauacagucacggcaucgacgucaccgaccucuucgccgcccaacccggacucaccagcgccguaauagaagcacucccacguaacaugguaaucacuugccaaggaagcgacgacauacgcaaacuacuagagucacaaggacgaaaagacaucaaacugaucgacaucgcccucagcaagacugacucccgcaaguacgaaaacgcagucugggaucaauacaaagaccuaugccacaugcacaccggagucgucguggaaaagaagaaacgcggaggcaaagaggaaaucaccccacacugcgcacuaauggacugcauaauguucgacgccgccgucagcggcggccucaacacacucguacuacgugcaguacuuccacgagacauggucuuccgcaccuccaccccaaaaguaguacuguaa

SEQ ID NO: 9792 - RNA, 1710 nt, Artificial Sequence
  derived and/or modified CDS sequence (opt11) from LASV(Mad63;Clade IV)__ANH09729__NP
augucggcauccaaagaaaucaaauccuuccucuggacacagagccuccgccgcgaacucucaggcuauugcuccaacaucaaacuccaagucgucaaagacgcacaagcccuccuccacggccucgacuucucagaagucaguaacguacaacgccucaugcgcaaacagcgaagagacgacuccgaccugaaaagacuccgagaccuaaaccaagccgucaacaaccucgucgagcucaaauccacccaacagaaaagcguacugcgagucggaacucucaccagcgacgaucuacucacacucgcagcagaccucgaaaaacuaaaaagcaaagugacaagaaccgaacgcccacuaucagccggagucuacauggggaaccucagcucacaacaacucgaccaaagacgagcacuacuaaacaugauaggcaugucaggcgguaaccaaggagcccgcaccggacgcgacgguguaguccgcgucugggacgucaaaaaugcagacuuacucaacaaccaauucggcacgaugcccagccucacccuagccugccucaccaaacaaggccaagucgaccuaaacgacgucguacaggcccuaaccgaccuaggccuuaucuacaccgccaaguacccaaacacgucagaccucgaccgccucacccaaucacaccccauacuaaacaugaucgacaccaacaaauccucacuaaacaucuccggcuacaacuucucccuuggcgcggcagucaaagccggcgccugcaugcucgacggcggcaacaugcuagaaaccaucaaagucuccccacaaacaauggacggcauccuaaaauccauccucaaagucaagaaaucccucggcauguucaucagcgacaccccuggcgaaagaaauccauacgaaaacauacuauacaaaauaugccucucaggagacggauggcccuacaucgcgagcagaaccuccaucaccggacgcgcaugggaaaacacaguagucgaccucgaaagcggaggcaaaccgcaacgagccggaucaaacaacagcaauaaaucacuccaaucagcaggcuucgcagcaggacucacauacagccaacuaaugacgcuuaaagacgccaugcuacaacuagacccaaacgcuaaaacuuggauggacaucgaaggcagaccagaagacccagucgaaaucgcacucuaccaacccacaucaggcugcuacauccacuucuuccgagagccuaccgaucucaaacaauucaaacaagacgcaaaauacucacacggcaucgacgucacagaccucuucgcagcucagccaggccuaacaagcgccgucaucgaagcccuccccagaaacauggucauaaccugccagggcagcgacgacauccgcaaacuccucgaaucccagggccgcaaagacaucaaacucauagacauagcccucagcaaaacagacucgcgaaaguacgaaaacgccgucugggaccaauacaaagaccuaugccacaugcacaccggagucgucgucgaaaagaagaagaaaggcggcaaagaagaaauaacaccccacugcgcccugauggauugcauaauguucgacgcagccguaagcggcggacugaacacucucguccuccgugcaguccucccccgagacauggucuuucgaaccucaacccccaaaguaguucuguaa

SEQ ID NO: 9793 - RNA, 1710 nt, Artificial Sequence
  derived and/or modified CDS sequence (opt11) from LASV(Mad69;Clade IV)__ANH09731__NP
augagcgcaucaaaagaaaucaaaucauuccucuggacgcaaagccuccgccgcgaacucagcggcuacuguucaaacaucaaacuacaaguagugaaagacgcccaggcccuccuacacggccucgacuucuccgaaguauccaacguccaacgccuaaugagaaaacaacgacgagacgacaacgaucuaaaacgccuacgcgaccucaaccaggccgucaacaaccucgucgaacucaaaagcacccaacaaaaaucaguccuccgcgucggcacacugacaagcgacgaucuccucacccucgcggccgaccuagaaaaacucaaaucaaaaguaacacgaaccgaacggccacucagcgccggggucuacaugggcaaccuauccucccaacaacuagaccagcgacgcgcacuccugaacaugaucggcaugaccggaggcaaccagggcgcccgaaccggccgugacggaguuguccgcgugugggacgucaaaaacgccgaccuccuaaacaaccaguucggaaccaugcccucccuuacccuagcaugccuaaccaaacaaggacaaguagaucuaaacgacguaguccaagcccucaccgaccucggccuaauauacaccgccaaauacccaaacaccuccgaccuagaccgccucacacaaucgcacccgauccucaacaugaucgacaccaacaaaucaucacuuaacauaucaggcuacaacuucucacucggcgccgccgucaaagcaggcgccugcaugcuagacggcggaaacaugcucgaaacuauaaaagucucaccacaaacgauggacggaauccucaaaaguauccugaaagucaagaaaagccucgggauguuuaucucggauacccccggagaacgcaaccccuacgaaaacauacuauacaaaauaugccuauccggagacggcuggccauacaucgcgucccgaaccuccaucaccgggcgcgcaugggagaacacaguagucgaccucgaauccggcggaaaaccacaacgcgcaggcucaaacaacagcaacaaaucacuccagucagcaggccucgcagcaggccucaccuacucccaacuaaugacccuuaaagacgccaugcuccaacucgaccccaacgccaaaacauggauggacaucgaaggacgucccgaagacccaguagagaucgcccuauaccagccgacaaguggcugcuacauacacuucuucagggaacccaccgaucucaagcaauucaaacaagaugccaaauacagccacggcaucgacgucacagaccuuuucgccgcccagccgggacugacaagcgccgugaucgaagcucuacccagaaacaugguaaucacaugccaaggaucagacgacauccgaaagcugcucgagucccaaggcagaaaagacaucaaacugauagacaucgcucucuccaagacagacucccggaaauacgaaaacgcaguaugggaccaauacaaagaccucugccacaugcacacaggggucgucgucgaaaagaagaagaaaggcggaaaagaagaaaucaccccacacugcgcccuaauggacugcaucauguucgacgcggcagucagcggcggccucaacacucugguccuccgcgcaguacucccaagagacaugguguuccgcaccucaacaccaaaaguaguacucuaa

SEQ ID NO: 9794 - RNA, 1710 nt, Artificial Sequence
  derived and/or modified CDS sequence (opt11) from LASV(Mad83;Clade IV)__ANH09733__NP
augucggccagcaaagaaaucaaauccuuccucuggacacagagccuaagacgcgaacuaucaggcuacugcucaaacauaaaacugcaaguagucaaagaugcacaagcccuccuacacgggcucgacuucucagaagucuccaacguccaacgacuaaugcgcaaacagcgccgcgacgacaacgaccucaaaagacugcgcgaccucaaccaagccguuaacaaccuaguagaacuuaaaagcacacaacagaaaucuguccuucgcguaggaacacuaaccagcgacgaccuacuuacccucgccgccgaccuagaaaaacucaaauccaaaguuacccgaaccgaacgaccacucucagcaggagucuacaugggcaaccuaagcucacaacaacuugaccagcgacgcgcccuacuaaacaugaucggaaugagcggcggaaaccaaggcgcccgcaccggcagagacgggguaguacgcgucugggacgucaaaaacgcagaccuccuaaacaaccaauucgguacaaugccaucccucacccucgcaugccugacaaaacaaggacaaguagaccugaacgaugucguccaggcccucacagaccuaggacugaucuacaccgcuaaauaucccaacaccucggaccuagaccgccucacccaaucccacccaauacuaaacaugaucgacaccaacaaaucuucccuaaacaucuccggauacaacuucucccucggagccgccguaaaagccggcgcaugcaugcucgacggcggaaacaugcucgaaacaaucaaggucucuccucaaacgauggacggcauccuaaaauccauccucaaggucaagaaaagccuaggcauguucaucucagacacccccggcgaacgaaaucccuacgagaacauccuauacaaaaucugccuuucaggagacggcuggcccuacaucgccucccgcacuagcaucacuggacgcgcaugggaaaauaccgucguugaccucgaaagcggcggcaagccucagcgagcaggcucaaacaacagcaacaaaagccuucaaagcgcaggcuucgcugcaggccuaaccuauucacaacuaaugacacuuaaagacgcaaugcuccaacucgacccuaacgccaaaaccuggauggacauagagggccgaccagaagacccagucgaaaucgcauucuaccaaccaauauccggcugcuacauacacuuuuucagagagcccaccgaccuaaaacaauucaaacaagacgccaaauacucccacgguauagacguaaccgaccucuucgcagcucaacccggacucaccagcgccguaauagaggcacuacccagaaacaugguaaucacaugccaaggcucagacgacauucgcaaacuccuggaaucucaaggccgaaaagacaucaaacucaucgacaucgcccucucaaaaaccgacucacgcaaauacgaaaacgccgucugggaccaauacaaagaccuaugccacaugcacacaggcgucguagucgaaaagaagaagaaaggcggcaaagaagaaaucaccccgcacugcgcccugauggacugcauaauguucgacgcagccguguccggaggccucaacacccucguccugcgagccguccuaccacgagacaugguauuccgcacaucaacccccaaaguaguacucuaa

SEQ ID NO: 9795 - RNA, 1710 nt, Artificial Sequence
  derived and/or modified CDS sequence (opt11) from LASV(NL;Clade IV)__AAO59513__NP
augucagccagcaaagaagucaaaucauuccucuggacccaauccuuacggcgcgaacucuccggauacugcuccaacaucaaacuccaagucguaaaagacgcccaagcccuuuugcacggccucgacuuuucugaaguaucaaacguccaacgccuaaugcggaaagagcgucgagacgacagcgaccugaaacggcuacgagaccucaaccaagcaguaaacaaccuagucgaacucaaaucaacccaacagaaauccguccuccguguaggaacucuaacguccgacgaccuacucguccucgcugccgaccucgaaaaacuuagaucaaaaguuacccggacugaacggccccucucugccggcguauacaugggaaaccuaagcagccaacagcuugaccaacgacgggcacuacucuccaugaucggcaugaaugggucgaaccaaggagccagagcaggucgcgacggcgucguacgagucugggacgucaaaaacgcagaacuccucaacaaccaauucggaaccaugcccucccucacccuagcaugccucacaaaacaaggccaagucgaccucaacgacgcaguacaagcacuaaccgaccucggccucaucuacaccgccaaauacccaaacaccucagaccucgaccgccuaacccaaagucaccccauccuaaacaugaucgacaccaaaaaguccucacucaacgucuccggcuacaacuucucacugggcgccgccguaaaagccggcgccuguaugcucgacggcggaaacaugcuagagaccauaaaagucagcccccaaacaauggacggcauccucaaauccauccucaaagucaagaaagcccucggcauguuuaucagcgacacccccggcgaacgaaaccccuacgaaaacauucucuacaaaaucugccucucgggagacggcuggcccuacauagccagcagaaccucgaucaccggccgcgccugggagaacaccgucgucgaccuagaauccgacgaaaagccucaaaaagcaggcucuaacaacuccaacaaaucacuccaauccgccggcuucaccgccggacuuaccuacagccaauuaaugacacucaaagacgccaugcuccaacucgaccccaacgccaaaaccuggauggacaucgaaggcaggcccgaagacccaguagaaaucgcucuauaccaacccuccuccggaugcuacauacacuucuuccgcgaacccaccgaccuaaaacaauucaagcaagacgccaaauacucacacggcaucgacaucaccgaccucuucgccgcgcaaccaggacucaccucggccgucaucgacgcccuccccagaaacaugguaauuaccugccaaggaucagacgacauccgcaagcuacuagaaucccaaggccgcaaagacaucaaacucauagacauagcccuaaacaaagcagacucccgcaaauacgaaaacgcugucugggaccaguacaaagaucucugccacaugcacaccggcguaguaguugagaaaaagaaacgcggcggaaaagaagaaaucaccccucacugugcccucauggacugcaucauguucgacgccgcagucagcggcggccucaaaacccuaguuuuacgugccguacuaccccgcgacauggucuuccgaacauccacaccacgagucguacuauaa

SEQ ID NO: 9796 - RNA, 1710 nt, Artificial Sequence
  derived and/or modified CDS sequence (opt11) from LASV(Z0947-SLE-2011;Clade IV)__AIT17841__NP
augagcgccucaaaggaaaucaaaucguuccucuggacacaaucccuaagacgcgaacucucaggcuacugcuccaacaucaaacuacaagucguaaaagacgcgcaagcacuacuccacggacuagacuucagcgagguuuccaacguacaacgccugaugcgaaaagaacgccgagacgacaacgaccucaagcgacugcgcgaccucaaucaagccguaaacaaccucgucgaacuaaaauccacccaacaaaagucaauccuacgcguaggcacacugaccagcgaugaccuccucauccuugccgcagaccucgaaaagcuaaaaagcaaagucacccgcaccgaacgcccgcuauccgccggagucuacaugggaaaccuaaguagccaacaacucgaccaacggcgcgcacuacuaaacaugauaggcaugagcggcuccaaccaaggugcacguacaggcagggacggggucguacgcgucugggacgucaaaaacgccgaacuccucaacaaccaauucgguacaaugcccucacucacacuagcgugccucaccaagcagggacaaguagaccucaacgacgcaguacaagcgcuaacagaccucggccucauauacaccgcaaaauacccaaacaccucugaccuagaccgacucacucagucacacccaauccucaacaugauagacacaaagaaauccucgcuaaacauauccggcuacaauuucucccucggagccgccgucaaagccggcgcgugcaugcucgacggaggcaacaugcucgaaaccauaaaagucucaccacaaacaauggacggaauccucaaauccauccuaaaggucaagaaagcccuaggaauguucauauccgacgcccccggagaacgcaaccccuaugaaaacauccucuacaaaaucugccucuccggcgacggcuggcccuacaucgccagccgaacaagcaucaccggccgugccugggaaaacaccgucguagaucucgaaagcgacggaaaaccccaaaaagcaggcucgaacggcuccaacaaaucccuccagagcgccggcuucaccgcaggccuaaccuacucacaacugaugacacucaaagacgccaugcuacaacucgaccccaacgcaaaaaccuggauggacaucgaaggccgccccgaagaccccgucgagauagcucucuaccaacccuccucaggaugcuacauccacuucuuccgcgaaccaaccgaccugaaacaauucaaacaggacgcaaaauacucccacggcauagacguaaccgaccuauucgccgcgcaaccaggacucaccuccgccgucaucgacgcccucccaagaaacaugguuauaaccugccaaggcuccgacgacauccgcaaacuauucgaaucccaaggccgcaaagacaucaaguuaaucgacaucgcccugucaaagacagacucccgcaaauacgaaaacgcggucugggaccaauacaaagaccuuugccacaugcacaccgguaucgucguagagaaaaagaaacgaggaggcaaagaagagauaaccccacacugcgcuuuaauggacugcauaauguucgacgccgccgucucaggcggccuaaacaccagcguccuccgagcaguccucccccgcgacauggucuuucggaccuccacccccagagucguccuauga

SEQ ID NO: 9797 - RNA, 1710 nt, Artificial Sequence
  derived and/or modified CDS sequence (opt11) from LASV(Z0948-SLE-2011;Clade IV)__AIT17845__NP
augucagccuccaaagaaaucaaauccuuccucuggacccaaagccugcgccgagaauuaucaggcuacugcucaaacaucaaacuacaagucguaaaagacgcccaagcccuccuacacggccuugacuucucugaggucuccaacguccaacgacuaaugcgcaaagaacgccgcgacgacaacgaccucaaacgccuacgagaucuaaaccaggccgucaacaaccuagucgagcucaaaucuacccaacaaaaaucaauccucagagucggcacccugacaucagacgaccuucucauccucgccgcagaucuagaaaaacucaaaagcaaagucacgcgaaccgaacgcccacucagcgcaggagucuacaugggaaaccucagcagccaacaacuugaccaacggcgcgcacuacucaacaugaucggaaugagcggcucuaaccaaggcgcccagacaggccgagacggaguagucagagucugggacgucaagaacgccgaacuccucaacaaccaauucggcaccaugcccucucucacccucgccugccucacaaagcaaggacaagucgaccucaacgacgcgguccaagcacucaccgaccucggccuaauuuacaccgccaaauacccgaacacaucagaccucgaccgccucacacagucccauccaauccucaacaugaucgacaccaaaaagucgagccuuaacaucucaggcuacaacuucucacuuggcgcagcuguaaaggcaggagccugcaugcuugacggcgguaacaugcucgaaaccaucaagguauccccgcaaaccauggauggcauccuaaaaucaauccuaaaagucaagaaagcacucggaauguucauaagcgacgcccccggagaacgcaaccccuacgaaaacaucuuauacaaaauaugccucuccggcgacggcuggccauacauagccagccgcaccuccauaacaggccgcgcaugggaaaacacaguagucgaccucgaauccgacgguaaaccccaaaaagcagguuccaacggaucaaauaagucauuacaauccgccgguuucaccgccggccucacauacucccaacuaaugacccuaaaagacgcaaugcuccaacucgacccaaacgcaaaaacauggauggacaucgaaggacgaccugaagaccccguugagaucgcgcucuaccagcccucgagcggcugcuacauccacuucuuccgcgaacccacagaccucaaacaguucaaacaagacgccaaauacagccacggcaucgacgucaccgaccuauucgccgcacaaccagggcucaccucagcaguaaucgacgcacucccccgcaacauggucaucacuugccagggcuccgacgacaucagaaaacucuucgaaucacaaggccgaaaagacaucaaacucaucgacaucgcccucuccaaaaccgacagccgcaaauacgaaaacgcagucugggaccaauacaaagaccuuugucacaugcauaccggcauagucgucgagaaaaagaaacguggaggcaaagaagaaaucacaccccacugcgcccuaauggauugcaucauguucgacgccgcaguauccggcggacuaaauaccagcguccuccgcgcuguacuaccccgcgacaugguauuccgaaccagcacaccccgggucguccuauag

SEQ ID NO: 9798 - RNA, 1710 nt, Artificial Sequence
  derived and/or modified CDS sequence (opt11) from LASV(Z148;Clade IV)__AAT49007__NP
augagcguuagcaaggaaaucaagagcuuccucuggacacaaagccucaggcgcgaacuaucgggcuacugcagcaacaucaaacuccaaguaguaaaagacgcucaggcacuccuccacggacuugacuucucagaggucuccaacgugcagcgccuaaugcgcaaacaaagaagagacgacaacgaccuaaaacgauuacgcgaccugaaucaagcgguaaacaaccuaguagaacucaaaagcacccaacagaaaagcguacuccgcgucggcacccucaccuccgacgaccuacugauccuagcagccgaccuagaaaaacucaaaagcaaagucacaaggacagaacgaccucucagcgccggcaucuacaugggcaaccuauccagccaacaacuagaccaaagacgcgcacugcucaacaugauaggcaugucaggcggaaaccagggagcgcaaaccggacgugacggcgucguccggaucugggacgucaaaaacgcagaacuacucaacaaccaauucggaaccaugccaagccucacacucgcgugccuuaccaaacaaggacaagucgaccucaacgacguaguacaagcacucacagaccucggacucauauacaccgccaaauaccccaacaccagcgaccucgaccgacuuacccaaagccaccccauacuaaacaugauagacacaaagaaauccucacuaaacaucagcggcuacaacuucucacucggagccgccguaaaagccggagccugcaugcucgacggcggcaacaugcucgaaaccauaaaagucucaccccaaacaauggacggcauccucaaaagcaucuuaaaaguaaagaaagcccucggaauguucaucuccgacacuccaggagaacgcaaccccuacgaaaacauccuauauaaaaucugccuuucaggagacggcuggccguacaucgccucccgcacaucgaucaccggacgcgccugggaaaacacaguaguagaccucgaaucaggagaaaaaccccagaaaaucggcucaaacaacucaaacaaaucacuccaauccgcgggcuuuaccgccggccucaccuauucccaacuaaugacccuaaaagacgccaugcuccaacucgaccccaacgccaaaaccuggauggacaucgaaggacgcccagaagaccccgucgaaaucgcacucuaccaacccuccuccggcuguuacauccacuucuuccgagaacccaccgaccuaaagcaauuuaaacaagaugccaaauacucacacgguaucgacguaaccgaccucuucgcggcccaacccggccuaaccuccgccguaauagaagccuuaccacgcaacaugguaaugaccugccagggcucggacgacauacgaaaacuccucgaaucccagggccguaaagacauuaaacucauagacaucgcccucaguaaaacagacucacgcaaguacgaaaacgccgucugggaccaauacaaagaccucugccauaugcacaccggagucguggucgagaaaaagaaaaagggcggaaaagaagaaaucaccccgcacugcgcccuuauggacugcauaauguuugacgcagccgcauccgggggccucaacacgcucguccugcgcgcaguacuaccccgagacaugguauuccgaaccucuacccccaaaguaguacucuaa

SEQ ID NO: 9799 - RNA, 1710 nt, Artificial Sequence
  derived and/or modified CDS sequence (opt11) from LASV(Bamba-R114;Clade V)__AHC95554__NP
augucagcaagcaaagaaguccgcucauuucucuggacccagucccucaggcgagaacucuccggcuauugcuccaauaucaaacuacaagucguaaaagacgcacaagcacuucuacacggccucgacuucuccgaagucagcaacguacaacgccuaaugagaaaacaacgccgagacgacggagaccucaaacgccuccgcgaucuuaaccaagcagucaacaaccuaguagaacucaaaagcacccaacaaaaaagcguccuccgagucggcacccuaaacagcgacgaccuccuaacccuagccgcagaccucgaaaaacuaaaauccaaagucacacguaccgaacgcccccucuccuccggaguauacaugggcaaccucuccagccaacaacuagaccaacgacgagccuuauuaaacaugauaggcaugaccggcggcaaucaaggcgcacaggcaggccgugauggcguaguccgcgucugggacgucaaaaacgcagaacuccuaaacaaccaguucggcaccaugccgucccuuacccuagcuugccuaaccaaacaaggccaaguagaccuaaaugacgucguccaagcccuaaccgaccuuggccucaucuacaccgccaaauaccccaacaccucggaccuugacaggcuaacccaaucccacccuauccucaacaugaucgacacaaaaaaauccucgcuaaacauaagcgguuacaacuucucgcuaggagccgccguaaaagcaggcgccugcaugcucgacggcggcaacaugcuggaaacaaucaaaaucuccccacaaucaguagacggcauccuaaagucaauacuaaaagucaaaagaucacuuggcauguucgugagcgacaccccaggugaacgaaaccccuacgaaaacauccucuacaaaauaugccucuccggcgacggcuggcccuacauagcaagccgcaccucaauagucggacgcgccugggaaaacaccguagucgaccucgaagccgacggcaaaccccaaaaacccaacuccggcuccucaaacaaaucccuacaaagcgccggcuucccagccggacucaccuacucccaacucaugacccuaaaagacgccaugcuccagcucgaccccaacgcuaaaaccuggauggacauagaaggacggcccgaggacccaguagaagucgcacuauaccaaccaucguccggcugcuacauacacuucuuccgcgaaccgaccgaccuaaaacaauucaaacaagacgccaaauauucacacggaaucgacgucacugaccuauucgcagcacaacccggccucacguccgccguaauagaagcccucccaagaaacauggucauaacaugccaaggaagcgaagacaucaagaaacugcuagaaucccaaggacgcaaagacauaaaacucauagacauugcacuaucuaaaauagacucccgaaaauucgaaaacgccguaugggaccaauacaaagaccuaugccacaugcacacuggcgucgucgucgaaaaaaaaaaacgaggaggaaaagaggaaaucacaccgcacugcgcccuuauggacugcaucauguuugacgccgcagucuccggaggacucaaugccucaguucuucgagccguacuaccucgcgacauggucuuccgaacuuccaccccaaaagucguccuauaa

SEQ ID NO: 9800 - RNA, 1710 nt, Artificial Sequence
  derived and/or modified CDS sequence (opt11) from LASV(Komina-R16;Clade V)__AHC95556__NP
auguccgccuccaaggaaguaaaaucguuccuauggacccaaucacugcgucgcgaacucucaggauacugcuccaauauaaaacuacaaguagucaaagacgcacaagcccuucuccacggccuagacuucuccgaagucagcaacguccaacgccucaugcgaaaacaacgaagagacgacggugaucucaaaagacuaagagaccuaaaccaagccgucaacaaccucgucgaacucaaauccacccagcagaaaaauguacuccgcgugggcacgcuaaacucagacgaccuacucacccuugcugcagaccuagaaaagcuaaagagcaaaguaacuagaaccgaaagaccucucucaucagggguuuacaugggaaaccucagcucccaacaacuagaccaacggagggcccuccucaauaugauaggcaugaccggcggcaaccaaggcacacaaacaggucgcgauggagucguccgcgucugggacgucaaaaaugccgaacuccucaacaaccaauucggaaccaugcccagccuaacacucgcaugucucacaaaacaaggccaagcagacuuaaacgacguaguccaagcccuaaccgaccuaggacucaucuacacggccaaauacccaaacgccucagaccuagaccgccucacucaaagccaucccauccucaacaugauagacacgaaaaagucaucccuaaacaucucgggcuacaacuucucccuaggggcagcagucaaggcaggcgccugcaugcuagacggcggaaacaugcuagaaaccaucaaaguaagcccacaaagcauggacggcauacugaaaucaauucucaaagucaaacgggcucuggggauguuugucuccgacacccccggagaacgcaacccauacgaaaacauacucuacaaaauaugccucucaggcgacggauggccauacaucgccucccguacaucaaucgucggcagagcaugggaaaacaccgucgucgaccucgaagccgacggaaaccccaagaaacuaaacucgaacggguccaauaaaucccuacaaagcgccgguuuuccagcaggccucaccuacucccaacuaaugacccucaaagacgcaaugcuccaacuagaccccaacgccaaaaccuggauggacauagaaggacgcccagaagaccccgucgaaguagcccuauaccagcccaacagcggaugcuacauacacuucuuccgugagccaaccgaccucaaacaauucaaacaagacgccaaauauagccacggcauagacgucaccgaccuauuugccgcgcaacccggccucaccuccgccgucaucgaagcccucccccgcaacauggucaucacaugccaaggcuccgaagacauacgcaaacuacuagaaucccaaggccgaaaagacaucaaacuaauagacauagcacucucaaaaacagacucacgcaaauucgaaaacgcugucugggaccaacacaaagaccucugccacaugcacaccggcgucguaguagaaaagaagaaacgaggcggcaaagaagaaauaacgccccacugcgcccucauggacuguauaauguucgacgccgccgucagcggcggccuuaacacccucguccugcgcgccguccuaccgcgcgauauggucuuccguaccucaaccccuaaagugguccucuaa

SEQ ID NO: 9801 - RNA, 1710 nt, Artificial Sequence
  derived and/or modified CDS sequence (opt11) from LASV(Ouoma-R123;Clade V)__AHC95558__NP
augagcgcauccaaagaaguccgaucauuccucuggacccagucccuccgccgcgaacucuccggauacugcagcaacauaaaacuccaagucguaaaagacgcgcaagcccugcuacacggccuagauuucucagaagucuccaacguccagcgccuaaugcguaaacaaagacgagacgacuccgaccucaaacggcuacgcgaccuaaaccaagccgucaacaaccucguagaacuaaaauccacccaacaaaaauccguacuucgugucggcacgcucucgucagacgaccuccucacccucgccgccgaucucgaaaaacucaaauccaaaguaauaagaaccgaacgaccccucuccucgggugucuacaugggcaaccuauccucucaacaacuagaccaacgcagagcguuacucaacaugaucggcaugacuggaggcaaccaaggagcacaagccggucgcgacggcgucguccgaguaugggacguccgcaacgcagaacuccucaacaaccaauucggcaccaugccgagccucacccucgcuugccuaacuaaacagggacaagucgaccuuaacgacgucguacaagcccucaccgaccuuggccuaaucuacaccgccaaauaccccaacacauccgaccucgacagacuaacccaaaaccaccccauccuaaacaugaucgacaccaagaaauccuccuuaaacauauccggauacaacuucucccucggagcagcaguaaaagccggugccugcaugcuagacggaggcaacaugcucgagaccaucaaagucagcccccaaagcauagacggcauauuaaaauccauccuaaaaguaaaacgcacccucggaauguucguaagcgacacucccggcgaacgcaacccauacgaaaacauacucuacaaaaucugccucagcggagacggauggccauacaucgccagccgcaccuccaucgucggccgcgccugggaaaacacugucgucgaccucgaaacagaccgcaaaucacaggggccaaauuccggcaacucaaacaaaucccuccaaucagccggguucucagcaggacucacauacucccaacuaaugacccucaaagaugcaaugcuccaacucgaccccaacgccaaaaccuggauggacaucgagggccgccccgaagacccugucgaagucgcucucuaccaaccgaucuccggaugcuauauccauuucuuccgggaacccacagaccucaaacaauucaaacaagacgcaaaauacagccauggcaucgacauaaccgaccuguucgccgcccaaccuggccuaaccucagccguaaucgaagcccucccacgcaacauggucauaaccugccaaggauccgaagacaucaagaaacuacuagaaucacaaggacgaaaagacaucaaacuaaucgacaucgcccucucgaaaaucgacucccgaaaauucgaaaacgccgucugggaccaguacaaagaccuuugucauaugcacaccggcguaguagucgagaaaaagaaacgagguggaaaagaagaaaucaccccacacugcgcccugauggacugcauuauguucgacgccgccgucuccggaggacugaacgccagcgugcuccgagccgugcucccccgagacauggucuuccgcaccuccacacccaaaguaguucuguaa

SEQ ID NO: 9802 - RNA, 1710 nt, Artificial Sequence
  derived and/or modified CDS sequence (opt11) from LASV(Soromba-R;Clade V)__AHC95552__NP
auguccgccucaaaagaaguaaaauccuuucucuggacacagucccucagacgcgaacucuccggcuacugcuccaacauaaaacuacaagucguaaaagacgcucaagcacugcuccacggccuugacuucuccgaagugagcaacguacaacgccucaugcgcaaacaacgcagggacgacggcgaccucaaacgccugcgagaccucaaccaagccgugaauaaucuagucgaacuaaaauccacccaacagaaaaacguccuccgcgucggcacccuuaacuccgacgaccuccucacacuagccgccgaccucgaaaaacuaaaaucaaaagucacccguaccgagcgaccccucagcucaggcgucuacaugggcaaccucucaucacaacaacucgaccaacgccgcgcccuccugaacaugaucggaaugaccggcggcaaccaagguacucaagccggccgcgacggcgucguccgcgucugggacgucaaaaacgcugaacuacucaacaaccaauuuggcaccaugccauccuuaacacuggcaugccucaccaaacaaggccaagccgaccuaaacgacgucguacaggcauuaacagaccucggacucaucuacaccgccaaguaccccaacgcauccgaccucgaccgccuaacccaaucccaucccauccucaacaugauagacaccaagaaaucaucgcuaaacaucuccgguuauaacuucagccuaggagccgcagucaaagccggagccuguaugcuagacggcggcaacaugcuggaaacgaucaaagucucuccccaauccauggacggcauccuaaaaucuauccucaaaguaaaacgcgcccucggcauguucgucagcgacacccccggcgaacgaaaccccuacgaaaacauacucuacaaaaucugccucucuggagacggcuggcccuacauagccucacgcacauccauagucggacgugccugggaaaacaccgucguagaccuugaggccgacggaaaccccaagaaacucaacucgaauggauccaacaaaucacuccaaucagccggauucccagcaggucucacauacucccaacucaugacccucaaagacgccaugcuucaacucgaccccaaugccaaaacguggauggacaucgagggccgacccgaagacccgguagaagucgcccucuaccaacccaacucggggugcuauauacacuucuuccgcgaaccaaccgaccucaaacaguucaaacaagacgcaaaauacucacacggcauagacgucaccgaccucuucgccgcccaaccaggccucaccucugccguaauugaagcucucccaaggaacauggucauaaccugccaaggcagcgaagacauacgaaaacuccucgaaucgcaaggccgcaaagacaucaaacucaucgacaucgcccucucaaaaaccgacucacgcaaauucgaaaacgccgucugggaccaauacaaagaccucugccacaugcacaccggagucguaguagaaaagaagaaacgaggcgguaaagaggaaauaacaccccauugcgcccucauggacugcaucauguucgacgccgcugucucaggcggacuaaacacccucguccuccgcgccguccucccccgggacaugguuuuccgcaccucuacaccccgcguaguacuguaa

SEQ ID NO: 9803 - RNA, 1710 nt, Artificial Sequence
  derived and/or modified CDS sequence (opt11) from LASV(Soromba-R30;Clade V)__AHC95560__NP
auguccgccagcaaagaaguuaaaucguuccuauggacccaaucccuccgacgggaauuaagcggcuacugcagcaacaucaaacuccaagucgucaaagacgcccaagcacuacuccacggacuugacuucagcgaaguaagcaauguacaacgccucaugcgcaaacagcgacgcgacgacggcgaccuaaaaaggcuacgagaccuaaaccaagccgucaacaaccuagucgagcuaaaaucaacgcaacagaaaaacguccuccgaguaggcacccucaacagcgacgacuuacucacacucgcugccgaccucgaaaaacuuaaaucaaaagucacacgcaccgaacgaccccucucauccggcgucuacauggggaaccucuccagccaacaacucgaccaacgccgcgcccuacucaacaugaucggcauguccggcggaaaccaaggaacccaagucggacgcgacggagucguuagaguaugggacgucaagaacgccgaacuacugaacaaccaauucggaaccaugcccucccucacacucgccugccuaaccaaacaaggccaagcagaccucaacgacguuguccaagcccucaccgaccuaggacuaauauacacagcaaaauaccccaacgcauccgaccucgacagacucacccaaagucacccuauccucaacaugaucgacacaaagaaauccucacucaacaucuccggcuacaacuucucacuaggcgccgccgucaaagcaggagccugcaugcuagacggcggcaacaugcucgaaaccauaaaagucagcccccaauccauggacggcauacugaaaucaauacuuaaagucaaaagagcccuaggaauguucguaagcgacacuccaggcgaacgaaacccuuacgaaaacauacuauacaaaauaugccucuccggagacggauggccauacaucgccagccgcacaagcaucgucggccgugccugggaaaacaccgucgucgaccucgaagcggauggaaacccgaagaaacucaacagcaacggcaguaacaaaucacuccaaagcgcaggguuccccgccggccuuaccuacagccaacugaugacccugaaagacgccaugcuacagcucgacccaaacgccaaaaccuggauggacauagaaggccgaccagaggaccccguagaagucgcccuauaccaacccaacagcggcugcuacauucacuucuuccgugaacccaccgaccuaaaacaauucaaacaagacgccaaauacucacacggcaucgacguaaccgaccucuuugcagcacaaccagggcuaaccuccgccgucaucgaagcccucccaagaaacauggucauaacaugccaaggcuccgaggacauccgaaaacuccuggaaucacagggccgcaaagacauaaagcucaucgacauagcacucuccaagaccgacucgcgcaaauucgaaaacgccguaugggaccagcacaaagaccuuugccacaugcacaccggcgucgucgucgaaaagaagaaacguggcggcaaagaagagaucacaccacacugcgcucuaauggacugcauaauguucgacgcagccgucucagggggccugaacacacucguacuacgcgcaguacuaccgcgagacauggucuuccggacaucgacaccgaaagucguccuauaa

SEQ ID NO: 9804 - RNA, 1710 nt, Artificial Sequence
  derived and/or modified CDS sequence (opt11) from LASV(Alzey;Clade VI)__SCA79106__NP
augagcaacuccaaagaagucaaauccuuccuauggacccagucccucagacgcgaacucuccggcuacugcuccaauaucaaacuacaaguagucaaagacgcccaagcacuacuccacggucucgacuucuccgaagucucaaacgugcagcgccuaaugcgcaaacaaaaacgugacgacggcgaccuaaaacgcuuaagagaccuaaaccaagcaguaaacaaccuugucgaacucaaaucgguacaacaaaagucaauccucagaguaggcacccucaccucagacgaccugcuaacccuagcagcagaccucgaaaaacuaaaauccaaagucacccgcaccgagcgaccucucucaucuggcguauacaugggaaaccuauccucacaacagcucgaccaacgacgcgcccuccucuccaugaucggaauguccggaggcaaccaaaacagccaaccaaaaggagacggagucguaagggucugggacgucaagaacgccgaccuucucaacaaccaguucggaaccaugccaucccuuacccucgccugccugacaaaacaaggacagguagaccucaacgacgccguccaagcccucaccgaccuaggccucaucuacaccgcgaaauaccccaacucaucugaccuagaccgccuaucccaaucccaccccauccuuaacaugaucgacacuaagaaauccucccuaaacaucuccgguuacaacuucucccugggcgccgcuauaaaaaccggcgcaugcaugcucgacggcgguaacauguuagaaacuaucaaaguaacgccccaaacgauggacggcauacuaaaaucaauccuaaaagucaaacgcagccucggcauguucauuagcgacacccccggcgaacggaaccccuacgaaaacauccuauacaaaauaugccucuccggcgacggcuggccauacaucgccucaagaaccgcaaucaucggccgagccugggagaacacagucgucgaccuagaauccgacagcaaaccccagaaaaucggaucaaacggcuccaacaaaucccuccaauccgccggcuucgccccaggacucaccuacucccaacucaugacccucaaagacuccaugcuccaacucgacccuaacgccaaaaccuggaucgacaucgaaggccgaccggaagaccccguagaaguggcccucuuccagcccauaucaggaugcuacauccacuucuuccgagagccaacagaccucaaacaauucaaacaggacgcaaaauacagccauggcauagacguaacugaccucuuugcagcacaacccggccuaacaucugcagucaucgaagcacugcccagaaacaugguacuaaccugccaaggaagcgaugacaucaaaaagcuccuagacagccaaggccgccgagacauaaaacucauagacgucucucucaacaaaaucgacucccguaaauucgaaaacgcaguaugggaccaauacaaagaccucugucacaugcacacaggagucguaguggagaagaagaagaaaggcggcaaagaagaaauaaccccgcacugcgcauuacucgacugcaucauguucgacgccgccgucuccggcggccucaacgccaccgugcucagagcaguccuaccacgcgacaugguauucagaaccucgucaccaaaagucguacucuaa

SEQ ID NO: 9805 - RNA, 1710 nt, Artificial Sequence
  derived and/or modified CDS sequence (opt11) from LASV(NIGERIA IKEJI;Clade II)__AMZ00372__NP
auguccgucucaaaagaaguaaaaucauuccuauggacccagucacuacgccgcgaacucagcggcuacugcucuaacaucaaacuccaaguaguaaaagacgcacaagcccuucuccacggacucgacuucuccgaagucucgaacguccaacggcucaugcgcaaacaaaaacgagacgacaacgaccuaaaaagacuccgagaccucaaccaggccgucaacaaccucguugaacucaaaucggugcaacaaaaaucaauccucagagucggcacccuaacuagcgacgaccuacucacccuugccgcugaccuagaaaaacuuaaauccaaagucauccgcaccgaacgcccccuaagcucaggagucuacaugggcaaccucucaucccaacagcuggaacaacggaaggcucuccucacaaugaucggcaugaccgggggaucccaaagcgcccaaccaggcagagacggcgucguccgagucugggacgucaaaaauuccgaccuccucaacaaccaauucggcaccaugccaucccucacacucgcaugccuaaccaaacagggacaaguagaccucaacgacgccguacucgcccucacagauuuaggccucaucuacacugcaaaauaccccaacacaagugaccuagaucgccucucucaaucccaccccauccucaacaugguugacaccaagaaauccucacuaaacauuuccggauacaacuucucccucggagccgccgugaaagccggagccugcaugcucgacggaggcaacaugcucgaaaccauaaaaguaacaccucagaccauggacggaauccucaaaagcauccugaaagucaaacgcgcccucggaauguucgucuccgacacacccggcgagcgaaauccuuacgaaaacauucuuuauaaaaucugucucucaggcgacggcuggccauacaucgcgucgcgcaccuccaucgucggacgcgcaugggaaaauacaaucgucgaccuagaaagcgacuccaaaccccaaaaagucggcgcuaucggguccaacaaaucccugcaaagcgccggcuuccccgcagggcuaacauacucccaacuaaugacccuaaaagacagcaugaugcaacucgaccccucggccaaaacauggauugacaucgaaggccgccccgaagacccaguagaaaucgcccuuuaccaaccaauauccggaugcuacauccacuuuuuccgcgagccuacagaccugaaacaguucaaacaagacgccaaauacucccacggcauagacguagccgaccuauucagcgcccaaccaggucuaacaagcgccguaaucgaagcccuaccccgcaacaugguacucacaugccaaggcucagacgacaucaaaaagcuacucgacagccaaggccgacgagacaucaaacuaauagacaucucccucaacaaagccgacucccgcagauucgaaaacgccgucugggaucaaugcaaagaccucugccacaugcacacaggcguagucguagaaaagaagaaacgaggcggaaaagaagaaaucacaccccacugcgcccucauggacugcaucauguucgacgccgccgucucuggcggccucaauauccccacccuccgcgccguccuaccgcgcgacauggucuuccgcaccuccagcccuaaagucguccuauaa

SEQ ID NO: 9806 - RNA, 1986 nt, Artificial Sequence
  mRNA product Design a-1 comprising derived and/or modified sequence from LASV(Josiah;Clade IV)__NP_694869__NP (wt)
gggagagucccgcagucggcguccagcggcucugcuuguucgugugugugucguugcaggccuuauucaagcuuaccaugagugccucaaaggaaauaaaauccuuuuuguggacacaaucuuugaggagggaauuaucugguuacugcuccaacaucaaacuacagguggugaaagaugcccaggcucuuuuacauggacuugacuucuccgaagucaguaauguucaacgguugaugcgcaaggagagaagggaugacaaugauuugaaacgguugagggaccuaaaucaagcggucaacaaucuuguugaauuaaaaucaacucaacaaaagaguauacugagaguugggacucuaaccucagaugacuuauuaaucuuagccgcugaucuagagaaguuaaagucaaaggugaucagaacagaaaggccauuaagugcaggugucuauaugggcaaccuaagcucacagcaacuugaccaaagaagagcucuccugaauaugauaggaaugaguggugguaaucaaggggcucgggcugggagagauggaguggugagaguuugggaugugaaaaaugcagaguugcucaauaaucaguucgggaccaugccaagucugacacuggcaugucugacaaaacaggggcagguugacuugaaugaugcaguacaagcauugacagauuuggguuugaucuacacagcaaaguaucccaacacuucagacuuagacaggcugacucaaagucaucccauccuaaauaugauugacaccaagaaaagcucuuugaauaucucagguuauaauuuuagcuugggugcagcugugaaggcaggagcuugcaugcuggaugguggcaauauguuggagacaaucaaggugucaccucagacaauggaugguauccucaaauccauuuuaaaggucaagaaggcucuuggaauguucauuucagacaccccuggugaaaggaauccuuaugaaaacauacucuacaagauuuguuugucaggagauggauggccauauauugcaucaagaaccucaauaacaggaagggccugggaaaacacugucguugaucuggaaucagaugggaagccacagaaagcugacagcaacaauuccaguaaaucccugcagucggcaggguuuaccgcugggcuuaccuauucucagcugaugacccucaaggaugcaaugcugcaacuugacccaaaugcuaagaccuggauggacauugaaggaagaccugaagauccaguggaaauugcccucuaucaaccaaguucaggcugcuacauacacuucuuccgugaaccuacugauuuaaagcaguucaagcaggaugcuaaguacucacaugggauugaugucacagaccucuucgcuacacaaccgggcuugaccagugcugucauugaugcacucccccggaauauggucauuaccugucagggguccgaugacauaaggaaacuccuugaaucacaaggaagaaaagacauuaaacuaauugauauugcccucagcaaaacugauuccaggaaguaugaaaaugcagucugggaccaguauaaagacuuaugccacaugcacacaggugucguuguugaaaagaagaaaagaggcgguaaagaggaaauaaccccucacugugcacuaauggacugcaucauguuugaugcagcagugucaggaggacugaacacaucgguuuugagagcagugcugcccagagauaugguguucagaacaucgacaccuagagucguucuguaaggacuagucccuguucccagagcccacuuuuuuuucuuuuuuugaaauaaaauagccugucuuucagaucuaaaaaaaaaaaaaaaaaaaaaaaaaaaaaaaaaaaaaaaaaaaaaaaaaaaaaaaaaaaaaaaaugcaucccccccccccccccccccccccccccccccaaaggcucuuuucagagccaccagaauu

SEQ ID NO: 9807 - RNA, 1986 nt, Artificial Sequence
  mRNA product Design a-1 comprising derived and/or modified sequence from LASV(LP;Clade I)__AAF86702__NP (wt)
gggagagucccgcagucggcguccagcggcucugcuuguucgugugugugucguugcaggccuuauucaagcuuaccaugagcaacuccaaggaaaucaaaucauuccuuuggacucaguccuuacgaagggaacuaucugguuacuguucuaacauaaaguugcaaguugucaaagaugcucaggcucuccugcauggccuugacuuuucugaggucagcaaugugcagaggcugaugcgcaagcagaagagagaugaugcagaccuaaagcgacugagggaucugaaucaagcugucaacaaucuuguugaacugaagucaacucaacagaagaaugucuuaagggucggcaccuugaguucagaugaucuaauaacuuuggcagcggaccuggaaaaacucaaguccaaagucauaaggacagaaaggccuuugagcucagguguuuacauggggaauuuaagcucacaacagcuugaucaaaggagggcucucuugagcaugauugggaugucagguggaccucaaggaaauaggacagguggggauggugucgucaggguuugggacguaaaaaaugcagaauuacucaauaaccaauuuggaaccaugccaagccucaccuuggcgugccucaccaaacaagggcaaguggaccucaaugaugcugugcaagcuuuaacagauuuagguuugauuuacacagcaaaguacccgaacucuucagaucuagacaugcucacucagagucacccuauacuaggaaugguugacacaaaaaagaguucccugaacaucucagguuacaacuucagucugggggcugcaguuaaagcuggugcuugcaugcuugaugggggcaacauguuggaaacaauaaaagugucaccacaaacaauggacgguauuuugaaaucuauucugaaggucaaaagaucacugggaauguucauuucugacacuccuggugaaagaaacccauaugagaacauccucuauaagaucugccuuucaggugaagguuggccguauauugcaucaagaacaucaauuacugggagagcuugggaaaacacucuuguugauuuggaaucugacaacaaaccaccgaaacuaaauagcgcugguuccaauaaaagcuugcaggcugcaggucuaaaugcuggguugaccuauucucaacugaugacacuaaaagauuguauguuacaguuggacccaaguagcaaaacauggauagauauugagggcaggccugaagacccaguggagauugcuuuguuucaaccaagcucugguuguuacauacacuuuuuuagagaaccuacugaccuuaagcaauucaaacaggaugcuaaguacucacaugggauagauguuacagaucuuuuuuccacacaacccgggcugacaagugcugucauagaggcacuuccccgcaauaugguguugaccugccaggggucagaugacaucaaaaagcuguuggagucucaagggagaagagacaucaaauugauugauauuucuuugagcaaagcagauucaaggaaguuugaaaaugcugugugggaccaauacaaagacuugugucacaugcacacgggaguagucguugagaagaaaaagagggguggaaaagaggaaaucaccccacauugcgcuuuacuggacugcaucauguuugaugcagcuacuacugguaguuugaacaucacaacacugagggcaguacuucccagagacauggucuucaggaccagcaccccuaaagucguucuguaaggacuagucccuguucccagagcccacuuuuuuuucuuuuuuugaaauaaaauagccugucuuucagaucuaaaaaaaaaaaaaaaaaaaaaaaaaaaaaaaaaaaaaaaaaaaaaaaaaaaaaaaaaaaaaaaaugcaucccccccccccccccccccccccccccccccaaaggcucuuuucagagccaccagaauu

SEQ ID NO: 9808 - RNA, 1986 nt, Artificial Sequence
  mRNA product Design a-1 comprising derived and/or modified sequence from LASV(803213;Clade II)__AAF86704__NP (wt)
gggagagucccgcagucggcguccagcggcucugcuuguucgugugugugucguugcaggccuuauucaagcuuaccaugagugcuuccaaggaggugaaaucauuccuuuggacacagucauugaggagagagcuuucagguuauuguucuaacauaaagcuucaaguuguuaaggaugcccaggcccuccuucacggccuugacuucucugaggucaacaaugugcaacgucuaaugcgcaaacagaaaagagaugauggugauuuaaaacgucuuagagaccugaaucaggcagucaacaaccuuguugaacucaaaucaacacaacaaaagagcauuuugagaguuggaacacugaccucagaugacuugcugacauuggcagcugacuuagagaaacugaagucaaaagucaucagaacagaaagaccacuaagcucggguguguacauggggaauuuaaguacacagcagcuugagcagagaagggcauugcugaacaugauuggcaugguugguggagcacagggcacccaaccuggaagagacggaguuguuagggugugggaugucaaaaauccagaucucuuaaacaaccaguucggcaccaugccuaguuugacauuagcaugucuuacuaaacagggucaaguugaccuaaaugaugcuguccuagcacugacggacuugggacugauauacacagcuaaguacccuaacaguuccgaccuggacaggcuuucccaaagucauccgauacugaacaugguggacacuaagaagagcuccuugaacauuucugguuacaauuuuagcuugggagcugcaguaaaggcuggggccuguaugcucgaugggggcaacauguuggaaaccauuaagguuacgccucagacaauggaugguaucuugaaguccauuuuaaaggugaaaagaucuuugggaauguuugucucagauacaccuggugagaggaacccuuaugagaacauacuuuauaaaaucugucucucuggugauggcuggcccuacauagccucaagaaccuccauugugggcagggcuugggagaauacuacuguggaucucgagucagaugggaagccacaaaaagugggaacugcuggguccaauaagucuuugcaguccgcaggguuuccaacaggguugacuuauucacagcugaugacucuuaaagacucaaugaugcagcuugacccaagugccaaaacuuggauagacauugaaggucguccagaagacccuguggagauagcucuuuaucaaccuaugucaggcuguuacauacauuucuuuagagaaccaacagaucugaaacaguucaagcaagacgccaaguauucucaugggauugauguggcagaucuuuucccugcucaaccugguuugacuagugcaguuauugaagcucuuccucgcaauaugguguugacuugccaagguucagaugauaucaagaaacucuuagacucucaaggaaggagggacauaaagcuuauugauauuucauuaagcaagguugacucuaggaaguuugaaaaugcuguuugggaccagugcaaagacuugugccacaugcacacuggagugguuguugagaagaagaaaagaggaggcaaagaagaaaucaccccacauugugcccugauggauugcauaauguuugaugcagcugugucaggagggcucaacauaccaguuuuaagagcuguucuucccagagacaugguauuuagaaccucaagccccaaggucguccuguaaggacuagucccuguucccagagcccacuuuuuuuucuuuuuuugaaauaaaauagccugucuuucagaucuaaaaaaaaaaaaaaaaaaaaaaaaaaaaaaaaaaaaaaaaaaaaaaaaaaaaaaaaaaaaaaaaugcaucccccccccccccccccccccccccccccccaaaggcucuuuucagagccaccagaauu

SEQ ID NO: 9809 - RNA, 1989 nt, Artificial Sequence
  mRNA product Design a-1 comprising derived and/or modified sequence from LASV(GA391;Clade III)__CAA36646__NP (wt)
gggagagucccgcagucggcguccagcggcucugcuuguucgugugugugucguugcaggccuuauucaagcuuaccaugagugcuuccaaggaagugaggucauucuuguggacucaaucccuaagaagggaacuaucuggcuacuguuccaacauaaaguugcagguaguuaaagacgcucaagcucuccuucauggucuugacuucuccgaggucaguaauguucagagauugaugcgcaagcagaaaagagaugauggcgaccuaaaacgacugagagaucucaaucaagcagucaacaaucuuguugagcucaaauccacacagcagaaaagugucuuaagaguuggaaccuuaaguucagacgaucuacuaauccuggccgcugauuuagaaaaacugaaaucaaaagucaccagaacagaaaggccuuugaguucaggaguuuauauggggaauuugaguucacaacagcuugaucaaaggagagcccuuuugaacaugauuggcaugacuggaguaaguggagggggaaagggugccagugauggcauugugagaguuugggaugucaaaaaugcagaguuacucaacaaucaguucggaacaaugccaagccuaacuuuagcaugccugaccaaacaggggcaaguggaccugaaugaugccguucaagcuuugacagauuuagggcugauuuacacagccaaauaccccaacucaucugaucucgacagauugucucagagucauccaauucugaauaugauugacacuaagaaaaguucacucaacaucucugguuacaauuucaguuugggugcugcugucaaagcaggggccugcaugcuugauggugguaacauguuagagacuauuaagguuucaccucagaccauggaugguaucuugaagucaaucuugaaaguuaagaagagucugggaauguuuguaucagacacaccgggugaaaggaacccuuaugagaacauccuauacaagaucugucucucaggagacggauggcccuauauugcaucaaggaccucgauugugggaagagcaugggaaaauacugugguggaccuugagcaagacaacaagccccagaaaauuggaaaugggggguccaacaagucauuacagucugcaggcuuugcugcaggauuaacuuacucucaguugaugacucucaaagauuucaagugcuucaacuugauucccaacgcaaaaaccuggauggauauugaaggaagaccagaagacccaguugagauagcccuuuaucaaccgagcucggguugcuauguacauuucuuuagggagccaacagauuugaagcaauucaaacaagaugcaaaguauucacaugguauugaugugacugauuuguuugcugcccaaccuggguuaaccagugcagugauagaagcccuuccucggaacauggucaucacuugccaaggaucagaggauaucagaaaacuccuugagucacaagggaggagagacauaaaacugauugacaucacucuuaguaaagcagauucaagaaaguuugagaaugcuguuugggaucaauucaaggaucuaugucacaugcacacugggguaguuguggagaaaaagaagagaggugguaaagaggaaauaacuccucauugugcacugauggauugcauuauguuugaugcagcaguuucaggaggacuugaugcaaaaguccugagaguugugcucccuagagacaugguguucagaacuucaacaccuaaagucguccuguagggacuagucccuguucccagagcccacuuuuuuuucuuuuuuugaaauaaaauagccugucuuucagaucuaaaaaaaaaaaaaaaaaaaaaaaaaaaaaaaaaaaaaaaaaaaaaaaaaaaaaaaaaaaaaaaaugcaucccccccccccccccccccccccccccccccaaaggcucuuuucagagccaccagaauu

SEQ ID NO: 9810 - RNA, 1986 nt, Artificial Sequence
  mRNA product Design a-1 comprising derived and/or modified sequence from LASV(AV;Clade V)__CCA30315__NP (wt)
gggagagucccgcagucggcguccagcggcucugcuuguucgugugugugucguugcaggccuuauucaagcuuaccaugagugccuccaaagaagugaaaucuuucuuauggacacaaucucugaggagggaguugucggguuacuguuccaauaucaaacuucaaguggugaaggacgcucaagcucucuugcaugggcuugacuucucugaggucagcaauguccagcggcugaugcgcaaacaaaggagagaugauagugaccuaaagcgucuuagggaucugaaucaagcugucaacaaucuuguugagcugaaaucgacacaacagaaaagugugcugagaguugggacccuaaguucggacgauuuacugacucuggcggcugauuuagaaaagcugaaaucaaaaguuacaagaacagaaaggcccuugaguucaggugucuacaugggaaaccuaaguucacagcagcucgaucagaggagggcacuucuaaauuugauugggaugacaaacggcagucaggggucacaggcugggagagauggagugguaagagucugggaugugaagaaugcagaauuguugaacaaucaauuugggacaaugccgagccugacauuagcaugucugacaaagcagggacaaguugacuuaaaugaugugguacaagcacucacagaucugggcuugauuuauacagcuaaauauccuaacacaucagauuuagauagguuaacucaaagucaucccauuuuaaacaugauugacaccaagaagagcucccugaacaucucaggcuacaauuuuagucugggugccgcagugaaagcaggugccugcaugcuggaugguggcaacauguuagaaacaaucaagguuucgccucaaucaauggauggcauuuuaaaauccaucuugaaggucaagagggcucuugggauguucgucucagauacuccgggugagagaaaccccuaugaaaacauacucuacaaaaucugcuuaucaggugacggguggccauacauugcaucuaggacaucaauaguaggaagggcuugggaaaacacuguaguggaccuugaaacagaugggaaaccacagaaaauuggcagugguaacuccaacaaaucucuccaaucugcaggcuucucggcuggacuaacuuacucccaacuuaugacccuuaaagaugcaauguugcagcuugacccaaaugccaagacguggauggacauagaagggaggccagaggacccgguggaaguugcucucuaucagccuaucucuggguguuauauacacuuuuucagagagcccacugaucucaaacaauuuaaacaagaugcaaaauauucucauggaauugacaucgcagaucuguuugcugcacaaccaggucugaccagugcuguuauugaggcgcucccccggaauaugguuaucacuugccaaggguccgaagacauaaagaagcuucuugaaucacaagggagaaaggauauaaaacugauugacauugcucuuaguaagauugauucaagaaaguuugaaaaugcuguuugggaucaauauaaagauuugugucacaugcacacagguguuguuguugagaagaagaagagagguggcaaagaagagaucaccccucacugugcauugauggauugcaucauguuugaugcugcugucucaggaggguugaacacacuggugcucagagcugugcuacccagagacaugguguuuagaacaucaacaccaagagucguccuguaaggacuagucccuguucccagagcccacuuuuuuuucuuuuuuugaaauaaaauagccugucuuucagaucuaaaaaaaaaaaaaaaaaaaaaaaaaaaaaaaaaaaaaaaaaaaaaaaaaaaaaaaaaaaaaaaaugcaucccccccccccccccccccccccccccccccaaaggcucuuuucagagccaccagaauu

SEQ ID NO: 9811 - RNA, 1986 nt, Artificial Sequence
  mRNA product Design a-1 comprising derived and/or modified sequence from LASV(Togo/2016/7082;Clade VI)__AMR44578__NP (wt)
gggagagucccgcagucggcguccagcggcucugcuuguucgugugugugucguugcaggccuuauucaagcuuaccaugaguaacucuaaagaggugaagucuuuucucuggacucagucucugaggagagagcugucagguuacugcucuaacaucaaacuccagguggucaaggaugcucaggccuuauuacaugggcuugauuucucugaagugagcaauguucagaggcugaugcgaaaacagaagagggaugauggugaccucaagaggcucagagaccugaaucaagcgguaaauaaucuuguugaacuaaaaucaguucaacaaaaaaguauauugagaguuggcacccugaccucugaugacuuacuaacacuugcugcugaccuagaaaaacuaaagucuaaaguaacuaggacugaaagaccuuugaguucaggaguuuauaugggaaaccucagcucucagcaacuugaccagaggagagcccuccugagcaugauagggaugaguggugggaaccagaacagccaacccaaaggagaugguguugugaggguuugggaugugaaaaaugcugaccugcugaacaaccaguuuggaacgaugcccagucuuacauuagcaugcuuaacaaagcagggacaaguggauuugaaugaugcuguucaggcacugacugaucuaggguugauuuacacagcuaaauacccgaacucaucugaccuagacagacuuucacaaagccauccaauccugaacaugaucgauaccaagaagagcucauugaacaucucuggcuacaauuuuaguuuaggggccgcaaucaagacuggggcaugcaugcuugaugggggcaacaugcuggagacaaucaaggucacuccccaaaccauggaugggauuuugaaauccauuuuaaaggugaagaggagucuugggauguuuauuucugauacaccuggagaaaggaauccuuaugaaaacauucuuuauaaaaucugucuuucaggagacggguggccuuacauagccucacgaacugccaucauugguagagcaugggaaaacacugugguugauuuggagucugauagcaagccacaaaagauugggagcaauggaucuaacaaaucauugcaaucugcaggcuuugccccuggacugacauacucucagcucaugacccucaaagacucaauguugcaauuagauccuaaugcaaagacuuggauagacauugaagguaggccggaagacccuguugaggucgccuuguuucagccuaucucagguugcuacauacacuucuuuagagaaccaacagaccugaagcaauuuaaacaagaugcaaaguacucacaugggauagaugucaccgauuuguuugcugcucagccagguuugaccagugcugucauugaggcacuucccaggaauauggugcugaccugucagggaucagacgacaucaaaaaauuguuggauucacaggggagaagggacauuaaacucauugauguuucucucaauaaaauugacucaagaaaguuugagaaugcuguaugggaucaauacaaagaucugugucacaugcauacagggguagucguggagaagaaaaagaagggagggaaagaagaaauaaccccucauugugccuugcuagacugcaucauguuugaugcagccguguccggaggccuaaaugccacaguuuugagagcuguucuaccuagagacaugguguuuagaacgucaucaccuaaagucguucuguaaggacuagucccuguucccagagcccacuuuuuuuucuuuuuuugaaauaaaauagccugucuuucagaucuaaaaaaaaaaaaaaaaaaaaaaaaaaaaaaaaaaaaaaaaaaaaaaaaaaaaaaaaaaaaaaaaugcaucccccccccccccccccccccccccccccccaaaggcucuuuucagagccaccagaauu

SEQ ID NO: 9812 - RNA, 1986 nt, Artificial Sequence
  mRNA product Design a-1 comprising derived and/or modified sequence from LASV(KAK-428;Clade n.d. (VII))__ANH09741__NP (wt)
gggagagucccgcagucggcguccagcggcucugcuuguucgugugugugucguugcaggccuuauucaagcuuaccaugagcaacucaaaggaggugaaaucuuuccuuuggacucagucucucagaagagaacugucugguuauugcaccaacauaaagcuucaaguugucaaagaugcucaggcacuauugcauggccuugacuucucugaaguuagcaauguccaacgucucaugcguaaacagaaaagagaugauaaugauuuaaagaggcuuagagacuugaaucaggccgucaacaaucuaguggaacuaaaaucagugcaacaaaagagcguccuuaaaguugggacacugaauucagaugaucuccugacauuagcugcagaucuggagaagcucaaaucuaaggugguuagaacugaaaggccucugagcucugguguuuacaugggcaaucuuaguucacaacagcuugaccaaaggagagcacuucuaaacaugauuggaauggcuggcgguagucagggaaaccaaccuagccgagaugguguagucagaguaugggaugucaaaaaugcagaccuacucaacaaccaauuuggcacaaugccaagucuuacauuagcaugucugacaaagcagggccaaguugacuuaaaugauguuguguuggcucugacugauuugggccuuauauacacagccaaauacccuaauucaucagauuuagauaggcugucucagaaccacccaguucugaacaugauugaugucaacaagaguucccuaaacauuucgggcuacaauuucagccugggggcagcagugaaagcuggagcuugcaugcuugauggcgggaacaugcuugagacaaucaagaucuccccucaaacaguggacggcauccugaaaucgaucuugaagguuaaaagggcuuuagggauguuugugucagacaccccuggugaaaggaacccuuaugagaacauacuguauaagguaugucuuucagggaauggguggccauacauagcuucaagaacaucaauuguugggagagcaugggaaaauacugugguagaucuugagucaaacaaaaaucagccuaagguugggaacaauggauccaacaagaugcugcagucuucgggauuugcuacugguuugacuuauucucaguugaugacuuugagggauucaauguuacaguuggacccaacugcaaagaccuggauugacauugaggguagaccugaagacccuguugaguuggcccucuuucagcccaguucaggguguuacauacauuucuuuagagagccuacugaccuaaagcaauucaaacaggaugcaaaauacucucaugggauugaugugaaugauuuguucucggcacaaccugguuuaaccagugcuguuuuggaagcacuaccacguaauauggugcugacuugucaaggcucugaugacauuagaaagcuuuuggacucacaggacaggaaagauauaaagcuaauugacaucucauugagcaaggcugaugcaaggaaguucgagaacgaugugugggaucaauuuaaggauuuaugccauaugcacaccgggauaguugucgagaagaagaagaaaggagggaaacaggaaaugacaccacacugugcauugcuagauuguaucauguuugaugcagcugucucuggggggcuuaauguccccacuuugagagcagugcuucccaccgacauggucuucagaacaauaacaaccaaagucguccuguaaggacuagucccuguucccagagcccacuuuuuuuucuuuuuuugaaauaaaauagccugucuuucagaucuaaaaaaaaaaaaaaaaaaaaaaaaaaaaaaaaaaaaaaaaaaaaaaaaaaaaaaaaaaaaaaaaugcaucccccccccccccccccccccccccccccccaaaggcucuuuucagagccaccagaauu

SEQ ID NO: 9813 - RNA, 1986 nt, Artificial Sequence; identical to SEQ ID NO: 9807
  mRNA product Design a-1 comprising derived and/or modified sequence from LASV(Pinneo-NIG-1969;Clade I)__AIT17837__NP (wt)

SEQ ID NO: 9814 - RNA, 1986 nt, Artificial Sequence
  mRNA product Design a-1 comprising derived and/or modified sequence from LASV(ISTH0009-NIG-2011;Clade II)__AIT17405__NP (wt)
gggagagucccgcagucggcguccagcggcucugcuuguucgugugugugucguugcaggccuuauucaagcuuaccaugaguguuucuaaggaagugaagucauuucucuggacacagucauugaggagggagcuuucaggcuauugcuccaacauaaaacuucaaguuguuaaggaugcucaggcucuucuucauggucuugacuuuucugaagucagcaaugugcaacgcuuaaugcgcaagcaaaaaagggaugauagugaucugaaacgccucagagauuugaaucaggcugucaacaaucuuguagaacucaaaucgacacaacaaaagaguaucuugagaguugggaccuugaccucagaugaccugcugacauuggcagcugacuuagagaaacuaaagucgaaggucauuagaacagaaaggccucuaagcucagguguuuauauggggaauuugagcacacagcagcuugagcagagaagggcauugcugaacaugauaggcaugguugguggggcucagggcacccaaccuggaagagacggaguuguuagagugugggauguuaagaauccggaucuuuugaacaaccaguucggcaccaugccuagucugacauuagcaugucucaccaaacaaggucaaguugauuugaaugaugccgucuuagcacuaacagaccugggucuaauauacacagcuaaguacccaaauagcuccgaccuagauagacuuucccaaagccauccuauacugaauaugguggacauuaagaaaagcucccugaacauuucugguuacaacuucagcuuaggagcugcagugaaggcuggggccugcaugcucgauggggggaacauguuggagaccaucaagguuacaccucagacaauggauggcaucuugaagucuauuuuaaaaguaaaaagaucuuugggaauguuuguuucagauacaccuggugagagaaacccuuaugagaacauacuuuacaagaucugucuuuccggugacggcuggcccuacauagcuucaaggacuucuauuguggguagggcuugggagaauaccacuguggaucucgagucagauggaaaaccgcaaaaagugggcucugcuggguccaacaaguccuuacagucagcgggauucccaacagggcugaccuauucucaguugaugacacuuaaagacucaaugaugcagcuugacccaagugccaaaaccuggauagacauugaaggucguccagaagacccuguggaaauagcucuuuaccaaccuaugucgggcuguuacauacacuucuucagagagccaacagacuuaaaacaguucaaacaggaugccaaauauucucaugggauugauguggcagaucuuuucccugcucaaccugguuugaccagcgcaguuauugaggcccucccucgcaauauggugcugaccugucaagguucagaugacauuaagagacucuuagacucccaaggaagaagggacauaaagcuuauugacauugcacugagcaaggcugacucuaggagauuugaaaaugcuguuugggaucaguguaaagaccuaugccauaugcauacuggagugguugucgaaaagaagaaaagaggaggcaaagaagaaauaacuccgcacugugcuuuaauggacugcauaauguaugaugcagcugugucaggagggcucaauauaccaguuuuaagagcaguucuucccagagacaugguguuuagaaccucaagccccaaggucguccuguaaggacuagucccuguucccagagcccacuuuuuuuucuuuuuuugaaauaaaauagccugucuuucagaucuaaaaaaaaaaaaaaaaaaaaaaaaaaaaaaaaaaaaaaaaaaaaaaaaaaaaaaaaaaaaaaaaugcaucccccccccccccccccccccccccccccccaaaggcucuuuucagagccaccagaauu

SEQ ID NO: 9815 - RNA, 1986 nt, Artificial Sequence
  mRNA product Design a-1 comprising derived and/or modified sequence from LASV(ISTH2010-NIG-2012;Clade II)__AIT17483__NP (wt)
gggagagucccgcagucggcguccagcggcucugcuuguucgugugugugucguugcaggccuuauucaagcuuaccaugagugcuucuaaggaagugaagucauuucucuggacacagucuuugaggagggagcuuucagguuauugcuccaauauaaaacuucaaguuguuaaggaugcucaggcucuccuucauggucuugacuuuucugaagucagcaaugugcagcgcuuaaugcgcaaacaaaagagggaugauagugaucugaaacgucucagagauuugaaucaagcugucaacaaucuuguagaacuuaaaucgacacaacaaaagaguaucuugagaguuggaaccuugaccucagaugacuugcugacacuggcagcugacuuagagaaacugaagucgaaggucauuagaacagaaaggccacuaagcucagguguuuauauggggaauuugaguacacagcagcuugagcagagaagagcauugcugaacuugauaggcaugguugguggggcucagggcacccaaccuggaagagacggaguuguuaggguuugggauguuaaaaauccggaccuuuugaacaaccaguucggcaccaugccuagucugacauuggcaugucucaccaaacaaggucaaguugauuugaaugaugccgucuuagcacugacagaccugggccuaauauacacagccaaguacccaaauagcuccgaccuggacagacuuucucaaagccauccuauauugaauaugguggauacuaagaagagcuccuugaacauuucugguuucaacuucagcuuaggagcugcagugaaagcuggagccuguaugcuugauggggggaacauguuggagaccaucaagguuacaccucagacaauggaugguaucuugaagucuauuuuaaagguaaaaaaaucuuugggaauguuuguuucggacacaccuggugagaggaacccuuaugagaauauacuuuacaagaucugucuuuccggugacggauggccuuacauagcuucaaggacuucuauugugggaagggcuugggagaauaccacuguggaucucgagucagauggaaaaccgcauaaagugggcacugcuggguccaacaagucucugcagucagcgggguucccaacagggcugacuuauucucaguugaugacacuuaaagacucaaugaugcagcuugacccaagugccaaaaccuggauagacauugaaggucguccagaagacccuguggagauagcucuuuaccaaccuaugucagguuguuacauacacuucuucagagaaccaacagacuugaaacaguucaagcaagaugccaaauauucucaugggauugauguggcagaucuuuucccugcucaaccugguuugaccagcgcagucauugaagcccucccccgcaauauggugcuaaccugucaagguucagaugauauuaagagacuccuagacucccaaggaagaagggauauaaagcuuauugacauugcacugagcaaggcugacucuaggagauuugaaaaugcuguuugggaucagugcaaagaucuaugccauaugcacacuggagugguugucgaaaagaagaaaagaggaggcaaagaagaaaucaccccgcacugugcuuuaauggacugcauaauguaugaugcagcugugucaggaggacucaacauaccaguguugagggcaguucuccccagggacaugguguuuagaaccucaagucccaaggucguccuguaaggacuagucccuguucccagagcccacuuuuuuuucuuuuuuugaaauaaaauagccugucuuucagaucuaaaaaaaaaaaaaaaaaaaaaaaaaaaaaaaaaaaaaaaaaaaaaaaaaaaaaaaaaaaaaaaaugcaucccccccccccccccccccccccccccccccaaaggcucuuuucagagccaccagaauu

SEQ ID NO: 9816 - RNA, 1986 nt, Artificial Sequence
  mRNA product Design a-1 comprising derived and/or modified sequence from LASV(Lassa virus/H.sapiens-wt/NGA/2015/ISTH_0543;Clade II)__AVO03640__NP (wt)
gggagagucccgcagucggcguccagcggcucugcuuguucgugugugugucguugcaggccuuauucaagcuuaccaugagugcuucuaaggaagugaagucauuucucuggacacagucauugaggagggagcuuucaggcuauugcuccaacauaaaacuucaaguuguuaaggaugcucaggcucuccuucauggucuugacuuuucugaagucagcaaugugcagcgcuuaaugcgcaagcaaaaaagggaugauagugaucugaaacgucucagagauuugaaucaggcugucaacaaccuuguagaacucaaaucgacacaacagaagaguaucuugagaguugggaccuugaccucagacgaccugcugacauuggcagcugacuuagagaaacuaaagucgaaggucauuagaacagaaaggccucuaagcucagguguuuauauggggaauuugaguacacagcagcuugagcagagaagagcauugcugaacaugauaggcaugguugguggggcucaaggcacccaaccuggaagagauggaguuguuagggugugggauguuaagaauccggaucuuuugaacaaccaguucggcaccaugccuagucugacauuagcaugucucaccaaacaaggucaaguugauuugaaugaugccgucuuagcacuaacagaccugggucuaauauacacagcuaaguacccaaauaguuccgaccuagauagacuuucccaaagccauccuauacugaauaugguggacacuaagaaaagcucccugaacauuucuggcuauaacuucagcuuaggagcugcagugaaggcuggggccuguaugcucgauggggggaacauguuggagaccaucaagguuacaccucagacaauggauggcaucuugaagucuauuuuaaaaguaaaaaaaucuuugggaauguuuguuucagauacaccuggugagagaaacccuuaugagaacauacuuuacaagaucugucuuuccggugacggcuggcccuacauagcuucaaggacuucuauuguggguagggcuugggagaacacuacuguggaucucgagucagauggaaaaccgcaaaaagugggcucugcugggucuaacaaguccuuacagucagcgggauucccaacagggcugaccuauucucaguugaugacacuuaaagacucaaugaugcagcuugacccaagugccaaaaccuggauagacauugaaggucguccagaagacccuguggaaauagcucuuuaccaaccuaugucgggcuguuacauacacuucuucagagaaccaacagacuuaaaacaguucaagcaagaugccaaauauucucaugggauugauguggcagaucuuuucccugcucaaccugguuugaccagcgcaguuauugaagcccucccucgcaauauggugcugaccugucaagguucagaugauauuaagagacucuuagauucccaaggaagaaaggacauaaagcuuaucgacauugcacugagcaaggcugacucuaggagauuugaaaaugcuguuugggaucaguguaaagaccuaugccauaugcauacuggagugguugucgaaaagaagaaaagaggaggcaaagaagaaauaacuccgcauugugcuuuaauggauugcauaauguaugaugcagcugugucaggaggacucaauauaccgguuuuaagggcaguucuucccagagacaugguguuuagaaccucaagccccaaggucguccuguaaggacuagucccuguucccagagcccacuuuuuuuucuuuuuuugaaauaaaauagccugucuuucagaucuaaaaaaaaaaaaaaaaaaaaaaaaaaaaaaaaaaaaaaaaaaaaaaaaaaaaaaaaaaaaaaaaugcaucccccccccccccccccccccccccccccccaaaggcucuuuucagagccaccagaauu

SEQ ID NO: 9817 - RNA, 1986 nt, Artificial Sequence
  mRNA product Design a-1 comprising derived and/or modified sequence from LASV(Lassa virus/H.sapiens-wt/NGA/2016/ISTH_0009;Clade II)__AVO03572__NP (wt)
gggagagucccgcagucggcguccagcggcucugcuuguucgugugugugucguugcaggccuuauucaagcuuaccaugagugcuucuaaggaaguaaagucauuucucuggacacagucauugaggagggagcuuucaggcuauugcuccaauauaaaacuucaaguuguuaaggaugcucaggcucuccuucauggucuugacuuuucugaagucagcaaugugcagcgcuuaaugcgcaagcaaaaaagggaugauagugaucugaaacgucucagagauuugaaucaggcugucaacaaucuuguagaacucaaaucgacacaacaaaagagcaucuugagaguugggaccuugaccucagaugaccugcugacauuggcagcugacuuagagaaacuaaagucgaaagucauuagaacagaaaggccucuaagcucggguguuuauauggggaauuugaguacacagcagcuugagcagagaagagcauugcugaacaugauaggcaugguugguggggcucagggcacccaaccuggaagagacggaguuguuagggugugggauguuaagaauccggaucucuugaacaaccaguucggcaccaugccuagucugacauuagcaugucucaccaaacaaggucaaguugauuugaaugaugcugucuuagcacuaacagaccugggucuaauauacacagcuaaguacccaaauagcuccgaccuagauagacuuucccaaagccauccuauacugaauaugguggauacuaagaaaagcucccugaacauuucugguuacaacuucagcuuaggagcugcagugaaggcuggggccugcaugcucgauggggggaacauguuggagaccaucaagguuacaccucagacaauggauggcaucuugaagucuauuuugaaagugaaaaaaucucugggaauguuuguuucagacacaccuggugagagaaacccuuaugagaacauacuuuacaagaucugucuuuccggugacggcuggcccuacauagcuucaaggacuucuauuguggguagggcuugggagaauacuacuguggaucucgagucagaugggaaaccgcaaaaagugggcucugcuggguccaacaaguccuuacagucagcgggauucccaacagggcugaccuauucucaguugaugacacuuaaagacucaaugaugcagcuugacccaagugccaaaaccuggauagacauugaaggucguccagaggacccuguggaaauagcucuuuaccaacccaugucgggcuguuacauacacuucuucagagaaccaacagacuuaaaacaguucaagcaagaugccaaauauucucaugggauugauguggcagaccuuuucccugcucaaccugguuugaccagcgcgguuauugaagcccucccucgcaauauggugcuaaccugucaagguucagaugauauuaagagacucuuagacucccaaggaagaagggacauaaagcuuauugacauugcacugagcaaggcugacucuaggagauuugagaaugcuguuugggaucaguguaaagaccuaugccauaugcauacuggagugguugucgaaaagaagaaaagaggaggcaaagaagaaauaacuccgcauugugcuuuaauggacugcauaauguaugaugcagcugugucaggaggacuuaauauaccaguuuuaagagcaguucuucccagagacaugguguuuagaaccucaagccccaaggucguccuguaaggacuagucccuguucccagagcccacuuuuuuuucuuuuuuugaaauaaaauagccugucuuucagaucuaaaaaaaaaaaaaaaaaaaaaaaaaaaaaaaaaaaaaaaaaaaaaaaaaaaaaaaaaaaaaaaaugcaucccccccccccccccccccccccccccccccaaaggcucuuuucagagccaccagaauu

SEQ ID NO: 9818 - RNA, 1986 nt, Artificial Sequence
  mRNA product Design a-1 comprising derived and/or modified sequence from LASV(Lassa virus/H.sapiens-wt/NGA/2016/ISTH_0017;Clade II)__AVO03568__NP (wt)
gggagagucccgcagucggcguccagcggcucugcuuguucgugugugugucguugcaggccuuauucaagcuuaccaugagugcuucuaaggaagugaagucauuccucuggacacagucauugaggagggagcuuucagguuauugcuccagcauaaaacuucaaguugucaaggaugcucaagcucuccuucauggucuugacuuuucugaagucagcaaugugcagcgcuuaaugcgcaaacaaaagagggaugauagcgaucugaaacgucucagagauuugaaucaggcugucaacaaucuuguagaacucaaaucgacacaacaaaagagcaucuugagaguugggacccugaccucagaugaccugcugacauuggcagcugacuuagagaaacugaagucaaaggucauuagaacagaaaggccacuaagcucagguguuuauauggggaauuugaguacacagcaacuugagcaaagaagagcauugcugaacaugauaggcauggcugguggggcucagggcacccaaccuggaagagacggaguuguuagggugugggauguuaagaauccggaucuuuugaacaaucaguucggcaccaugccuagucugacauuagcaugucucaccaaacagggucaaguugauuuaaaugaugcugucuuagcauuaacagaccugggucugauauacacagcuaaguauccaaauagcuccgaccuggacagacuuucucaaagccauccuauacugaauaugguggacacuaagaagagcuccuugaacauuucugguuacaacuucagcuugggagcugcagugaaagcuggagcuuguaugcuugauggggggaacauguuggagaccaucaagguuacaccucagacaauggauggcaucuugaagucuauuuuaaagguaaaaagaucuuugggaauguuuguuucagaugcaccuggugagaggaacccuuacgagaacauacuuuacaagaucugucuuucaggugacggcuggcccuacauagcuucaaggacuucuauuguggguagagcuugggagaauacuacuguggaucucgagucagaugggaaaccacaaaaagugggugcuacuggguccaacaaaucuuuacagucagcaggguuuccaacagggcugacuuauucucaguugaugacacuuaaagacucaaugaugcagcuugacccaagugccaaaaccuggauagacauugaaggucguccagaagacccuguggaaguggcucuuuaccaaccugugucgggcuguuacauacacuuuuuuagagaaccaacagauuuaaaacaguucaagcaagaugccaaauauucucaugggauugauguggcggaucuuuucccugcucaaccugguuugaccagcgcagucauugaggcccucccucgcaacaugguacugaccugucaagguucagaugauauuaagaaacucuuggacucccaaggaagaaaggacauaaagcuuauugacauugcgcugagcaaggccgauucuaggagauuugaaaaugcuguuugggaucagugcaaagaucuaugccauaugcauacuggagugguuguugaaaagaagaaaagaggaggcaaagaagaaauuaccccgcacugugcuuuaauggacugcauaauguaugaugcagcugugucuggaggacucaauaucccagucuuaagagcaguucuccccagagacaugguguuuagaaccucaagccccaaggucguccuguaaggacuagucccuguucccagagcccacuuuuuuuucuuuuuuugaaauaaaauagccugucuuucagaucuaaaaaaaaaaaaaaaaaaaaaaaaaaaaaaaaaaaaaaaaaaaaaaaaaaaaaaaaaaaaaaaaugcaucccccccccccccccccccccccccccccccaaaggcucuuuucagagccaccagaauu

SEQ ID NO: 9819 - RNA, 1986 nt, Artificial Sequence
  mRNA product Design a-1 comprising derived and/or modified sequence from LASV(Lassa virus/H.sapiens-wt/NGA/2018/ISTH_0959;Clade II)__AVV65100__NP (wt)
gggagagucccgcagucggcguccagcggcucugcuuguucgugugugugucguugcaggccuuauucaagcuuaccaugagugcuucuaaggaagugaagucauuucucuggacacagucuuugaggagggagcuuucagguuauugcuccaauauaaaacuucaaguuguuaaggaugcucaggcucuccuucauggucuugacuuuucugaagucagcaaugugcagcgcuuaaugcgcaaacaaaagagggaugauagugaucugaagcgucucagagauuugaaucaggcugucaacaaucuuguagaacuuaaaucgacacaacaaaagagcaucuugagaguugggacccugaccucagaugaccugcugacacuggcagcugacuuagagaaacuaaagucgaaggucauuagaacagaaaggccacuaagcucagguguuuauauggggaauuugaguacacagcagcuugagcagagaagggcauugcugaacuugauaggcaugguugguggggcucagggcacccagccuggaagagacggaguuguuaggguuugggauguuaagaauccggaccuucugaacaaccaguucggcaccaugccuagucugacauuggcaugucucaccaaacaaggucaaguugauuugaaugaugucgucuuagcacugacagaccugggccuaauauacacagccaaguacccaaauagcuccgaccuggacagacuuucccagagccauccuauacugaauaugguggacacaaagaagagcucuuugaacauuucugguuucaacuucagcuuaggagcugcaguaaaagcuggagcuuguaugcuugauggggggaacauguuagagaccaucaagguuacaccucagacaauggauggcaucuugaagucuauuuuaaagguaaaaaaaucuuugggaauguuuguuucggacacaccuggugagaggaacccuuaugagaauauacuuuacaagaucugucuuuccggugacggauggcccuauauagcuucaaggacuuccauuguggguagggcuugggagaauaccacuguggaucucgagucagauggaaaaccgcauaaaguaggcacugcuggguccaacaagucuuuacagucagcgggguucccaacagggcugacuuauucucaguugaugacacuuaaagacucaaugaugcagcuugacccaagugccaagaccuggauagacauugaaggucguccagaagacccuguggagauagcccucuaccaaccuaugucaggcuguuacauacacuucuucagagaaccaacagacuugaaacaauucaagcaagaugccaaauauucucaugggauugauguggcagaucuuuucccugcucaaccugguuugaccagcgcagucauugaagcccucccucgcaauauggugcuaaccugucaagguucagaugauauuaagagacucuuagacucccaaggaagaaaggauauaaagcuuauugacauugcacugagcaagacugacucuaggagauuugaaaaugcuguuugggaucaguguaaggaucuaugccauaugcacacuggagugguugucgaaaagaagaagagaggaggcaaagaagagaucaccccgcacugugcuuuaauggacugcauaauguaugaugcagcugugucaggaggacucaauauaccaguuuuaagggcaguucuccccagggacaugguguuuagaaccucaagucccaaggucguccuguaaggacuagucccuguucccagagcccacuuuuuuuucuuuuuuugaaauaaaauagccugucuuucagaucuaaaaaaaaaaaaaaaaaaaaaaaaaaaaaaaaaaaaaaaaaaaaaaaaaaaaaaaaaaaaaaaaugcaucccccccccccccccccccccccccccccccaaaggcucuuuucagagccaccagaauu

SEQ ID NO: 9820 - RNA, 1986 nt, Artificial Sequence
  mRNA product Design a-1 comprising derived and/or modified sequence from LASV(LASV003-NIG-2008;Clade II)__AIT17581__NP (wt)
gggagagucccgcagucggcguccagcggcucugcuuguucgugugugugucguugcaggccuuauucaagcuuaccaugagugcuuccaaggaagugaagucauuucucuggacacagucauugaggagggagcuuucagguuauugcuccagcauaaagcuucaaguugucaaggaugcucaggcucuucuucauggucuugacuuuucugaaguuagcaaugugcagcgcuuaaugcgcaaacaaaaaagggaugauagugaucugaaacgucucagagaucugaaucaggcugucaacaaucuuguggaacucaaaucaacacaacaaaagagugucuugagaguuggaaccuugaccucagaugaccugcugacauuggcagcugacuuagagaaacuaaagucgaaggucaucagaacagaaaggccacuaagcucagguguuuauauggggaauuugagugcacagcaacuugagcaaagaagaacauugcugaacaugauaggcaugguugguggggcucagggcacucaaccuggaagagacggaguuguuagggugugggauguuaagaauccagaucuuuugaacaaucaguucggcaccaugcccagucugacauuagcaugucucacuaaacaaggccagguugauuugaaugaugucgucuuagcacuaacagaccugggucuaauauacacagcuaaguacccuaauagcuccgaccuggacagacuuucccaaagucauccuauauugaguaugguggacaccaagaagagcuccuugaacauuucugguuacaacuucagcuuaggagcugcagugaaagcuggagcuuguaugcuugauggggggaacauguuggaaaccaucaagguuacaccucagacaauggauggcaucuugaagucuauuuuaaagguaaaaaaauccuugggaauguuuguuucagacacaccuggugagaggaacccuuaugagaacauacuuuacaagaucugucuuucuggugacgguuggcccuauauagcuucaaggacuucuauuguggguagagcuugggagaauacuacuguggaucucgagucagauggaaaaccacaaaaagugggaacugcuggguccaauaagucuuuacagucagcgggguuuccaacagggcugacuuacucucaguugaugacacuuaaagacucaaugaugcagcuugacccaagugccaaaaccuggauagacauugaaggucguccagaagacccuguggaaauagcucuauaccagcccaugucgggcugcuacauacacuucuucagagaaccaacagacuuaaaacaguucaagcaagaugccaaauauucucauggaauugauguaacagaucuuuucccugcucaaccuggauuaaccagugcagucauugaagcccucccucgcaauaugguacugaccugucaagguucagaugacaucaagcgacucuuggauucccaaggaaggagggacauaaagcuuauugacauugcauugagcaaggcugacucuagaagauuugaaaaugcuguuugggaucagugcaaagaucuaugccauaugcacacuggagugguugucgaaaagaagaaaagaggaggcaaagaagaaauuaccccacauugugcucuaauggacugcauaauguaugaugcagcugugucaggaggacucaauauaccaguuuugagagcaguccuccccagagacaugguguuuagaaccucaagccccaaggucguccuguaaggacuagucccuguucccagagcccacuuuuuuuucuuuuuuugaaauaaaauagccugucuuucagaucuaaaaaaaaaaaaaaaaaaaaaaaaaaaaaaaaaaaaaaaaaaaaaaaaaaaaaaaaaaaaaaaaugcaucccccccccccccccccccccccccccccccaaaggcucuuuucagagccaccagaauu

SEQ ID NO: 9821 - RNA, 1986 nt, Artificial Sequence
  mRNA product Design a-1 comprising derived and/or modified sequence from LASV(LASV035-NIG-2009;Clade II)__AIT17589__NP (wt)
gggagagucccgcagucggcguccagcggcucugcuuguucgugugugugucguugcaggccuuauucaagcuuaccaugagugcuuccaaggaaguaaagucauuccucuggacacagucauugaggagggaacucucagguuacugcucuaguauaaagcuucaaguuguuaaggaugcucaggcucuccuucauggucuugacuuuucugaggucagcaauguucagcgcuugaugcgcaaacaaaaaagggacgacagugaucugaaacgucucagagaucugaaccaggcugucaacaaucuuguagaacucaaaucaacacaacaaaagaguauccugagaguugggaccuugaccucagaugaccugcugacauuggcagcugacuuagagaaacuuaagucgaaggucaucagaacagaaaggccacuaagcucagguguuuacauggggaauuugagugcacagcaacuugagcaaagaagagcauugcugaacaugauaggcaugguugguggagcucaggguacccaaccuggaagagacggaguuguuagggugugggaugucaagaauccggaucuuuugaacaaccaauucggcaccaugccuagccugacauuagcaugucucaccaaacaaggucaaguugauuugaaugaugcugucuuggcacuaacagaccugggucuaauauacacagcuaaguacccaaacagcuccgaccuggacagacuuucccaaagccauccuauacugaauaugguggacacuaagaagagcuccuugaacauuucugguuacaacuucaguuuaggagcugcagugaaagcuggagcuuguaugcuugauggggggaauauguuggagacuaucaagguuacaccucagacaauggauggcaucuugaaaucuaucuuaaagguaaaaagaucuuugggaauguuuguuucagacacaccuggugagaggaacccuuaugagaacauacuuuacaagaucugucuuucuggggacgguuggcccuacauagcuucaagaacuuccauuguggguagagcuugggagaacaccacuguggaucucgagucagauggaaaaccacaaaaggugggcacuacuggguccaacaagucuuuacagucagcgggguucccaacaggguugaccuauucucaguugaugacacuuaaagacucaaugaugcaacuugacccaagugcuaaaaccuggauagacauugaaggucgaccagaagacccuguggaaauagcucuuuaccaaccuaugucgggcuguuacauacacuucuucagagaaccaacagacuuaaaacaguucaagcaagaugccaaauauucucaugggauugauguagcagaucuuuucccugcucaaccuggcuugaccagugcagucauugaagcccuuccucgcaauauggugcugaccugucaggguucagacgauauuaagaaacucuuagauucccaaggaagaagggacauaaagcuuauugacauugcacugaguaaggcugacucuaggaaguuugaaaaugcuguuugggaccaaugcaaggaucuaugccauaugcauacuggggugguuguugaaaagaagaaaagaggaggcaaagaagaaauuaccccgcacugugcucuaauggauugcauaauguaugaugcagcugugucaggaggacucaauauaccaguuuugagagcaguucuccccagagacaugguguuuagaaccucaagccccaaggucguccuguaaggacuagucccuguucccagagcccacuuuuuuuucuuuuuuugaaauaaaauagccugucuuucagaucuaaaaaaaaaaaaaaaaaaaaaaaaaaaaaaaaaaaaaaaaaaaaaaaaaaaaaaaaaaaaaaaaugcaucccccccccccccccccccccccccccccccaaaggcucuuuucagagccaccagaauu

SEQ ID NO: 9822 - RNA, 1986 nt, Artificial Sequence
  mRNA product Design a-1 comprising derived and/or modified sequence from LASV(LASV1000-NIG-2009;Clade II)__AIT17783__NP (wt)
gggagagucccgcagucggcguccagcggcucugcuuguucgugugugugucguugcaggccuuauucaagcuuaccaugagugcuucuaaggaagugaagucauuucucuggacacagucauugaggagggagcuuucagguuacugcuccaacauaaaacuucaagucguuaaggaugcucaggcucuccuucauggucuugacuucucugaagucagcaaugugcagcgcuuaaugcgcaaacaaaaaagggaugauagugauuugaaacgucucagagauuugaaucaggcugucaacaaucuuguagaacucaaaucgacacaacaaaaaaguaucuugagaguugggaccuugaccucagaugaccugcugacauuagcagcugacuuagagaaauuaaagucgaaggucauuagaacagaaaggccacuaagcucagguguuuauauggggaauuugaguacacagcagcuugagcagagaagagcacugcugaacaugauaggcaugguugguggggcucagggcacccaaccuggaagagacggaguuguuagggugugggauguuaagaauccggaucuuuugaacaaccaguucggcaccaugccuagucugacauuagcaugucucaccaaacaaggucaaguugauuugaaugauguugucuuagcacuaacagaccugggucuaauauacacagcuaaguacccaaauagcuccgaccuggacagacuuucccaaagccauccuauacugaauaugguggacacuaagaagagcuccuugaacauuucugguuacaacuucagcuuaggagcugcaguaaaagcuggagcuuguaugcuugauggggggaacauguuggagaccaucaagguuacaccccagacaauggauggcaucuuaaagucuauuuuaaagguaaaaaaaucuuugggaauguuugucucagacacaccuggugagaggaacccuuaugagaauauacuuuacaagaucugucuuuccggugacggcuggcccuacauagcuucaaggacuucuauuguggguagagcuugggagaacaccacuguggaucucgagucagauggaaagccgcaaaaagugggcacugcuggguccaacaagucuuuacagucagcgggguucccaacagggcugaccuauucucaguuaaugacacuuaaagacucaaugaugcagcuugauccaagugccaaaaccuggauagacauugaaggucguccagaagacccuguggaaauagcucuuuaccaaccugugucgggcuguuacauacacuucuucagagaaccaacagacuuaaaacaguucaagcaagaugccaaauauucucaugggauugauguggcagaucuuuucccugcccaaccugguuugaccagcgcagucauugaagcccucccucgcaauaugguacugaccugucaagguucagaugauauuaagagacucuuggacucccaaggaagaagggacauaaagcuuauugacauugcacugagcaaggcugacuccaggagauuugaaaaugcuguuugggaucagugcaaggaucuaugccauaugcauacuggagugguugucgaaaagaagaaaagaggaggcaaagaagaaaucaccccgcacugugcuuugauggacugcauaauguaugaugcagcugugucaggaggacucaauauaccaguuuuaagagcaguucuccccagggacaugguguuuagaaccucaagccccaaggucguccuguaaggacuagucccuguucccagagcccacuuuuuuuucuuuuuuugaaauaaaauagccugucuuucagaucuaaaaaaaaaaaaaaaaaaaaaaaaaaaaaaaaaaaaaaaaaaaaaaaaaaaaaaaaaaaaaaaaugcaucccccccccccccccccccccccccccccccaaaggcucuuuucagagccaccagaauu

SEQ ID NO: 9823 - RNA, 1986 nt, Artificial Sequence
  mRNA product Design a-1 comprising derived and/or modified sequence from LASV(LASV221-NIG-2010;Clade II)__AIT17625__NP (wt)
gggagagucccgcagucggcguccagcggcucugcuuguucgugugugugucguugcaggccuuauucaagcuuaccaugagugcuucuaaggaaguaaagucauuucucuggacacagucauugaggagggagcuuucagguuauugcuccagcauaaaacuucaaguuguuaaggaugcucaggcucuccuucauggucuugacuuuucugaagucagcaaugugcagcgcuuaaugcgcaaacaaaggagggaugauagugaucugaaacgucucagagauuugaaucaggcugucaacaaucuuguagaacucaaaucgacacaacaaaagagcaucuugagaguugggaccuugaccucggaugaccugcugacauuggcagccgaccuagaaaaacuaaagucgaaggucauuagaacagaaaggccacuaagcucagguguuuauauggggaauuugagcacacagcagcuugagcaaagaagagcauugcugaacaugauaggcaugguugguggggcccagggcacccaaccuggaagggacggaguuguuagagugugggauguuaagaauccggaucuuuugaacaaucaguucggcaccaugccuagucugacauuagcaugucucaccaaacaaggccaaguugauuugaaugaugcugucuuggcacuaacagaucugggucuaauauacacagcuaaguauccaaauagcuccgaccuggacagacuuucccaaagccauccuauacugaacaugguggacaccaagaagagcuccuugaacauuucuggcuacaacuucagcuuaggagcugcagugaaagcuggagcuuguaugcuugaugggggaaacauguuggagaccauuaaggucacaccucagacaguggauggcaucuugaagucuauuuuaaagguaaaaagaucuuugggaauguuuguuucagauacaccuggugagaggaacccuuacgagaacauacuuuacaagaucugucuuucuggcgacggcuggcccuacauagcuucaaggacuucuauuguggguagagcuugggagaauacuacuguggaucucgagucagauggaaaaccacagaaaguggguacugcuggguccaacaagucuuuacagucagcgggguuuccaacagggcugaccuauucucaguugaugacacuuaaagacucgaugaugcagcuugacccaagugccaaaaccuggauagacauugagggucguccagaagacccuguggaaauugcucuuuaccaaccuaugucuggcuguuacauacacuucuucagagaaccaacagauuuaaaacaguucaagcaagaugccaaauauucucaugggauugauguggcagaucuuuucccugcucaaccugguuugaccagugcagucauugaagcucucccucgcaacaugguacugaccugucaagguucagaugauauuaagagacucuuggacucccaaggaagaagggacauaaagcuuauugacauugcacugagcaaggcugauucuaggaaauuugaaaaugcuguuugggaucagugcaaagaucuaugccauaugcauacuggagugguugucgaaaagaagaaaagaggagguaaagaagaaaucaccccgcacugugcuuuaauggacugcauaauguaugaugcagcugugucaggaggacucaacauaccaguucuaagagcaguucuccccagagacaugguguuuagaaccucgagccccaaagucguccuguaaggacuagucccuguucccagagcccacuuuuuuuucuuuuuuugaaauaaaauagccugucuuucagaucuaaaaaaaaaaaaaaaaaaaaaaaaaaaaaaaaaaaaaaaaaaaaaaaaaaaaaaaaaaaaaaaaugcaucccccccccccccccccccccccccccccccaaaggcucuuuucagagccaccagaauu

SEQ ID NO: 9824 - RNA, 1986 nt, Artificial Sequence
  mRNA product Design a-1 comprising derived and/or modified sequence from LASV(LASV237-NIG-2010;Clade II)__AIT17639__NP (wt)
gggagagucccgcagucggcguccagcggcucugcuuguucgugugugugucguugcaggccuuauucaagcuuaccaugagugcuucuaaggaagugaagucauuucucuggacacagucauugaggagggagcuuucaggcuauugcuccaacauaaaacuucaaguuguuaaggaugcucaggcucuucuucauggucuugacuuuucugaagucagcaaugugcagcgcuuaaugcgcaagcaaaaaagggaugauagugaucugaaacgucucagagauuugaaucaggcugucaacaaucuuguagaacucaaaucgacacaacaaaagaguaucuugagaguugggaccuugacuucagaugaucugcugacauuggcagcugacuuagagaaacuaaagucgaaagucauuagaacagaaaggccucuaagcucagguguuuacauggggaauuugagcacacagcagcuugagcagagaagggcauugcugaacaugauaggcaugguugguggggcucaaggcacccaaccuggaagagacggaguuguuagggugugggauguuaagaauccggaucuuuugaacaaccaguucggcaccaugccuagucugacauuagcaugucucaccaaacaaggucaaguugauuugaaugaugccgucuuagcacuaacagaccugggucuaauauacacagcuaaguacccaaauagcuccgaccuagauagacuuucccaaagccauccuauacugaauaugguggacauuaagaaaagcucccugaacauuucugguuacaacuucagcuuaggagcugcagugaaggcuggggccugcaugcucgauggggggaacauguuggagaccaucaagguuacaccucagacaauggauggcaucuugaagucuauuuuaaaaguaaaaagaucuuugggaauguuuguuucagauacaccuggugagagaaacccuuaugagaacauacuuuacaagaucugucuuuccggugacggcuggcccuacauagcuucaaggacuucuauuguggguagggcuugggagaauacuacuguggaucucgagucagauggaaaaccgcaaaaagugggcucugcuggguccaacaaguccuuacagucagcgggauucccaacagggcugaccuauucucaguugaugacacuuaaagacucaaugaugcagcuugacccaagugccaaaaccuggauagacauugaaggucguccagaagacccuguggaaauagcucuuuaccaaccuaugucgggcuguuacauacacuucuucagagagccaacagacuuaaaacaguucaagcaggaugccaaauauucucaugggauugauguggcagaucuuuucccugcucaaccugguuugaccagcgcaguuauugaagcccucccucgcaauauggugcugaccugucaagguucagaugauauuaagagacucuuagacucccaaggaagaagggacauaaagcuuauugacauugcacugagcaaggcugacucuaggagauuugaaaaugcuguuugggaucaguguaaagaccuaugccauaugcauacuggagugguugucgaaaagaagaaaagaggaggcaaagaagaaauaacuccgcacugugcuuuaauggacugcauaauguaugaugcagcugugucaggagggcucaauauaccaguuuuaagagcaguucuucccagagacaugguguuuagaaccucaagccccaaggucguccuguaaggacuagucccuguucccagagcccacuuuuuuuucuuuuuuugaaauaaaauagccugucuuucagaucuaaaaaaaaaaaaaaaaaaaaaaaaaaaaaaaaaaaaaaaaaaaaaaaaaaaaaaaaaaaaaaaaugcaucccccccccccccccccccccccccccccccaaaggcucuuuucagagccaccagaauu

SEQ ID NO: 9825 - RNA, 1986 nt, Artificial Sequence
  mRNA product Design a-1 comprising derived and/or modified sequence from LASV(LASV253-NIG-2011;Clade II)__AIT17671__NP (wt)
gggagagucccgcagucggcguccagcggcucugcuuguucgugugugugucguugcaggccuuauucaagcuuaccaugagugcuuccaaggaagugaagucauuccucuggacacagucauugaggagggagcuuucagguuauugcuccagcauaaagcuucaaguugucaaggaugcucaggcucuccuucauggucucgacuuuucugaaguuagcaaugugcagcgcuuaaugcgcaaacaaaaaagggaugauagugaucugaaacgucucagagaucugaaucaggcugucaacaaucuuguggaacuuaaaucaacacaacaaaagagugucuugagaguugggaccuugaccucagaugaccugcugacauuggcagcugacuuagagaaacuaaagucgaaggucaucagaacagaaaggccacuaagcucagguguuuauauggggaauuugaguacacagcaacuugagcagaggagagcauuacugaacaugauaggcaugguugguggggcucagggcacccaaccuggaagagacggaguuguuagggugugggauguuaaaaauccagaucuuuugaacaaucaguucggcaccaugcccagucugacauuagcaugucucacuaaacaaggccagguugauuugaaugaugucgucuuagcacuaacagaccugggucuaauauacacagcuaaguacccuaauagcuccgaccuggacagacuuucccaaagucauccuauauugaacaugguggacaccaagaagagcuccuugaacauuucugguuacaacuucagcuuaggagcugcagugaaagcuggagcuuguaugcuugaugggggaaacauguuggaaaccaucaagguuacaccucagacaauggauggcaucuugaagucuauuuuaaaggugaaaaaauccuugggaauguuuguuucagacacaccuggugagaggaauccuuaugagaacauacuuuacaagaucugucucucuggugacgguuggcccuacauagcuucaaggacuucaauuguggguagagcuugggagaauacuacuguggaucucgagucagauggaaaaccacaaaaagugggaacugcuggguccaauaagucuuuacagucagcgggguucccaacagggcugacuuacucucaguugaugacacuuaaagacucaaugaugcaacuugacccaagugccaaaaccuggauagacauugaaggucguccagaagacccuguggaaauagcucuuuaccagcccaugucgggcugcuacauacacuucuucagagaaccaacagacuugaaacaguucaagcaagaugccaaauauucucaugggauugauguaacagaucuuuucccugcucaaccuggauuaaccagugcagucauugaagcccucccucgcaauaugguacugaccugucaaggcucagaugacaucaagagacucuuggauucccaaggaagaagggacauaaaacuuauugacauugcauugagcaaggcugacucuaggagauuugaaaaugcuguuugggaucagugcaaagaucuaugccauaugcacacuggagugguugucgaaaagaagaaaagaggaggcaaagaagaaauuaccccacauugugcucuaauggacugcauaauguaugaugcagcugugucaggaggacucaauauaccaguuuuaagagcgguccuccccagagacaugguguuuagaaccucaagccccaaggucguccuguaaggacuagucccuguucccagagcccacuuuuuuuucuuuuuuugaaauaaaauagccugucuuucagaucuaaaaaaaaaaaaaaaaaaaaaaaaaaaaaaaaaaaaaaaaaaaaaaaaaaaaaaaaaaaaaaaaugcaucccccccccccccccccccccccccccccccaaaggcucuuuucagagccaccagaauu

SEQ ID NO: 9826 - RNA, 1986 nt, Artificial Sequence
  mRNA product Design a-1 comprising derived and/or modified sequence from LASV(LASV254-NIG-2011;Clade II)__AIT17675__NP (wt)
gggagagucccgcagucggcguccagcggcucugcuuguucgugugugugucguugcaggccuuauucaagcuuaccaugagugcuucuaaggaagugaagucauuucucuggacacagucauugagaagggaacuuucagguuauugcuccagcauaaagcuucaaguuguuaaagaugcucaggcucuccuucauggucuugacuuuucugaagucagcaaugugcagcgcuuaaugcgcaaacaaaaaagggaugauagugaucugaaacgucucagagaucugaaucaggcugucaacaaucuuguggaacucaaaucaacacaacaaaagagugucuugagaguugggaccuuaaccucagaugaccugcugacauuggcagcugacuuagagaaacuaaagucaaaggucauuagaacagaaagaccacugagcucagguguuuauauggggaauuugaguacacagcagcuugagcaaaggagagcauuguugaacaugauaggcaugguugguggggcucagggcacccaaccuggaagagacggagugguuagggugugggauguuaaaaauccggaucuuuugaacaaccaguuuggcaccaugccuagucugacauuagcaugucucacuaaacaaggucaaguugauuugaaugaugccgucuuagcacuaacagaccugggucuaauauauacagcuaaguacccaaauagcuccgaccuggacagacuuucucaaagucauccuauacugaacaugguggacacuaagaaaagcuccuugaacauuucugguuacaacuucagcuuaggagcugcagugaaagcuggagcuuguaugcuugauggggggaacauguuggagaccaucaagguuacaccucagacaauggauggcauccugaagucuauuuuaaagguaaaaaaauccuugggaauguuuguuucagauacaccuggugagaggaacccuuaugagaacauacuuuacaagaucugucuuuccggugacggcuggcccuacauagcuucuaggacuuccauugugggcagagcuugggagaauaccaucguggaucucgagucagaugggaaaccacaaaaggugggcacugcugggucuaacaagucuuuacagucagcgggguuuccaacagggcugaccuauucucaguugaugacacuuaaagacucaaugaugcagcuugacccaagugccaaaaccuggauagacauugaaggucguccagaggacccuguagaaauagcucuuuaccaaccuaugucgggcuguuauauacauuucuucagagagccaacagacuuaaaacaguucaaacaagaugccaaauauucucaugggauugauguagcagaucuuuucccugcucaaccuggcuugaccagugcagucauugaagcccucccccgcaauaugguccugaccugucaagguucagaugacauuaagagacucuuggauucucaagggagaagggacauaaagcuuauugacauugcacugagcaaggcugacucuaggagauuugaaaaugcuguuugggaucagugcaaagaucuaugccauaugcacacuggaguggucgucgaaaagaagaaaagagggggcaaagaagaaauuaccccgcauugugcuuuaauggacugcauaauguaugaugcagcugugucaggaggacucaauauaccaguuuuaagagcaguucuccccagagauaugguguuuagaaccucaagccccaaagucguccuguaaggacuagucccuguucccagagcccacuuuuuuuucuuuuuuugaaauaaaauagccugucuuucagaucuaaaaaaaaaaaaaaaaaaaaaaaaaaaaaaaaaaaaaaaaaaaaaaaaaaaaaaaaaaaaaaaaugcaucccccccccccccccccccccccccccccccaaaggcucuuuucagagccaccagaauu

SEQ ID NO: 9827 - RNA, 1986 nt, Artificial Sequence
  mRNA product Design a-1 comprising derived and/or modified sequence from LASV(Nig08-04;Clade II)__ADU56611__NP (wt)
gggagagucccgcagucggcguccagcggcucugcuuguucgugugugugucguugcaggccuuauucaagcuuaccaugagugcuuccaaggaagugaaaucauuccuuuggacacagucauugaggagagagcuuucaggcuauugcucuaauauaaaacuccaaguggucaaggaugcucaggcccuucugcauggucucgacuucucugaggucagcaauguccagcgcuugaugcgcaaacagaaaagagaugacggugaccuaaaacgucuuagagaccuaaaucaggcaguuaacaaccuugucgagcucaagucaacacaacaaaagaguguucugaggguuggaacauugaccucagacgacuugcugacuuuagcagcugaucuagagaaauugaagucaaagguuauuaggacggagagaccauuaaguucagguguguauauggggaacuugagcacacaacaacuugagcagaggaaggcguuguugaguaugauaggcauggucgguggugcucagggaacccaaccuggaagagacggaguugucagagugugggaugucaaaaacccggaccuccucaacaaccaauuuggcaccaugccuaguuuaacgcuagcaugucucacuaaacagggucagguugacuuaaaugacgccguucuggcgcuaacagacuugggauuaauauacacagcuaaauaccccaauaguuccgaccuagacagacuuucccagagccauccuauacugaauaugguagauaccaagaagagcucccuaaauauuucugguuauaauuuuaguuugggagcugcagugaaggccggagcuugcaugcucgauggggguaacauguuggaaacuaucaaggugacgccucagacaauggauggcauucugaagucuauucuaaagguaaaaaggucccugggaauguuuguuucagacacaccuggugaaagaaacccuuaugaaaacauacuuuacaaaauuugucucucuggggacggcuggcccuacauagcuucaagaaccuccauuguggguagagcuugggagaauaccacuguagaccuugagucagaugggaaaccacagaaaguggguacugcuggauccaacaaaucucugcaaucugcuggguucccaacagggcugaccuauucucaacugaugacacucaaagauucaaugaugcaacuugacccaagcgccaaaaccuggauagacauugaaggucguccagaagacccuguugagauagcucuuuaccaaccuaugucaggcuguuauauacauuucuucagagaaccaacggauuuaaaacaguucaaacaagaugccaaauauucucaugggauugaugugacagaucucuuuucugcucagccuggucuaaccagugcagucauugaggcucucccccgcaacaugguguugacgugccaagguucagacgacauuaaaaaacucuuggauucucaggggagaagggacaucaagcucauugacaucucauuaaauaaggcugauucuaggagauuugaaaaugcugucugggaucaguguaaagauuugugucacaugcacacuggagugguuguugagaaaaagaagagaggaggcaaagaggagaucacuccacauugugcuuuaauggauugcauaauguuugacgcagcugugucaggaggacucaauauaccaaucuugagagcuguucucccaagagauaugguguucagaacuucaagucccaaagucguccuguaaggacuagucccuguucccagagcccacuuuuuuuucuuuuuuugaaauaaaauagccugucuuucagaucuaaaaaaaaaaaaaaaaaaaaaaaaaaaaaaaaaaaaaaaaaaaaaaaaaaaaaaaaaaaaaaaaugcaucccccccccccccccccccccccccccccccaaaggcucuuuucagagccaccagaauu

SEQ ID NO: 9828 - RNA, 1989 nt, Artificial Sequence
  mRNA product Design a-1 comprising derived and/or modified sequence from LASV(GA391;Clade III)__AAA46284__NP (wt)
gggagagucccgcagucggcguccagcggcucugcuuguucgugugugugucguugcaggccuuauucaagcuuaccaugagugcuuccaaggaagugaggucaugcuuguggacucaaucccuaagaagggaacuaucuggcuacuguuccaacauaaaguugcagguaguuaaagacgcucaagcucuccuucauggucuugacuucuccgaggucaguaauguucagagauugaugcgcaagcagaaaagagaugauggcgaccuaaaacgacugagagaucucaaucaagcagucaacaaucuuguugagcucaaauccacacagcagaaaagugucuuaagaguuggaaccuuaaguucagacgaucuacuaauccuggccgcugauuuagaaaaacugaaaucaaaagucaccagaacagaaaggccuuugaguucaggaguuuauauggggaauuugaguucacaacagcuugaucaaaggagagcccuuuugaacaugauuggcaugacuggaguaaguggagggggaaagggugccaguaauggcauugugagaguuugggaugucaaaaaugcagaguuacucaacaaucaguucggaacaaugccaagccuaacuuuagcaugccugaccaaacaggggcaaguggaccugaaugaugccguucaagcuuugacagauuuagggcugauuuacacagccaaauaccccaacucaucugaucucgacagauugucucagagucauccaauucugaauaugauugacacuaagaaaaguucacucaacaucucugguuacaauuucaguuugggugcugcugucaaagcaggggccugcaugcuugauggugguaacauguuagagacuauuaagguuucaccucagaccauggaugguaucuugaagucaaucuugaaaguuaagaagagucugggaauguuuguaucagacacaccgggugaaaggaacccuuaugagaacauccuauacaagaucugucucucaggagacggaugguccuauauugcaucaaggaccucgauugugggaagagcaugggaaaauacugugguggaccuugagcaagacaacaagccccagaaaauuggaaaugggggguccaacaagucauuacagucugcaggcuuugcugcaggauuaaucuacucucaguugaugacucucaaagauuucaagugcuucaacuugauucccaacgcaaaaaccuggauggauauugaaggaagaccagaagacccaguugagauagcccuuuaucaaccgagcucggguugcuauguacauuucuuuagggagccaacagauuugaagcaauucaaacaagaugcaaaguauucacaugguagggaugugacugauuuguuugcugcccaaccuggguuaaccagugcagugauagaagcccuuccucggaacauggucaucacuugccaaggaucagaggauaucagaaaacuccuugagucacaagggaggagagacauaaaacugauugacaucacucuuaguaaagcagauucaagaaaguuugagaaugcuguuugggaucaauucaaggaucuaugucacaugcacacugggguaguuguggagaaaaagaagagaggugguaaagaggaaauaacuccucauugugcacugauggauugcauuauguuugaugcagcaguuucaggaggacuugaugcaaaaguccugagaguugugcucccuagagacaugguguucagaacuucaacaccuaaagucguccuguagggacuagucccuguucccagagcccacuuuuuuuucuuuuuuugaaauaaaauagccugucuuucagaucuaaaaaaaaaaaaaaaaaaaaaaaaaaaaaaaaaaaaaaaaaaaaaaaaaaaaaaaaaaaaaaaaugcaucccccccccccccccccccccccccccccccaaaggcucuuuucagagccaccagaauu

SEQ ID NO: 9829 - RNA, 1986 nt, Artificial Sequence
  mRNA product Design a-1 comprising derived and/or modified sequence from LASV(Nig08-A19;Clade III)__ADU56619__NP (wt)
gggagagucccgcagucggcguccagcggcucugcuuguucgugugugugucguugcaggccuuauucaagcuuaccaugagugcuuccaaagaagugaaaucauuccuguggacucagucucugagaagagaguuaucuggcuauugcuccaauauaaaacuccaggugguaaaggaugcucaagcucuccuucaugguuuggacuucucugaggucaguaauguucaacgcuugaugcgcaaacaaaaaagggacgauggugaucuuaaacggcuaagagaccucaaucaagcagucaacaaccuuguugaacuaaagucaacucaacaaaagagugugcugaggguuggaacccuaaguucagacgaucuauugguuuuggcugcugaccuggaaaaacugaagucaaagguuguuaggacagaaagaccccugagcucaggaauuuauauggggaaucuaaguucacagcagcuugaucagaggaaggcccuccucaacaugauuggcaugacuggugggaaugggggaaggaauaccacuagugaugguauugugagaguuugggacgucaagaaugcagagcugcuuaacaaucaguuugggacaaugccaagucuaacucuagcauguuugaccaaacaagggcaaguggauuugaaugaugcuguucaggcuuugacagauuugggauugauuuacaccgcaaaauacccuaauucaucugauuuggacaggcuggcccagagccauccgauauugaacaugauugauacuaagaagagcucccuuaacaucucugguuacaauuuuaguuuaggagccgccgucaaggcuggggccugcaugcuugauggaggcaauaugcuagagacuauaaaggucucaccucaaaccauggauggcaucuugaagucaaucuugaaagucaagagaagccugggaauguucaucucagauacgccaggugaaaggaacccuuaugaaaacauacuguacaaaaucugccucucaggagauggguggccuuacauugcaucaaggacuucaauugugggaagagcuugggagaacaccgugguugacuuagagucagacaacaaaccgcaaaagaccggcaauggggguucaaauaagucauugcaaucugcaggguuugcugcaggacugacuuauucucaacugaugaccuuaaaggauucaaugcuucagcuugacccaaaugcaaagacuuggauggauauugagggaagaccagaagauccaguugaaauagcucuguaucaaccaaguucaggcugcuauauacacuucuucagggaaccgacagacuuaaagcaguuuaaacaggaugcaaaauauucacaugguauugaugugacagauuuguuugcugcacagccaggguuaacaagugcagugauagaggcucuuccuagaaacauggucaucaccugucaagggucagaagacaucagaaaacuucuggagucacaggggaggagggauauaaaacugauugacauuucccuuaguaagguggacucaagaaaauuugagaaugcugugugggaucaauucaaggauuuaugucacaugcacaccgggauuguuguggagaagaaaaagaggggaggcaaggaggaaauaacaccucauugugcauuaauggacugcaucauguuugaugcugcagucucaggaggaguugaugcaaagguccugagggcugugcuccccagagauaugguguucagaacuucgacacccaaagucguccuguaaggacuagucccuguucccagagcccacuuuuuuuucuuuuuuugaaauaaaauagccugucuuucagaucuaaaaaaaaaaaaaaaaaaaaaaaaaaaaaaaaaaaaaaaaaaaaaaaaaaaaaaaaaaaaaaaaugcaucccccccccccccccccccccccccccccccaaaggcucuuuucagagccaccagaauu

SEQ ID NO: 9830 - RNA, 1986 nt, Artificial Sequence
  mRNA product Design a-1 comprising derived and/or modified sequence from LASV(G1180-SLE-2010;Clade IV)__AIT17169__NP (wt)
gggagagucccgcagucggcguccagcggcucugcuuguucgugugugugucguugcaggccuuauucaagcuuaccaugagugccucaaaggaaauaaaguccuuucuauggacacaaucauugaggagggaauuaucugguuacugcuccaacaucaaacuacagguggugaaagaugcccaggcucuauuacauggacuugacuucucagaagucaguaauguucaacgguugaugcgcaaggagagaagggaugacaaugauuugaaacgguugagggaccuaaaucaagcggucaacaaccucguugaguuaaaaucaacucaacaaaagagcauauugagaguugggacccuaaccucagaugacuuauuaaucuuagccgcugaucuagagaaguuaaaaucaaaggugaucaggacagaaaggccauugagugcaggugucuauaugggcaacuugagcucacagcagcuugaccaaagacgagcucuucugaguaugauaggaaugaguagugguaaucaaagggcucaggcugggagggauggaguggugagaguuugggauguaaaaaauguagaguugcuuaauaaucaguucggaaccaugccaagucuaacacuggcaugucugacaaaacaggggcagguugauuugaaugaugcagugcaagcacugacagauuugggucugaucuacacagcaaaguauccuaauacuucagaccuagauaggcugacucaaagucaccccaucuuaaacaugauugacaccaagaaaagcucuuugaauaucucugguuacaauuucagcuugggugcagcugugaaggcaggagcuugcaugcuggaugguggcaauauguuggagacaaucaaggugucaccucagacaauggaugguauccucaaauccaucuuaaaggucaagaaggcucuugggauguucaucucagacaccccuggugaaaggaaucccuaugaaaacauacucuacaagaucuguuugucaggagauggauggccauauauugcaucaagaaccucgauaacaggaagagccugggaaaacacugucguugacuuggaaucagaugggaagccacagaaagcuggcagcaacaauucuaauaaauccuugcagucaguaggguuuacugcugggcuuaccuauucucagcugaugacccucaaggaugcgaugcugcaacuugacccaaacgcuaagacuuggauggacaucgaaggaagaccugaagauccaguggaaauugcccucuaucagccaaguucaggcugcuacauacacuuuuuccgugaaccuacugauuuaaagcaguucaagcaggaugcuaaguacucacaugggauugaugucacagaccucuucgcugcacaaccgggcuugaccagugcuguuauagaugcacucccccggaacauggucauuaccugucagggguccgaugacauaaggaagcuccuugagucacaagguagaaaagacaucaaauuaauugauauugcccucagcaaaacugauuccaggaaguaugaaaaugcagucugggaucaguauaaagaccuaugccacaugcacacagguguuguuguugaaaagaagaaaagaggcgguaaagaggaaauaaccccucacugugcacuaauggacugcaucauguuugaugcagcagugucaggaggacugaacacaucuguuuugagagcagugcugccuagagauaugguauucagaacaucgacaccuagagucguccuguaaggacuagucccuguucccagagcccacuuuuuuuucuuuuuuugaaauaaaauagccugucuuucagaucuaaaaaaaaaaaaaaaaaaaaaaaaaaaaaaaaaaaaaaaaaaaaaaaaaaaaaaaaaaaaaaaaugcaucccccccccccccccccccccccccccccccaaaggcucuuuucagagccaccagaauu

SEQ ID NO: 9831 - RNA, 1986 nt, Artificial Sequence
  mRNA product Design a-1 comprising derived and/or modified sequence from LASV(G1442-SLE-2011;Clade IV)__AIT17181__NP (wt)
gggagagucccgcagucggcguccagcggcucugcuuguucgugugugugucguugcaggccuuauucaagcuuaccaugagugcuucaaaggagguaaaguccuucuuguggacacaaucccugaggagggagcuguccgguuauuguuccaauaucaaacuacagguagugaaagaugcccaagcccuuuugcauggacuugauuucucugaggucagcaauguccaacgguugaugcgcaaacagagaagggaugacaaugaccugaaacggcugagggaucuaaaucaagcagucaacaaccuuguugagcugaaaucuacccaacagaaaagugugcugagaguaggaacucuaaccucagaugaucuguugguuuuggcugcugaccuggagaagcugaaaucaaaagugaucaggacagaaaggccauugagcgcaggugucuauaugggcaacuugagcucacagcaacuagaccaaagacgggcucuccugaauaugauaggaaugagugguggcauucaagggacucguacugggagagauggagugguaagagucugggauguaaaaaaugcagaccuacuuaacaaucaguucggcacuaugccaagucugacauuggcauguuuaacaaaacaaggacagguugaccugaaugauguggugcaggcacugacagaucugggccugauuuauacagcaaaguacccuaaugccucagacuuagauagguugacucagagucaccccaucuuaaacaugauugauaccaaaaaaaguucccuaaauaucucagguuacaacuucagucugggugcagcugugaaggcaggagcuugcaugcuggauggugguaacauguuggagacaaucaaggugucaccucagacaauggauggcauccucaagucuauccuaaagguaaaaaagacucuugggauguucaucucagacaccccuggugaaaggaauccuuaugagaacauacuuuacaagauuugucugucaggagauggauggccauauauugcaucaagaacuucaauuacaggaagggccugggaaaacacugucguugaucuggaaucagaugggaagccacagaaggcugggagcaacaauucuaacaaaucccugcagucagcaggcuuugccgcugggcucacuuauucucagcuuaugacccucaaagaugcaaugcugcagcuugaucccaaugcuaaaaccuggauggacauugagggaagaccugaagacccaguggagauugcucucuaucagccaaguucagguugcuacauucacuucuuccgugaaccuacugauuuaaagcaguucaagcaagaugcuaaauauucacauggaauugaugucacagaccucuucgccgcacaaccaggcuugaccagugcugucauagaggcacuuccccggaacauggucaucaccugucagggaucugaugacauaaagaaacuccuugaaucacagggaagaaaggauaucaaacuaauugacaucgcccucaguaaaacugauuccaggaaguaugaaaacgcagucugggaucaauauaaggacuuaugccauaugcacacagguguuguuguugaaaagaagaaaagaggcggcaaggaggagauaacaccucacugugcuuugauggacugcauuauguuugacgcagcagugucaggaggauugaacacauuggucuugagagcgguucuaccuagagacaugguguuuagaacaucgacacccagagucguccuguaaggacuagucccuguucccagagcccacuuuuuuuucuuuuuuugaaauaaaauagccugucuuucagaucuaaaaaaaaaaaaaaaaaaaaaaaaaaaaaaaaaaaaaaaaaaaaaaaaaaaaaaaaaaaaaaaaugcaucccccccccccccccccccccccccccccccaaaggcucuuuucagagccaccagaauu

SEQ ID NO: 9832 - RNA, 1986 nt, Artificial Sequence
  mRNA product Design a-1 comprising derived and/or modified sequence from LASV(G3010-SLE-2013;Clade IV)__AIT17345__NP (wt)
gggagagucccgcagucggcguccagcggcucugcuuguucgugugugugucguugcaggccuuauucaagcuuaccaugagugccucaaaggaaauaaaguccuuucuguggacacagucauugaggagggaauugucugguuauuguucuaacaucaaacuacagguggugaaagaugcgcaagcucuuuuacauggacuugacuucuccgaagucaguaauguucaacgguugaugcgcaaggagagaagggaugacaaugauuugaaacgguugagggaccuaaaucaagcugucaacaaccuuguugaguuaaaaucaacucaacaaaaaaguauacugagaguugggacccuaaccucagaugacuuguuaaucuuggcugcugaucuagagaaguugaaaucaaaggugaccaggacagaaaggccauugagugcaggugucuauaugggcaaccugagcucacagcaacuugaccaaagacgagcucuucugaguaugauaggaaugaguagugguguucaaggggcucgggcugggagagauggaguggugagaguuugggauguaaaaaaugcagaguugcuuaauaaucaguucggaaccaugccaagucugacacuagcauguuugacaaaacaggggcagguugacuugaaugauguagugcaagcauugacagauuuggguuugaucuacacagcaaaguacccaaauacuucagauuuagauaggcugacucaaagucaccccauccugaacaugauugacaccaagaaaagcucuuugaauaucucagguuauaauuucagcuugggugcagcuguaaaggcaggagcuugcaugcuggaugguggcaacauguuggagacaaucaaggugucaccucagacaauggauggcauccucaaguccaucuuaaaggucaagaaagcucuugggauguucaucucagagaccccuggugaaaggaauccuuaugagaacauacucuacaagaucugucuaucaggagauggauggccauauauugcaucaagaaccucaauaacaggaagggccugggaaaacacugucguugaucuggaaucagaugggaagccacaaaaagcuggcagcaacaauuccaauaaaucccugcagucggcaggguuuaccgcugggcuuaccuauucucagcugaugacccucaaagacgcaaugcugcaacuugacccaaaugcuaagaccuggauggacauugaaggaaggccugaagauccaguggagguugcccucuaucaaccaaguucaggcugcuacauacacuucuuccgugaacccacugauuugaagcaguucaagcaggaugcuaaguacucacaugggauugauguuacagaccucuucgcugcgcaaccaggcuugaccagugcugucauagaugcacuuccccggaauauggucauuaccugucaggggucugaugacauaaagaaacuccuugaaucacaagguaggaaagacaucaagcuaauugauauugcccucaguaaaacugauuccaggaaguaugaaaaugcagucugggaccaguauaaagacuuaugccacaugcacacagguguugucguugaaaagaagaaaagaggcgguaaagaggaaauaaccccucacugugcacuaauggacugcaucauguuugaugcagcaguaucaggaggacugaacacaucggucuuaagagcagugcugcccagagauaugguguucagaacaucgacaccuagagucguucuguaaggacuagucccuguucccagagcccacuuuuuuuucuuuuuuugaaauaaaauagccugucuuucagaucuaaaaaaaaaaaaaaaaaaaaaaaaaaaaaaaaaaaaaaaaaaaaaaaaaaaaaaaaaaaaaaaaugcaucccccccccccccccccccccccccccccccaaaggcucuuuucagagccaccagaauu

SEQ ID NO: 9833 - RNA, 1986 nt, Artificial Sequence
  mRNA product Design a-1 comprising derived and/or modified sequence from LASV(G502-SLE-2009;Clade IV)__AIT17127__NP (wt)
gggagagucccgcagucggcguccagcggcucugcuuguucgugugugugucguugcaggccuuauucaagcuuaccaugagugccucaaaggaaauaaaguccuuucuguggacacaaucauugaggagggaauugucugguuacugcuccaacaucaaacuacaggugguaaaagaugcccaggcucuucugcauggucuugacuucuccgaagucaguaauguucaacgguuaaugcgcaaggagagaagggaugacaaugacuugaaacgguugagggaccuaaaucaagcggucaacaaccuuguugaguuaaaaucaacucaacaaaagaguauacugagaguugggacucuaaccucagaugacuuauuaaucuuagcugcugaucuagagaaguugaaaucaaaggugaucaggacagaaaggccauugagugcaggugucuauaugggcaacuugagcucacagcaacuugaccaaagacgggcucuucugaguaugauaggaaugaguggugguaaucaagggguucgggcugggaaggauggaguggugagaguuugggaugugaaaaaugcagaguugcuuaauaaucaguuugggacuaugccaagucuaacacuggcaugucugacaaaacaggggcagguugacuugaaugaugcagugcaagcacugacagauuugggucugaucuacacagcaaaguaucccaauacuucagacuuagauaggcugacucaaagucaccccaucuuaaacaugauugacaccaagaagaguuccuugaauaucucugguuauaauuuuagcuugggugcagcugugaaagcaggagcuugcaugcuggaugguggcaauauguuggagacaaucaaagugucaccucagacaauggaugguauccucaaauccaucuuaaaggucaagaaggcucuugggauguucaucucagacaccccuggugaaaggaauccuuaugaaaacauacucuacaagauuuguuugucaggagauggauggccauauauugcaucaagaacuucaauaacaggaagagccugggaaaacacugucguugaccuagaaucagaugggaagccacagaaagcuggcagcaacaauuccaauaaaucccugcagucggcaggguuuaccgcugggcuuaccuauucucagcugaugacccucaaggaugcgaugcugcagcuugacccaaacacuaagacuuggauggacaucgaaggaagaccugaagacccaguggaaauugcccucuaucagccaaguucaggcugcuacauacacuuuuuccgugaaccuacugauuuaaagcaguucaagcaggaugcuaaguacucacaugggauugauguuacagaccucuucgcugcacaaccgggcuugaccagugcugucauagaugcacucccccggaauauggucauuaccugucagggguccgaugacauaaggaaacuccuugaaucacaagguagaaaagacaucaaacuaauugauauugcccucaacaaaacugauuccaggaaguaugaaaaugcagucugggaucaguauaaggacuugugccacaugcacacaggugucguuguugaaaagaagaaaagaggcgguaaagaggaaauaaccccucacugugcacuaauggacugcaucauguuugaugcagcagugucaggaggacugaacacaucuguuuugagagcagugcugccuagagauaugguauucagaacaucaacacccagagucguccuguaaggacuagucccuguucccagagcccacuuuuuuuucuuuuuuugaaauaaaauagccugucuuucagaucuaaaaaaaaaaaaaaaaaaaaaaaaaaaaaaaaaaaaaaaaaaaaaaaaaaaaaaaaaaaaaaaaugcaucccccccccccccccccccccccccccccccaaaggcucuuuucagagccaccagaauu

SEQ ID NO: 9834 - RNA, 1986 nt, Artificial Sequence
  mRNA product Design a-1 comprising derived and/or modified sequence from LASV(G733-SLE-2010;Clade IV)__AIT17155__NP (wt)
gggagagucccgcagucggcguccagcggcucugcuuguucgugugugugucguugcaggccuuauucaagcuuaccaugagugccucaaaggaaauaaagucuuuucuguggacacaaucccugaggagggaacugucugguuacugcuccaacaucaaacuucaggugguaaaagaugcccaagcucuuuugcacggacuugacuucuccgaagucaguaauguucaacgguugaugcgcaaagagagaagggaugacaaugauuugaaacggcugagggaccuaaaucaagcggucaacaaccuuguugaguuaaaaucaacucaacagaagaguguacugagaguugggacccuaaccucagaugaguuauuagucuuggcugcugaucuagagaaauuaaaaucaaaagugaucaggacagaaaggccauugagugcaggugucuauaugggcaaccugagcucacagcaacuugaccaaaggcgagcucuucugaguaugauagggaugagugguggcaaucaaggggcucggacugggagagaugggguggugagaguuugggauguaaaaaaugcagaauugcucaauaaucaguucgggaccaugccaagucugacacuggcaugucugacaaaacaagggcagguugacuuaaaugaugcagugcaagcauugacagauuuggguuugaucuacacagcaaaguauccuaacacuucagacuuggauaggcugacucaaagucaccccauccuaaauaugauugacaccaagaaaagcucuuugaacaucucagguuauaauuuuagcuugggugcagcugugaaggcaggagcuuguaugcuggaugguggcaauauguuggagacaaucaaagugucaccucagacaauggauggcauccucaaauccauuuuaaaggucaagaaggcucuugggauguucauuucagacaccccuggugaaaggaaucccuacgaaaacauacucuacaagauuuguuugucaggggauggauggccauauauugcaucaagaaccucaauaacaggaagggccugggaaaacacugucguugaucuagagucagaugggaagccacagaaagcuggcagcaacaauuccaacaaaucccugcagucggcaggguuuacugcugggcuuacuuauucucagcuuaugacccucaaggaugcaaugcugcaacuugauccaaaugcuaagacuuggauggacauugaaggaagaccugaagauccaguggaaauugcccucuaucaaccaaguucaggcugcuacauacacuucuuccgugagccuacugauuuaaagcaguucaagcaagaugcuaaauacucacaugggauugaugucacagaccucuucgcugcacaaccgggcuuaacuagugcugucauagaugcacucccccggaauaugguuaucaccugucagggguccgaugauauaaggaaacuccuugaaucacaaggaagaaaggacaucaaauuaauugacauugcccucagcaaaauugauuccaggaaguaugaaaaugcagucugggaucaguauaaagacuuaugccacaugcacacaggugucguuguugaaaagaagaaaagaggcgguaaagaggaaauaaccccucacugugcacuaauggacugcaucauguuugaugcagcagugucaggaggacugaacucauuaguuuugagagcagugcugcccagagacaugguauucagaacaucgacaccaagagucguccuguaaggacuagucccuguucccagagcccacuuuuuuuucuuuuuuugaaauaaaauagccugucuuucagaucuaaaaaaaaaaaaaaaaaaaaaaaaaaaaaaaaaaaaaaaaaaaaaaaaaaaaaaaaaaaaaaaaugcaucccccccccccccccccccccccccccccccaaaggcucuuuucagagccaccagaauu

SEQ ID NO: 9835 - RNA, 1986 nt, Artificial Sequence
  mRNA product Design a-1 comprising derived and/or modified sequence from MOPV/LASV reassortant(IGS-1;Clade IV)__AFY05578__NP (wt)
gggagagucccgcagucggcguccagcggcucugcuuguucgugugugugucguugcaggccuuauucaagcuuaccaugagugccucaaaggaaauaaaauccuuuuuguggacacaaucuuugaggagggaauuaucugguuacugcuccaacaucaaacuacagguggugaaagaugcccaggcucuuuuacauggacuugacuucuccgaagucaguaauguucaacgguugaugcgcaaggagagaagggaugacaaugauuugaaacgguugagggaccuaaaucaagcggucaacaaucuuguugaauuaaaaucaacucaacaaaagaguauacugagaguugggacucuaaccucagaugacuuauuaaucuuagccgcugaucuagagaaguuaaggucaaaggugaucagaacagaaaggccauuaagugcaggugucuauaugggcaaccuaagcucacagcaacuugaccaaagaagagcucuccugaauaugauaggaaugaguggugguaaucaaggggcucgggcugggagagauggaguggugagaguuugggaugugaaaaaugcagaguugcucaguaaucaguucgggaccaugccaagucugacacuggcaugucugacaaaacaggggcagguugacuugaaugaugcaguacaagcauugacagauuuggguuugaucuacacagcaaaguaucccaacacuucagacuuagacaggcugacucaaagucaucccauccuaaauaugauugacaccaagaaaagcucuuugaauaucucagguuauaauuuuagcuugggugcagcugugaaggcaggagcuugcaugcuggaugguggcaauauguuggagacaaucaaggugucaccucagacaauggaugguauccucaaauccauuuuaaaggucaagaaggcucuuggaauguucauuucagacaccccuggugaaaggaauccuuaugaaaacauacucuacaagauuuguuugucaggagauggauggccauauauugcaucaagaaccucaauaacaggaagggccugggaaaacacugucguugaucuggaaucagaugggaagccacagaaagcugacagcaacaauuccaguaaaucccugcagucggcaggguuuaccgcugggcuuaccuauucucagcugaugacccucaaggaugcaaugcugcaacuugacccaaaugcuaagaccuggauggacauugaaggaagaccugaagauccaguggaaauugcccucuaucaaccaaguucaggcugcuacauacacuucuuccgugaaccuacugauuuaaagcaguucaagcaggaugcuaaguacucacaugggauugaugucacagaccucuucgcuacacaaccgggcuugaccagugcugucauugaugcacucccccggaauauggucauuaccugucagggguccgaugacauaaggaaacuccuugaaucacaaggaagaaaagacauuaaacuaauugauauugaccucaguaaaacugauuccaggaaguaugaaaaugcagucugggaccaguauaaagacuuaugccacaugcacacaggugucguuguugaaaagaagaaaagaggcgguaaagaggaaauaaccccucacugugcacuaauggacugcaucauguuugaugcagcagugucaggaggacugaacacaucgguuuugagagcagugcugcccagagauaugguguucagaacaucgacaccuagagucguucuguaaggacuagucccuguucccagagcccacuuuuuuuucuuuuuuugaaauaaaauagccugucuuucagaucuaaaaaaaaaaaaaaaaaaaaaaaaaaaaaaaaaaaaaaaaaaaaaaaaaaaaaaaaaaaaaaaaugcaucccccccccccccccccccccccccccccccaaaggcucuuuucagagccaccagaauu

SEQ ID NO: 9836 - RNA, 1986 nt, Artificial Sequence
  mRNA product Design a-1 comprising derived and/or modified sequence from LASV(LM765-SLE-2012;Clade IV)__AIT17815__NP (wt)
gggagagucccgcagucggcguccagcggcucugcuuguucgugugugugucguugcaggccuuauucaagcuuaccaugagugccucaaaggaaauaaaauccuuuuuguggacacaauccuugaggagggaauuaucugguuacugcuccaacaucaaacugcagguggugaaggaugcccaggcucuuuuacaugggcuugacuucucugaagucaguaauguucaacgguugaugcgcaaggagagaagggaugacaaugauuugaaacgguugagggaccuaaaucaagcagucaacaaucuuguugaauuaaaaucaacucaacaaaagaguauacugagaguugggacucuaaccucagaugacuuauuaaucuuggccgcugaucuagagaaguugaagucgaaggugaccagaacagaaaggccauugagugcaggugucuauaugggcaaccuaagcucucagcaacuugaccaaagaagagcucuucuggacaugauaggaaugagugguaguaaucaaggggcucgggcugggagagauggaguggucagaguuugggaugugaaaaaugcagaguugcucaauaaucaguucgggaccaugccaagucugacacuggcaugucugacaaaacaggggcagguugacuugaaugaugcagugcaagcauugacagauuuagguuugaucuacacagcgaaguaccccaauacuucagacuuggacaggcugacucaaagucaucccauccuaaauaugauugacaccaagaaaagcucuuugaacaucucagguuauaauuuuagcuugggugcagcugugaaggcaggagcuuguaugcuggaugguggcaauauguuggagacaaucaaggugucaccucagacaauggauggcauucucaaauccauuuuaaaggucaagaaggcucuugggauguuuauuucagaugccccuggugaaaggaauccuuaugaaaacauacucuacaagauuuguuuaucaggagacggauggccauacauugcaucaagaaccucaauaacaggaagggccugggaaaacacuguuguugaccuggaaucagaugggaagccacagaaagcuggcaguaacgguuccaauaaaucucugcagucggcaggauuuaccgcugggcucaccuauucucagcugaugacccucaaggaugcaaugcugcaacuugacccaaaugcuaagaccuggauggacauugaaggaagaccugaagauccaguggaaaucgcccucuaucaaccaaguucagggugcuacauacacuucuuccgugaaccuacugauuuaaagcaguucaagcaggaugcuaaguacucacaugggauugaugucacggaccucuucgcugcacagccgggcuugaccagugcugucauugaugcacucccccggaauauggucaucaccugccagggaucugaugacauaaggaaacucuuugaaucacaaggaagaaaagacauuaaacuaauugacauugcccucagcaagacugauuccaggaaguaugaaaaugcagucugggaucaguauaaagauuuaugccacaugcauacagguauuguuguugagaagaagaaaagaggugguaaagaggaaauaaccccucacugugcauuaauggacugcaucauguuugaugcagcaguaucaggaggacugaacacaucaguuuugagagcagugcugcccagagacaugguguucagaacaucgacaccuagggucguccuguaaggacuagucccuguucccagagcccacuuuuuuuucuuuuuuugaaauaaaauagccugucuuucagaucuaaaaaaaaaaaaaaaaaaaaaaaaaaaaaaaaaaaaaaaaaaaaaaaaaaaaaaaaaaaaaaaaugcaucccccccccccccccccccccccccccccccaaaggcucuuuucagagccaccagaauu

SEQ ID NO: 9837 - RNA, 1986 nt, Artificial Sequence
  mRNA product Design a-1 comprising derived and/or modified sequence from LASV(LM776-SLE-2012;Clade IV)__AIT17825__NP (wt)
gggagagucccgcagucggcguccagcggcucugcuuguucgugugugugucguugcaggccuuauucaagcuuaccaugagugcuucaaaggaaauaaaguccuuucuguggacacaaucauuaaggagggaauuaucuaguuacuguuccaacaucaaacuacagguggugaaagaugcccaggcucuuuugcaugggcuugacuucuccgaagucagcaauguucaacgguugaugcgcaaggagagaagggaugacaaugauuuaaagcgguugagggaccuuaaucaagcagucaacaaccuuguugaguuaaaaucaacucaacaaaagaguauauugagaguugggaccuuaaccucagaugacuuacuaaucuuagcugcugaucuagagaagcugaaaucaaaggugacuaggacagaaaggccauugagugcaggugucuacauggguaaccugagcucacagcaacuugaccagagacgagcucuucugagcaugauagggaugagugguaguaaucaaggggcucgggcugggagagauggaguggugagaguuugggaugugaaaaaugcagaguugcucaauaaucaguucgggaccaugccaagucuuacacuggcauguuugacaaaacaggggcagguugacuugaaugaugcagugcaagcauugacagauuugggucugaucuacacggcaaaguaucccaauacuucagaccuggauaggcugacucaaagucaccccauccuaaacaugauugacaccaagaagagcucuuuaaacaucucagguuauaauuuuagcuugggugcagcugugaaggcaggagcuugcaugcuggaugguggcaacauguuggagacaaucaaggugucaccucagacaauggaugguauccucaaauccaucuugaaggucaagaaggcucuugggauguucaucucagacaccccuggugaaaggaauccuuaugagaacauacucuauaagaucugucugucaggagauggguggccauacauugcaucaaggaccucaauaacaggaagggcuugggaaaacacugucguugaucuggaaucagaugggaagccacagaaagcuggcagcaacaauucuaacaaaucccugcagucggcaggguuuaccgcugggcuuaccuauucucagcuaaugacucucaaggaugcaaugcugcaacuugauccaaaugcuaagaccuggauggauauugaaggaagaccugaagauccaguggaaguugcccucuaucaaccaaguucaggcuguuacauucacuucuuccgugaaccuacugauuuaaagcaguucaaacaggaugcuaaguacucacaugggauugaugucacagaccucuucgcugcacaaccgggccugaccagugcugucauagaugcacucccucggaauauggucauuaccugucagggguccgaugacauaaggaaacuccuugaaucacaagguaggaaagacaucaaacuaauugauauugcccucagcaaaacugauuccaggaaguaugaaaaugcagucugggaucaguauaaagacuuaugccacaugcacacaggugucguuguugagaagaagaaaagaggugguaaagaggaaauaaccccucacugugcacuaauggacugcaucauguuugacgcagcagugucaggaggacugaacacaucgguuuugagagcagugcugcccagggauaugguguucagaacaucaacaccuagagucguucuguaaggacuagucccuguucccagagcccacuuuuuuuucuuuuuuugaaauaaaauagccugucuuucagaucuaaaaaaaaaaaaaaaaaaaaaaaaaaaaaaaaaaaaaaaaaaaaaaaaaaaaaaaaaaaaaaaaugcaucccccccccccccccccccccccccccccccaaaggcucuuuucagagccaccagaauu

SEQ ID NO: 9838 - RNA, 1986 nt, Artificial Sequence
  mRNA product Design a-1 comprising derived and/or modified sequence from LASV(Mad39;Clade IV)__ANH09723__NP (wt)
gggagagucccgcagucggcguccagcggcucugcuuguucgugugugugucguugcaggccuuauucaagcuuaccaugagugccucaaaagagauaaagucuuuuuuguggacacagucucugaggagggaauugucggguuacugcuccaacaucaaacuacagguggugaaagaugcccaggcucuuuuacauggacuugacuuuucugaggucagcaacguccaacggcugaugcgcaaacagagaagggaugacaaugaucuaaagcggcugagggauuuaaaucaagcaguuaacaaucuuguugaacuaaaaucaacucagcaaaagaguguguugagaguuggaacucuaaccucagaugacuuguugacauuagcugcugaccuagagaagcugaaaucaaagguaaccaggacagaaagaccauugaccgcaggcguuuacaugggcaacuuaaguucacaacagcuugaccaaagacgggcucuccugaauaugauaggaaugaguggugguaaccaaggggcucgaacugggagagaugggguagugagggucugggauguuaaaaaugcagaauugcucaacaaucaguuuggaacuaugccaagcuugacacuagcaugccugacaaagcaagggcagguugaccuaaaugauguggugcaagcacuaacagaucuaggccugaucuauacagcaaaguaucccaacacuucagaccuggacagacuaacucagagccaucccauccuaaacaugauugauacuaauaaaagcucccuaaauaucucagguuauaauuuuagcuugggugcagcugugaaggcaggagcuugcaugcuggaugguggaaacaugcuagagacaaucaaagugucaccccaaacaauggauggcauccucaaguccauuuuaaagguaaaaaagagucuugggauguucauuucagacacccccggcgagagaaaucccuaugaaaauauacucuacaagauuugucugucgggggauggguggccauauauugcaucaaggaccucaauaacaggaagggccugggaaaauacuguuguugaucuagaaucaggugggaagccacagaaagcugguagcaacaacuccaacaagucccuacaaucggcaggauuugcugcugggcucacuuauucucaguuaaugacccucaaggaugcaauguugcaacuugauccaaaugcuaagaccuggauggauauugagggaaggccugaagacccaguggagauugcucucuaucagccaauuucggguugcuacauucacuucuuccgugaaccuacugaucugaaacaguucaagcaagaugcuaaguauucacauggaauugauguuacagaccuuuuugcugcacaaccaggauuaacuagugcugugauagaagcacucccccggaacauggucaucaccugucaaggaucugacgacauaaggaaacuuuuugagucacaaggaaggaaagacaucaagcugauugauauugcucucagcaaaacugauucuagaaaauaugaaaacgcagucugggaccaguacaaagauuuaugucauaugcacacagguguuguuguugagaagaaaaagaagggcggcaaagaagaaauaaccccucauugugcucuaauggacugcaucauguuugaugcagcaguaucaggagggcugaacacgcugguuuugagagcagugcuaccuagagauaugguguucagaacaucaacaccuaaagucguccuguaaggacuagucccuguucccagagcccacuuuuuuuucuuuuuuugaaauaaaauagccugucuuucagaucuaaaaaaaaaaaaaaaaaaaaaaaaaaaaaaaaaaaaaaaaaaaaaaaaaaaaaaaaaaaaaaaaugcaucccccccccccccccccccccccccccccccaaaggcucuuuucagagccaccagaauu

SEQ ID NO: 9839 - RNA, 1986 nt, Artificial Sequence
  mRNA product Design a-1 comprising derived and/or modified sequence from LASV(Z0947-SLE-2011;Clade IV)__AIT17841__NP (wt)
gggagagucccgcagucggcguccagcggcucugcuuguucgugugugugucguugcaggccuuauucaagcuuaccaugagugccucaaaggaaauaaaguccuuuuuguggacacaauccuugaggagggaauuaucugguuacugcuccaacaucaaacugcagguggugaaggaugcccaggcucuuuuacaugggcuugacuucucugaagucaguaauguucaacgguugaugcgcaaggagagaagggaugacaaugauuugaaacgguugagggaccuaaaucaagcagucaacaaucuuguugaauuaaaaucaacucaacaaaagaguauacugagaguugggacucuaaccucagaugacuuauuaaucuuggccgcugaucuagagaaguugaagucgaaggugaccagaacagaaagaccauugagugcaggugucuauaugggcaaccuaagcucacagcaacuugaccaaagaagagcucuucugaacaugauaggaaugagugguaguaaucaaggggcucggacugggagagauggaguggucagaguuugggaugugaaaaaugcagaguugcucaauaaucaguucggaaccaugccaagucugacacuggcaugucugacaaaacaggggcagguugacuugaaugaugcaguacaagcauugacagauuuagguuugaucuacacagcgaaguaccccaauacuucagacuuggacaggcugacucaaagucaccccauccuaaauaugauugacaccaagaaaagcucuuugaacaucucagguuauaauuuuagcuugggugcagcugugaaggcaggagcuuguaugcuggaugguggcaauauguuggagacaaucaaggugucaccucagacaauggaugguauucucaaauccauuuuaaaggucaagaaggcucuugggauguucauuucagaugccccuggugaaaggaauccuuaugaaaacauacucuacaagauuuguuugucaggagacggauggccauacauugcaucaagaaccucaauaacaggaagggccugggaaaacacuguuguugaucuggaaucagaugggaagccacagaaagcuggcaguaacgguuccaauaaaucucugcagucggcaggauuuaccgcugggcucaccuauucucagcugaugacccucaaggaugcaaugcugcaacuugacccaaaugcuaagaccuggauggacauugaaggaagaccugaagauccaguggaaaucgcccucuaucaaccaaguucagggugcuacauacacuucuuccgugaaccuacugauuuaaagcaguucaagcaggaugcuaaguacucacaugggauugaugucacggaccucuucgcugcacaaccgggcuugaccagugcugucauugaugcacucccccggaauauggucaucaccugccaggggucugaugacauaaggaaacucuuugaaucacaaggaagaaaagacauuaaacuaauugacauugcccucagcaagacugauuccaggaaguaugaaaaugcagucugggaucaguauaaagacuuaugccacaugcauacaggcauuguuguugagaagaagaaaagaggcggcaaagaggaaauaaccccucacugugcacuaauggacugcaucauguuugaugcagcaguaucaggaggacugaacacaucaguuuugagagcagugcugcccagagacaugguguucagaacaucgacaccuagggucguccuguaaggacuagucccuguucccagagcccacuuuuuuuucuuuuuuugaaauaaaauagccugucuuucagaucuaaaaaaaaaaaaaaaaaaaaaaaaaaaaaaaaaaaaaaaaaaaaaaaaaaaaaaaaaaaaaaaaugcaucccccccccccccccccccccccccccccccaaaggcucuuuucagagccaccagaauu

SEQ ID NO: 9840 - RNA, 1986 nt, Artificial Sequence
  mRNA product Design a-1 comprising derived and/or modified sequence from LASV(Josiah;Clade IV)__NP_694869__NP (opt1)
gggagagucccgcagucggcguccagcggcucugcuuguucgugugugugucguugcaggccuuauucaagcuuaccaugagcgccuccaaggagaucaagagcuuccuguggacccagucccuccgccgggagcugagcggcuacugcuccaacaucaagcuccagguggucaaggacgcccaggcgcugcugcacgggcuggacuucagcgagguguccaacgugcagcgccucaugcggaaggagcgccgggacgacaacgaccugaagcgccugcgggaccucaaccaggccgucaacaaccugguggagcucaagagcacccagcagaaguccauccugcgcgugggcacccugaccagcgacgaccugcucauccuggccgccgaccuggagaagcucaaguccaaggucauccggaccgagcgcccccugagcgccgggguguacaugggcaaccuguccagccagcagcucgaccagcggcgcgcgcugcugaacaugaucgggauguccggcggcaaccagggggcccgggccggccgcgacggggugguccgggugugggacgugaagaacgccgagcuccugaacaaccaguucggcaccaugccgagccugacgcucgcgugccugaccaagcaggggcaggucgaccugaacgacgccgugcaggcccucaccgaccugggccugaucuacaccgccaaguaccccaacacguccgaccucgaccgccugacccagagccaccccauccugaacaugaucgacaccaagaaguccagccucaacaucagcggcuacaacuucucccugggggccgcggugaaggccggcgccugcaugcuggacgggggcaacaugcucgagaccaucaaggucagcccccagacgauggacggcauccugaaguccauccugaaggugaagaaggcccucgggauguucaucagcgacaccccgggcgagcggaaccccuacgagaacauccuguacaagaucugccuguccggggacggcuggcccuacaucgccagccgcaccuccaucaccgggcgggcgugggagaacacgguggucgaccucgagagcgacggcaagccccagaaggccgacuccaacaacagcuccaagagccugcaguccgccggcuucaccgccgggcugaccuacagccagcucaugacccugaaggacgccaugcugcagcuggacccgaacgcgaagacguggauggacaucgagggccgccccgaggaccccguggagaucgcccucuaccagcccuccagcgggugcuacauccacuucuuccgggagccgaccgaccugaagcaguucaagcaggacgccaaguacucccacggcaucgacgugaccgaccuguucgccacccagcccgggcucacgagcgccgucaucgacgcgcugccccgcaacauggugaucacgugccagggcuccgacgacauccgcaagcugcucgagagccagggccggaaggacaucaagcugaucgacaucgcccugagcaagaccgacucccgcaaguacgagaacgccgugugggaccaguacaaggaccucugccacaugcacaccggggucguggucgagaagaagaagcggggcgggaaggaggagaucaccccgcacugcgcccugauggacugcaucauguucgacgcggccgugagcggcgggcugaacaccuccgugcuccgcgccguccugccccgggacaugguguuccgcaccagcacgccccgggugguccugugaggacuagucccuguucccagagcccacuuuuuuuucuuuuuuugaaauaaaauagccugucuuucagaucuaaaaaaaaaaaaaaaaaaaaaaaaaaaaaaaaaaaaaaaaaaaaaaaaaaaaaaaaaaaaaaaaugcaucccccccccccccccccccccccccccccccaaaggcucuuuucagagccaccagaauu

SEQ ID NO: 9841 - RNA, 1986 nt, Artificial Sequence
  mRNA product Design a-1 comprising derived and/or modified sequence from LASV(LP;Clade I)__AAF86702__NP (opt1)
gggagagucccgcagucggcguccagcggcucugcuuguucgugugugugucguugcaggccuuauucaagcuuaccaugagcaacuccaaggagaucaagagcuuccuguggacccagucccuccgccgggagcugagcggcuacugcuccaacaucaagcuccagguggucaaggacgcccaggcccugcugcacgggcuggacuucagcgagguguccaacgugcagcgccucaugcggaagcagaagcgcgacgacgcggaccugaagcggcugcgcgaccucaaccaggccgucaacaaccugguggagcucaagagcacccagcagaagaacgugcugcgggucggcacgcuguccagcgacgaccugaucacccucgccgccgaccuggagaagcugaaguccaaggugauccgcaccgagcggccccucagcuccgggguguacaugggcaaccugagcucccagcagcuggaccagcgccgggcccuccugagcaugaucgggauguccggcggcccgcaggggaaccgcaccggcggggacggcgucgugcgggugugggacgucaagaacgcggagcugcucaacaaccaguucgggacgaugcccagccugacccuggccugccucaccaagcagggccagguggaccugaacgacgccgugcaggcccugaccgaccucggccugaucuacacggcgaaguaccccaacuccagcgaccuggacaugcucacccagagccaccccauccuggggauggucgacaccaagaaguccagccugaacaucuccggcuacaacuucagccucggggccgccgugaaggccggcgccugcaugcuggacggcgggaacaugcuggagaccaucaagguguccccgcagacgauggacggcauccucaagagcauccugaaggucaagcgcucccuggggauguucaucagcgacacccccggcgagcggaaccccuacgagaacauccucuacaagaucugccuguccggggagggcuggcccuacaucgcgagccgcaccuccaucaccggccgggccugggagaacacgcugguggaccucgagagcgacaacaagccgcccaagcugaacuccgccgggagcaacaagucccugcaggccgccggccucaacgcggggcugaccuacagccagcugaugacccugaaggacugcaugcuccagcuggaccccuccagcaagaccuggaucgacaucgagggccgccccgaggacccgguggagaucgcccuguuccagcccuccagcgggugcuacauccacuucuuccgggagcccacggaccucaagcaguucaagcaggacgccaaguacagccacggcaucgacgucaccgaccuguucuccacccagcccggccugaccagcgccgugaucgaggcccucccgcgcaacauggugcugacgugccagggguccgacgacaucaagaagcugcucgagagccagggccggcgcgacaucaagcugaucgacaucucccugagcaaggcggacucccgcaaguucgagaacgccgucugggaccaguacaaggaccucugccacaugcacaccgggguggucguggagaagaagaagcggggcgggaaggaggagaucacgccccacugcgcccugcuggacugcaucauguucgacgccgccaccaccggcagccucaacaucaccacccugcgcgcggugcugccccgggacauggucuuccgcaccuccacgcccaagguggugcucugaggacuagucccuguucccagagcccacuuuuuuuucuuuuuuugaaauaaaauagccugucuuucagaucuaaaaaaaaaaaaaaaaaaaaaaaaaaaaaaaaaaaaaaaaaaaaaaaaaaaaaaaaaaaaaaaaugcaucccccccccccccccccccccccccccccccaaaggcucuuuucagagccaccagaauu

SEQ ID NO: 9842 - RNA, 1986 nt, Artificial Sequence
  mRNA product Design a-1 comprising derived and/or modified sequence from LASV(803213;Clade II)__AAF86704__NP (opt1)
gggagagucccgcagucggcguccagcggcucugcuuguucgugugugugucguugcaggccuuauucaagcuuaccaugagcgccuccaaggaggugaaguccuuccuguggacccagagccuccgccgggagcugagcggcuacugcuccaacaucaagcugcaggucgugaaggacgcccaggcgcuccugcacgggcuggacuucagcgaggugaacaacguccagcgccucaugcggaagcagaagcgcgacgacggcgaccugaagcggcugcgcgaccucaaccaggccgugaacaaccugguggagcugaaguccacccagcagaaguccauccuccgggucgggacgcugaccagcgacgaccugcucacccuggccgccgaccuggagaagcucaagagcaaggugauccgcaccgagcggccccuguccagcggcguguacauggggaaccuguccacgcagcagcucgagcagcgccgggcccugcugaacaugaucggcauggucggcggggcgcagggcacccagccggggcgcgacggcguggugcgggucugggacgugaagaaccccgaccuccugaacaaccaguucgggaccaugcccagccugacccucgccugccugacgaagcagggccagguggaccugaacgacgccguccucgcccugaccgaccugggccucaucuacaccgcgaaguaccccaacuccagcgaccuggaccgccugucccagagccacccgauccucaacaugguggacaccaagaaguccagccugaacaucagcggguacaacuucucccugggcgccgccgugaaggccggggccugcaugcucgacggcggcaacaugcuggagacgaucaaggucacgccccagaccauggacgggauccucaagagcauccugaaggugaagcggucccugggcauguucgugagcgacacccccggggagcgcaaccccuacgagaacauccuguacaagaucugccucuccggcgacggguggccguacaucgcgagccggaccuccaucgucggccgcgccugggagaacaccaccguggaccuggagagcgacggcaagccccagaagguggggaccgccggcuccaacaagagccugcaguccgccggguuccccacgggccucaccuacagccagcugaugacccugaaggacuccaugaugcagcuggaccccagcgccaagaccuggaucgacaucgaggggcggccggaggaccccgucgagaucgcgcucuaccagcccauguccggcugcuacauccacuucuuccgcgagcccacggaccugaagcaguucaagcaggacgccaaguacagccacggcaucgacguggccgaccuguucccggcccagcccgggcucaccuccgccgucaucgaggcgcugccccggaacauggugcugaccugccagggcagcgacgacaucaagaagcuccuggacucccaggggcgccgcgacaucaagcugaucgacaucagccucagcaagguggacucccggaaguucgagaacgccgucugggaccagugcaaggaccugugccacaugcacaccggcgugguggucgagaagaagaagcgcgggggcaaggaggagaucacgccccacugcgcccugauggacugcaucauguucgacgccgccgugagcggcgggcucaacaucccggugcugcgggcgguccugccccgcgacaugguguuccggaccuccagccccaaggugguccucugaggacuagucccuguucccagagcccacuuuuuuuucuuuuuuugaaauaaaauagccugucuuucagaucuaaaaaaaaaaaaaaaaaaaaaaaaaaaaaaaaaaaaaaaaaaaaaaaaaaaaaaaaaaaaaaaaugcaucccccccccccccccccccccccccccccccaaaggcucuuuucagagccaccagaauu

SEQ ID NO: 9843 - RNA, 1989 nt, Artificial Sequence
  mRNA product Design a-1 comprising derived and/or modified sequence from LASV(GA391;Clade III)__CAA36646__NP (opt1)
gggagagucccgcagucggcguccagcggcucugcuuguucgugugugugucguugcaggccuuauucaagcuuaccaugagcgccuccaaggaggugcgcagcuuccuguggacccagucccuccggcgcgagcugagcggcuacugcuccaacaucaagcugcaggucgugaaggacgcccaggcgcuccugcacgggcuggacuucagcgagguguccaacguccagcggcucaugcgcaagcagaagcgggacgacggcgaccugaagcgccugcgggaccucaaccaggccgugaacaaccugguggagcucaagagcacccagcagaaguccguccugcgcguggggacccugagcuccgacgaccugcucauccuggccgccgaccuggagaagcucaagagcaaggugacccggaccgagcgcccccuguccagcggcgucuacauggggaaccuguccagccagcagcucgaccagcggcgcgcccugcugaacaugaucggcaugaccggcguguccgggggcgggaagggcgcgagcgacgggaucgugcgggucugggacgugaagaacgccgagcuccugaacaaccaguucggcacgaugccgucccugacccucgccugccugaccaagcagggccagguggaccugaacgacgccguccaggcgcucaccgaccuggggcugaucuacacggccaaguaccccaacagcagcgaccucgaccgccugucccagagccaccccauccugaacaugaucgacaccaagaaguccagccucaacaucuccggcuacaacuucagccugggggccgccgugaaggccggcgcgugcaugcuggacggcgggaacaugcucgagaccaucaaggugagcccccagaccauggacggcauccucaaguccauccugaaggucaagaagucccuggggauguucgugagcgacacgccgggcgagcggaaccccuacgagaacauccuguacaagaucugccuguccggggacggcuggcccuacaucgccagccgcaccuccaucgugggccgggccugggagaacaccgucguggaccucgagcaggacaacaagccccagaagaucgggaacggcgggagcaacaagucccugcagagcgccggcuucgccgcggggcugaccuacucccagcucaugacgcugaaggacuucaagugcuucaaccugaucccgaacgccaagaccuggauggacaucgagggccgccccgaggaccccguggagaucgcccuguaccagcccagcuccggcugcuacguccacuucuuccgggagccgaccgaccucaagcaguucaagcaggacgccaaguacagccacgggaucgacgugaccgaccuguucgccgcgcagcccggccugacgagcgccgucaucgaggcccucccccgcaacauggugaucacgugccagggguccgaggacauccggaagcugcuggagagccagggccgccgcgacaucaagcucaucgacaucacccuguccaaggccgacagccggaaguucgagaacgccgugugggaccaguucaaggaccugugccacaugcacaccggggucgugguggagaagaagaagcgcggcggcaaggaggagaucacgccccacugcgcgcucauggacugcaucauguucgacgccgccgucuccgggggccuggacgccaaggugcugcgggugguccucccgcgcgacaugguguuccggaccagcacccccaaggugguccugugaggacuagucccuguucccagagcccacuuuuuuuucuuuuuuugaaauaaaauagccugucuuucagaucuaaaaaaaaaaaaaaaaaaaaaaaaaaaaaaaaaaaaaaaaaaaaaaaaaaaaaaaaaaaaaaaaugcaucccccccccccccccccccccccccccccccaaaggcucuuuucagagccaccagaauu

SEQ ID NO: 9844 - RNA, 1986 nt, Artificial Sequence
  mRNA product Design a-1 comprising derived and/or modified sequence from LASV(AV;Clade V)__CCA30315__NP (opt1)
gggagagucccgcagucggcguccagcggcucugcuuguucgugugugugucguugcaggccuuauucaagcuuaccaugagcgccuccaaggaggugaaguccuuccuguggacccagagccuccgccgggagcugagcggcuacugcuccaacaucaagcugcaggucgugaaggacgcccaggcgcuccugcacgggcuggacuucagcgagguguccaacguccagcgccucaugcggaagcagcgccgggacgacagcgaccugaagcgccugcgggaccucaaccaggccgugaacaaccugguggagcugaaguccacccagcagaaguccguccuccgcgugggcacgcugagcagcgacgaccugcucacccuggccgccgaccuggagaagcucaaguccaaggugacccggaccgagcgcccccugagcuccggggucuacaugggcaaccugagcucccagcagcucgaccagcggcgcgcccugcugaaccucaucgggaugacgaacggcagccagggcucccaggcggggcgggacggcguggugcgcgucugggacgugaagaacgccgagcugcugaacaaccaguucgggaccaugccgagccucacccuggccugccugaccaagcagggccagguggaccucaacgacgucgugcaggcccugacggaccuggggcucaucuacaccgcgaaguaccccaacaccagcgaccuggaccggcugacccagucccaccccauccucaacaugaucgacacgaagaaguccagccugaacaucagcggcuacaacuucucccugggcgccgccgugaaggccggggccugcaugcucgacggcgggaacaugcuggagaccaucaaggucagcccccaguccauggacggcauccucaagagcauccugaaggugaagcgcgcgcugggcauguucguguccgacaccccgggggagcggaaccccuacgagaacauccuguacaagaucugccucagcggcgacggguggcccuacaucgccucccgcaccagcaucgucggccgggccugggagaacacggugguggaccuggagaccgacgggaagccccagaagaucggcuccggcaacagcaacaagucccugcagagcgccggguucuccgccggccucaccuacagccagcugaugacccugaaggacgcgaugcugcagcucgacccgaacgccaagacguggauggacaucgaggggcgccccgaggaccccgucgagguggcccuguaccagcccaucuccggcugcuacauccacuucuuccgggagccgaccgaccugaagcaguucaagcaggacgccaaguacagccacgggaucgacaucgccgaccucuucgcggcccagcccggccugaccagcgccgucaucgaggcccugccccgcaacauggugaucacgugccagggcuccgaggacaucaagaagcuccuggagagccaggggcgcaaggacaucaagcugaucgacaucgcccucuccaagaucgacagccggaaguucgagaacgcggugugggaccaguacaaggaccugugccacaugcacaccggcgucgugguggagaagaagaagcgcgggggcaaggaggagaucaccccgcacugcgcccugauggacugcaucauguucgacgccgccgucuccgggggccucaacacccuggugcugcgggcggugcucccccgcgacauggucuuccggaccagcacgccccgcguggugcugugaggacuagucccuguucccagagcccacuuuuuuuucuuuuuuugaaauaaaauagccugucuuucagaucuaaaaaaaaaaaaaaaaaaaaaaaaaaaaaaaaaaaaaaaaaaaaaaaaaaaaaaaaaaaaaaaaugcaucccccccccccccccccccccccccccccccaaaggcucuuuucagagccaccagaauu

SEQ ID NO: 9845 - RNA, 1986 nt, Artificial Sequence
  mRNA product Design a-1 comprising derived and/or modified sequence from LASV(Togo/2016/7082;Clade VI)__AMR44578__NP (opt1)
gggagagucccgcagucggcguccagcggcucugcuuguucgugugugugucguugcaggccuuauucaagcuuaccaugagcaacuccaaggaggugaaguccuuccuguggacccagagccuccgccgggagcugagcggcuacugcuccaacaucaagcugcaggucgugaaggacgcccaggcccuccugcacgggcuggacuucagcgagguguccaacguccagcgccucaugcggaagcagaagcgcgacgacggcgaccugaagcggcugcgcgaccucaaccaggcggugaacaaccugguggagcucaagagcguccagcagaaguccauccugcggguggggacccugaccagcgacgaccugcucacccuggccgccgaccuggagaagcucaaguccaaggugacccgcaccgagcggccccugagcuccggcgucuacauggggaaccugagcucccagcagcucgaccagcgccgggcccugcugagcaugaucggcauguccggcgggaaccagaacagccagccgaagggcgacgggguggugcgcgucugggacgugaagaacgccgaccuccugaacaaccaguucggcacgaugcccucccugacccucgcgugccugaccaagcagggccagguggaccugaacgacgccguccaggcccucaccgaccuggggcugaucuacacggccaaguaccccaacagcagcgaccucgaccggcugucccagagccaccccauccugaacaugaucgacaccaagaaguccagccucaacaucuccggcuacaacuucagccugggggcggccaucaagaccggcgccugcaugcuggacgggggcaacaugcucgagaccaucaaggugacgccgcagaccauggacggcauccugaaguccauccugaaggugaagcgcagccucgggauguucaucuccgacacccccggcgagcggaaccccuacgagaacauccuguacaagaucugccugagcggggacggcuggcccuacaucgccucccgcaccgccaucaucgggcgggcgugggagaacacggucguggaccucgagagcgacuccaagccgcagaagaucggcagcaacggcuccaacaagagccugcaguccgccggguucgcccccggccugaccuacagccagcucaugacccugaaggacuccaugcugcagcuggaccccaacgccaagaccuggaucgacaucgaggggcgccccgaggacccgguggaggucgcccucuuccagcccaucagcggcugcuacauccacuucuuccgggagcccacggaccugaagcaguucaagcaggacgcgaaguacagccacgggaucgacgugaccgaccuguucgccgcccagcccggccucaccuccgccgugaucgaggcccugccgcgcaacaugguccugaccugccagggcagcgacgacaucaagaagcuccuggacucccaggggcggcgcgacaucaagcugaucgacgugagccucaacaagaucgacucccgcaaguucgagaacgcggucugggaccaguacaaggaccugugccacaugcacacgggcgugguggucgagaagaagaagaagggcgggaaggaggagaucacgccccacugcgcccugcucgacugcaucauguucgacgccgccgugagcgggggccugaacgccaccgugcugcgggcgguccucccccgcgacaugguguuccggaccuccagccccaaggugguccugugaggacuagucccuguucccagagcccacuuuuuuuucuuuuuuugaaauaaaauagccugucuuucagaucuaaaaaaaaaaaaaaaaaaaaaaaaaaaaaaaaaaaaaaaaaaaaaaaaaaaaaaaaaaaaaaaaugcaucccccccccccccccccccccccccccccccaaaggcucuuuucagagccaccagaauu

SEQ ID NO: 9846 - RNA, 1986 nt, Artificial Sequence
  mRNA product Design a-1 comprising derived and/or modified sequence from LASV(KAK-428;Clade n.d. (VII))__ANH09741__NP (opt1)
gggagagucccgcagucggcguccagcggcucugcuuguucgugugugugucguugcaggccuuauucaagcuuaccaugagcaacuccaaggaggugaaguccuuccuguggacccagagccuccgccgggagcugagcggcuacugcaccaacaucaagcugcaggucgugaaggacgcccaggcccuccugcacgggcuggacuucuccgaggugagcaacguccagcgccucaugcggaagcagaagcgcgacgacaacgaccugaagcggcugcgcgaccucaaccaggcggugaacaaccugguggagcugaaguccguccagcagaaguccgugcucaaggugggcacgcugaacagcgacgaccugcucacccuggccgccgaccuggagaagcucaagagcaaggucgugcggaccgagcgcccccuguccagcgggguguacaugggcaaccuguccagccagcagcucgaccagcggcgcgcccugcugaacaugaucgggauggccggcggcucccaggggaaccagccgagccgggacggcgucgugcgcgugugggacgucaagaacgcggaccuccugaacaaccaguucgggaccaugcccucccugacgcucgccugccugaccaagcagggccagguggaccugaacgacgugguccucgcccugaccgaccuggggcucaucuacaccgccaaguaccccaacagcuccgaccuggaccggcugagccagaaccaccccgugcucaacaugaucgacgugaacaagagcucccugaacaucagcggcuacaacuucucccugggcgcggccgucaaggccggggccugcaugcucgacggcgggaacaugcuggagacgaucaagaucagcccgcagaccguggacggcauccugaaguccauccucaaggugaagcgcgcccugggcauguucgucagcgacacccccggggagcggaaccccuacgagaacauccuguacaaggugugccucuccggcaacggguggcccuacaucgcgagccgcaccuccaucgucggccgggccugggagaacacggugguggaccuggagagcaacaagaaccagccgaaggucgggaacaacggcuccaacaagaugcugcagagcuccggcuucgccaccgggcucaccuacagccagcugaugacccugcgcgacuccaugcugcagcucgaccccacggccaagaccuggaucgacaucgagggccggcccgaggaccccguggagcuggcccuguuccagccgagcuccgggugcuacauccacuucuuccgcgagcccaccgaccucaagcaguucaagcaggacgcgaaguacagccacggcaucgacgugaacgaccuguucuccgcccagcccgggcugaccagcgccguccucgaggcccugccccggaacauggugcugacgugccagggcagcgacgacauccgcaagcuccuggacucccaggaccgcaaggacaucaagcugaucgacaucagccucuccaaggccgacgcgcggaaguucgagaacgacgugugggaccaguucaaggaccugugccacaugcacaccggcaucgucguggagaagaagaagaagggcgggaagcaggagaugaccccgcacugcgcccugcucgacugcaucauguucgacgccgccgugagcgggggccugaacguccccacccugcgcgccgugcuccccacggacaugguguuccggaccaucaccaccaaggucgugcugugaggacuagucccuguucccagagcccacuuuuuuuucuuuuuuugaaauaaaauagccugucuuucagaucuaaaaaaaaaaaaaaaaaaaaaaaaaaaaaaaaaaaaaaaaaaaaaaaaaaaaaaaaaaaaaaaaugcaucccccccccccccccccccccccccccccccaaaggcucuuuucagagccaccagaauu

SEQ ID NO: 9847 - RNA, 1986 nt, Artificial Sequence; identical to SEQ ID NO: 9841
  mRNA product Design a-1 comprising derived and/or modified sequence from LASV(Pinneo-NIG-1969;Clade I)__AIT17837__NP (opt1)

SEQ ID NO: 9848 - RNA, 1986 nt, Artificial Sequence
  mRNA product Design a-1 comprising derived and/or modified sequence from LASV(ISTH0009-NIG-2011;Clade II)__AIT17405__NP (opt1)
gggagagucccgcagucggcguccagcggcucugcuuguucgugugugugucguugcaggccuuauucaagcuuaccaugagcguguccaaggaggucaagagcuuccuguggacccagucccuccgccgggagcugagcggcuacugcuccaacaucaagcuccagguggugaaggacgcccaggcccugcugcacgggcuggacuucagcgaggucuccaacgugcagcgccucaugcggaagcagaagcgcgacgacagcgaccugaagcggcugcgcgaccucaaccaggcggugaacaaccuggucgagcugaaguccacccagcagaaguccauccuccgggugggcacccugaccagcgacgaccugcucacccuggccgccgaccuggagaagcucaagagcaaggugauccgcaccgagcggccccuguccagcggggucuacaugggcaaccuguccacgcagcagcucgagcagcgccgggcccugcugaacaugaucgggauggugggcggcgcccaggggacccagccgggccgcgacggggugguccgggugugggacgugaagaaccccgaccuccugaacaaccaguucggcaccaugcccagccugacccucgcgugccugacgaagcaggggcaggucgaccugaacgacgccgugcucgcccugaccgaccugggccucaucuacaccgccaaguaccccaacuccagcgaccuggaccgccugucccagagccacccgauccucaacaugguggacaucaagaaguccagccugaacaucagcggcuacaacuucucccugggggcggccgucaaggccggcgccugcaugcucgacgggggcaacaugcuggagaccaucaaggugacgccccagaccauggacggcauccucaagagcauccugaaggugaagcggucccuggggauguucgucagcgacacccccggcgagcgcaaccccuacgagaacauccuguacaagaucugccucuccggggacggcuggccguacaucgccagccggaccuccaucguggggcgcgcgugggagaacacgaccguggaccuggagagcgacggcaagccccagaaggucggcuccgccgggagcaacaagucccugcagagcgccggcuuccccaccgggcucaccuacucccagcugaugacgcugaaggacagcaugaugcagcuggaccccuccgccaagaccuggaucgacaucgagggccggccggaggaccccguggagaucgcccucuaccagcccaugagcgggugcuacauccacuucuuccgcgagcccaccgaccugaagcaguucaagcaggacgcgaaguacucccacggcaucgacgucgccgaccuguucccggcccagcccggccucaccagcgccgugaucgaggcccugccccggaacauggugcugacgugccaggggagcgacgacaucaagcgccuccuggacucccagggccgccgggacaucaagcugaucgacaucgcgcucagcaaggccgacucccgccgguucgagaacgccgucugggaccagugcaaggaccugugccacaugcacaccggggugguggucgagaagaagaagcgcggcgggaaggaggagaucacgccccacugcgcccugauggacugcaucauguacgacgccgcggugagcggcggccucaacaucccggugcugcgggccguccugccccgcgacaugguguuccggaccuccagccccaaggugguccucugaggacuagucccuguucccagagcccacuuuuuuuucuuuuuuugaaauaaaauagccugucuuucagaucuaaaaaaaaaaaaaaaaaaaaaaaaaaaaaaaaaaaaaaaaaaaaaaaaaaaaaaaaaaaaaaaaugcaucccccccccccccccccccccccccccccccaaaggcucuuuucagagccaccagaauu

SEQ ID NO: 9849 - RNA, 1986 nt, Artificial Sequence
  mRNA product Design a-1 comprising derived and/or modified sequence from LASV(ISTH2010-NIG-2012;Clade II)__AIT17483__NP (opt1)
gggagagucccgcagucggcguccagcggcucugcuuguucgugugugugucguugcaggccuuauucaagcuuaccaugagcgccuccaaggaggugaaguccuuccuguggacccagagccuccgccgggagcugagcggcuacugcuccaacaucaagcugcaggucgugaaggacgcccaggcgcuccugcacgggcuggacuucagcgagguguccaacguccagcgccucaugcggaagcagaagcgcgacgacagcgaccugaagcggcugcgcgaccucaaccaggccgugaacaaccugguggagcugaaguccacccagcagaaguccauccuccgggucggcacgcugaccagcgacgaccugcucacccuggccgccgaccuggagaagcucaagagcaaggugauccgcaccgagcggccccuguccagcgggguguacaugggcaaccuguccacgcagcagcucgagcagcgccgggcccugcugaaccucaucgggauggucggcggcgcgcaggggacccagccgggccgcgacgggguggugcgggucugggacgugaagaaccccgaccugcugaacaaccaguucggcaccaugcccagccucacccuggccugccugacgaagcagggccagguggaccucaacgacgccguccuggcccugaccgaccucgggcugaucuacaccgcgaaguaccccaacuccagcgaccuggaccgccucucccagagccacccgauccugaacaugguggacaccaagaaguccagccugaacaucagcggcuucaacuucucccucggggccgccgugaaggccggcgccugcaugcuggacgggggcaacaugcuggagacgaucaaggucacgccccagaccauggacggcauccucaagagcauccugaaggugaagaagucccuggggauguucgugagcgacacccccggcgagcggaaccccuacgagaacauccucuacaagaucugccuguccggggacggcuggccguacaucgcgagccgcaccuccaucgucgggcgggccugggagaacaccaccguggaccuggagagcgacggcaagccccacaaggugggcaccgccggguccaacaagagccuccaguccgccggcuuccccacggggcugaccuacagccagcugaugacccugaaggacuccaugaugcagcucgaccccagcgccaagaccuggaucgacaucgagggccgcccggaggaccccgucgagaucgcgcuguaccagcccauguccgggugcuacauccacuucuuccgggagcccacggaccugaagcaguucaagcaggacgccaaguacagccacggcaucgacguggccgaccucuucccggcccagcccggccugaccuccgccgucaucgaggcgcugccccgcaacauggugcugaccugccaggggagcgacgacaucaagcggcuccuggacagccagggccgccgcgacaucaagcucaucgacaucgcccuguccaaggccgacagccggcgcuucgagaacgccgugugggaccagugcaaggaccugugccacaugcacaccggggucgugguggagaagaagaagcggggcgggaaggaggagaucacgccccacugcgcccucauggacugcaucauguacgacgcggccgucuccggcggccugaacaucccggugcugcgcgccgugcucccccgggacauggucuuccgcaccagcucccccaagguggugcugugaggacuagucccuguucccagagcccacuuuuuuuucuuuuuuugaaauaaaauagccugucuuucagaucuaaaaaaaaaaaaaaaaaaaaaaaaaaaaaaaaaaaaaaaaaaaaaaaaaaaaaaaaaaaaaaaaugcaucccccccccccccccccccccccccccccccaaaggcucuuuucagagccaccagaauu

SEQ ID NO: 9850 - RNA, 1986 nt, Artificial Sequence
  mRNA product Design a-1 comprising derived and/or modified sequence from LASV(Lassa virus/H.sapiens-wt/NGA/2015/ISTH_0543;Clade II)__AVO03640__NP (opt1)
gggagagucccgcagucggcguccagcggcucugcuuguucgugugugugucguugcaggccuuauucaagcuuaccaugagcgccuccaaggaggugaaguccuuccuguggacccagagccuccgccgggagcugagcggcuacugcuccaacaucaagcugcaggucgugaaggacgcccaggcgcuccugcacgggcuggacuucagcgagguguccaacguccagcgccucaugcggaagcagaagcgcgacgacagcgaccugaagcggcugcgcgaccucaaccaggccgugaacaaccugguggagcugaaguccacccagcagaaguccauccuccgggucggcacgcugaccagcgacgaccugcucacccuggccgccgaccuggagaagcucaagagcaaggugauccgcaccgagcggccccuguccagcgggguguacaugggcaaccuguccacgcagcagcucgagcagcgccgggcccugcugaacaugaucgggauggucggcggcgcgcaggggacccagccgggccgcgacgggguggugcgggucugggacgugaagaaccccgaccuccugaacaaccaguucggcaccaugcccagccugacccucgccugccugacgaagcagggccagguggaccugaacgacgccguccucgcccugaccgaccuggggcucaucuacaccgcgaaguaccccaacuccagcgaccuggaccgccugucccagagccacccgauccucaacaugguggacaccaagaaguccagccugaacaucagcggcuacaacuucucccugggggccgccgugaaggccggcgccugcaugcucgacgggggcaacaugcuggagacgaucaaggucacgccccagaccauggacggcauccucaagagcauccugaaggugaagaagucccuggggauguucgugagcgacacccccggcgagcggaaccccuacgagaacauccuguacaagaucugccucuccggggacggcuggccguacaucgcgagccgcaccuccaucgucgggcgggccugggagaacaccaccguggaccuggagagcgacggcaagccccagaaggugggcuccgccgggagcaacaagucccugcagagcgccggcuuccccaccgggcucacguacucccagcugaugacccugaaggacagcaugaugcagcuggaccccuccgccaagaccuggaucgacaucgagggccgcccggaggaccccgucgagaucgcgcucuaccagcccaugagcgggugcuacauccacuucuuccgggagcccaccgaccugaagcaguucaagcaggacgccaaguacucccacggcaucgacguggccgaccuguucccggcccagcccggccucacgagcgccgucaucgaggcgcugccccgcaacauggugcugaccugccaggggagcgacgacaucaagcggcuccuggacucccagggccgcaaggacaucaagcugaucgacaucgcccucagcaaggccgacucccgccgguucgagaacgccgugugggaccagugcaaggaccugugccacaugcacaccggggucgugguggagaagaagaagcgcggcgggaaggaggagaucacgccccacugcgcccugauggacugcaucauguacgacgcggccgucagcggcggccucaacaucccggugcugcgggccgugcugccccgcgacauggucuuccggaccuccagccccaagguggugcucugaggacuagucccuguucccagagcccacuuuuuuuucuuuuuuugaaauaaaauagccugucuuucagaucuaaaaaaaaaaaaaaaaaaaaaaaaaaaaaaaaaaaaaaaaaaaaaaaaaaaaaaaaaaaaaaaaugcaucccccccccccccccccccccccccccccccaaaggcucuuuucagagccaccagaauu

SEQ ID NO: 9851 - RNA, 1986 nt, Artificial Sequence
  mRNA product Design a-1 comprising derived and/or modified sequence from LASV(Lassa virus/H.sapiens-wt/NGA/2016/ISTH_0009;Clade II)__AVO03572__NP (opt1)
gggagagucccgcagucggcguccagcggcucugcuuguucgugugugugucguugcaggccuuauucaagcuuaccaugagcgccuccaaggaggugaaguccuuccuguggacccagagccuccgccgggagcugagcggcuacugcuccaacaucaagcugcaggucgugaaggacgcccaggcgcuccugcacgggcuggacuucagcgagguguccaacguccagcgccucaugcggaagcagaagcgcgacgacagcgaccugaagcggcugcgcgaccucaaccaggccgugaacaaccugguggagcugaaguccacccagcagaaguccauccuccgggucggcacgcugaccagcgacgaccugcucacccuggccgccgaccuggagaagcucaagagcaaggugauccgcaccgagcggccccuguccagcgggguguacaugggcaaccuguccacgcagcagcucgagcagcgccgggcccugcugaacaugaucgggauggucggcggcgcgcaggggacccagccgggccgcgacgggguggugcgggucugggacgugaagaaccccgaccuccugaacaaccaguucggcaccaugcccagccugacccucgccugccugacgaagcagggccagguggaccugaacgacgccguccucgcccugaccgaccuggggcucaucuacaccgcgaaguaccccaacuccagcgaccuggaccgccugucccagagccacccgauccucaacaugguggacaccaagaaguccagccugaacaucagcggcuacaacuucucccugggggccgccgugaaggccggcgccugcaugcucgacgggggcaacaugcuggagacgaucaaggucacgccccagaccauggacggcauccucaagagcauccugaaggugaagaagucccuggggauguucgugagcgacacccccggcgagcggaaccccuacgagaacauccuguacaagaucugccucuccggggacggcuggccguacaucgcgagccgcaccuccaucgucgggcgggccugggagaacaccaccguggaccuggagagcgacggcaagccccagaaggugggcuccgccgggagcaacaagucccugcagagcgccggcuuccccaccgggcucacguacucccagcugaugacccugaaggacagcaugaugcagcuggaccccuccgccaagaccuggaucgacaucgagggccgcccggaggaccccgucgagaucgcgcucuaccagcccaugagcgggugcuacauccacuucuuccgggagcccaccgaccugaagcaguucaagcaggacgccaaguacucccacggcaucgacguggccgaccuguucccggcccagcccggccucacgagcgccgucaucgaggcgcugccccgcaacauggugcugaccugccaggggagcgacgacaucaagcggcuccuggacucccagggccgccgcgacaucaagcugaucgacaucgcccucagcaaggccgacucccggcgcuucgagaacgccgugugggaccagugcaaggaccugugccacaugcacaccggggucgugguggagaagaagaagcggggcgggaaggaggagaucacgccccacugcgcccugauggacugcaucauguacgacgcggccgucagcggcggccucaacaucccggugcugcgcgccgugcugccccgggacauggucuuccgcaccuccagccccaagguggugcucugaggacuagucccuguucccagagcccacuuuuuuuucuuuuuuugaaauaaaauagccugucuuucagaucuaaaaaaaaaaaaaaaaaaaaaaaaaaaaaaaaaaaaaaaaaaaaaaaaaaaaaaaaaaaaaaaaugcaucccccccccccccccccccccccccccccccaaaggcucuuuucagagccaccagaauu

SEQ ID NO: 9852 - RNA, 1986 nt, Artificial Sequence
  mRNA product Design a-1 comprising derived and/or modified sequence from LASV(Lassa virus/H.sapiens-wt/NGA/2016/ISTH_0017;Clade II)__AVO03568__NP (opt1)
gggagagucccgcagucggcguccagcggcucugcuuguucgugugugugucguugcaggccuuauucaagcuuaccaugagcgccuccaaggaggugaaguccuuccuguggacccagagccuccgccgggagcugagcggcuacugcuccagcaucaagcugcaggucgugaaggacgcccaggcgcuccugcacgggcuggacuucuccgaggugagcaacguccagcgccucaugcggaagcagaagcgcgacgacuccgaccugaagcggcugcgcgaccucaaccaggccgugaacaaccugguggagcucaagagcacccagcagaaguccauccugcgggucggcacgcugaccagcgacgaccugcucacccuggccgccgaccuggagaagcucaaguccaaggugauccgcaccgagcggccccugagcuccgggguguacaugggcaaccugagcacgcagcagcucgagcagcgccgggcccugcugaacaugaucgggauggcgggcggcgcccaggggacccagccgggccgcgacggggucgugcgggugugggacgucaagaaccccgaccuccugaacaaccaguucggcaccaugcccucccugacccucgccugccugacgaagcagggccagguggaccugaacgacgccgugcucgcgcugaccgaccuggggcucaucuacaccgccaaguaccccaacagcuccgaccuggaccgccugagccagagccacccgauccucaacauggucgacaccaagaaguccagccugaacaucuccggcuacaacuucagccugggggccgccgugaaggccggcgcgugcaugcucgacgggggcaacaugcuggagacgaucaaggugacgccccagaccauggacggcauccugaaguccauccucaaggucaagcggagccuggggauguucguguccgacgcccccggcgagcgcaaccccuacgagaacauccuguacaagaucugccucagcggggacggcuggccguacaucgccucccggaccagcaucguggggcgcgccugggagaacaccaccgucgaccuggaguccgacggcaagccccagaaggugggcgccaccgggagcaacaagucccugcagagcgcgggcuuccccaccgggcucacguacucccagcugaugacccugaaggacagcaugaugcagcuggaccccuccgccaagaccuggaucgacaucgagggccggccggaggaccccguggaggucgcccucuaccagcccgugagcgggugcuacauccacuucuuccgcgagcccaccgaccugaagcaguucaagcaggacgccaaguacucccacggcaucgacgucgccgaccuguucccggcgcagcccggccucacgagcgccgugaucgaggcccugccccggaacauggugcugaccugccaggggagcgacgacaucaagaagcuccuggacucccagggccgcaaggacaucaagcugaucgacaucgcccucagcaaggccgacucccgccgguucgagaacgcggucugggaccagugcaaggaccugugccacaugcacaccggggugguggucgagaagaagaagcgcggcgggaaggaggagaucacgccccacugcgcccugauggacugcaucauguacgacgccgccgugagcggcggccucaacaucccggugcugcgggcgguccugccccgcgacaugguguuccggaccuccagccccaaggugguccucugaggacuagucccuguucccagagcccacuuuuuuuucuuuuuuugaaauaaaauagccugucuuucagaucuaaaaaaaaaaaaaaaaaaaaaaaaaaaaaaaaaaaaaaaaaaaaaaaaaaaaaaaaaaaaaaaaugcaucccccccccccccccccccccccccccccccaaaggcucuuuucagagccaccagaauu

SEQ ID NO: 9853 - RNA, 1986 nt, Artificial Sequence
  mRNA product Design a-1 comprising derived and/or modified sequence from LASV(Lassa virus/H.sapiens-wt/NGA/2018/ISTH_0959;Clade II)__AVV65100__NP (opt1)
gggagagucccgcagucggcguccagcggcucugcuuguucgugugugugucguugcaggccuuauucaagcuuaccaugagcgccuccaaggaggugaaguccuuccuguggacccagagccuccgccgggagcugagcggcuacugcuccaacaucaagcugcaggucgugaaggacgcccaggcgcuccugcacgggcuggacuucagcgagguguccaacguccagcgccucaugcggaagcagaagcgcgacgacagcgaccugaagcggcugcgcgaccucaaccaggccgugaacaaccugguggagcugaaguccacccagcagaaguccauccuccgggucggcacccugaccagcgacgaccugcucacccuggccgccgaccuggagaagcucaagagcaaggugauccgcaccgagcggccccuguccagcgggguguacaugggcaaccuguccacgcagcagcucgagcagcgccgggcccugcugaaccucaucgggauggucggcggcgcgcaggggacccagccgggccgcgacgggguggugcgggucugggacgugaagaaccccgaccugcugaacaaccaguucggcaccaugcccagccucacccuggccugccugacgaagcagggccagguggaccucaacgacgucgugcuggcccugaccgaccucgggcugaucuacaccgccaaguaccccaacuccagcgaccuggaccgccucucccagagccacccgauccugaacaugguggacaccaagaaguccagccugaacaucagcggcuucaacuucucccucggggcggccgucaaggccggcgccugcaugcuggacgggggcaacaugcuggagacgaucaaggugacgccccagaccauggacggcauccucaagagcauccugaaggugaagaagucccuggggauguucgucagcgacacccccggcgagcggaaccccuacgagaacauccucuacaagaucugccuguccggggacggcuggccguacaucgccagccgcaccuccaucguggggcgggcgugggagaacaccaccguggaccuggagagcgacggcaagccccacaaggucggcaccgccggguccaacaagagccuccaguccgccggcuuccccacggggcugaccuacagccagcugaugacccugaaggacuccaugaugcagcucgaccccagcgccaagaccuggaucgacaucgagggccgcccggaggaccccguggagaucgcccuguaccagcccauguccgggugcuacauccacuucuuccgggagcccacggaccugaagcaguucaagcaggacgcgaaguacagccacggcaucgacgucgccgaccucuucccggcccagcccggccugaccuccgccgugaucgaggcccugccccgcaacauggugcugaccugccaggggagcgacgacaucaagcggcuccuggacagccagggccgcaaggacaucaagcucaucgacaucgcgcuguccaagaccgacagccgccgguucgagaacgccgucugggaccagugcaaggaccugugccacaugcacacgggggugguggucgagaagaagaagcgcggcgggaaggaggagaucacgccccacugcgcccucauggacugcaucauguacgacgccgccguguccggcggccugaacaucccggugcugcgggcgguccucccccgcgacaugguguuccggaccagcucccccaaggugguccugugaggacuagucccuguucccagagcccacuuuuuuuucuuuuuuugaaauaaaauagccugucuuucagaucuaaaaaaaaaaaaaaaaaaaaaaaaaaaaaaaaaaaaaaaaaaaaaaaaaaaaaaaaaaaaaaaaugcaucccccccccccccccccccccccccccccccaaaggcucuuuucagagccaccagaauu

SEQ ID NO: 9854 - RNA, 1986 nt, Artificial Sequence
  mRNA product Design a-1 comprising derived and/or modified sequence from LASV(LASV003-NIG-2008;Clade II)__AIT17581__NP (opt1)
gggagagucccgcagucggcguccagcggcucugcuuguucgugugugugucguugcaggccuuauucaagcuuaccaugagcgccuccaaggaggugaaguccuuccuguggacccagagccuccgccgggagcugagcggcuacugcuccagcaucaagcugcaggucgugaaggacgcccaggcgcuccugcacgggcuggacuucuccgaggugagcaacguccagcgccucaugcggaagcagaagcgcgacgacuccgaccugaagcggcugcgcgaccucaaccaggccgugaacaaccugguggagcucaagagcacccagcagaaguccguccugcgggugggcacccugaccagcgacgaccugcucacccuggccgccgaccuggagaagcucaaguccaaggugauccgcaccgagcggccccugagcuccggggucuacaugggcaaccugagcgcccagcagcucgagcagcgccggacgcugcugaacaugaucgggauggugggcggcgcgcaggggacccagccgggccgcgacggggugguccgggugugggacgugaagaaccccgaccuccugaacaaccaguucggcaccaugcccucccugacccucgccugccugacgaagcaggggcaggucgaccugaacgacguggugcucgcccugaccgaccugggccucaucuacaccgccaaguaccccaacagcuccgaccuggaccgccugagccagagccacccgauccucuccauggucgacaccaagaaguccagccugaacaucagcggcuacaacuucucccugggggcggccgugaaggccggcgccugcaugcucgacgggggcaacaugcuggagacgaucaaggugacgccccagaccauggacggcauccucaagagcauccugaaggucaagaagucccuggggauguucgugagcgacacccccggcgagcggaaccccuacgagaacauccuguacaagaucugccucuccggggacggcuggccguacaucgccagccgcaccuccaucguggggcgggcgugggagaacaccaccgucgaccuggagagcgacggcaagccccagaaggugggcaccgccggguccaacaagagccugcaguccgccggcuuccccacggggcucaccuacagccagcugaugacccugaaggacuccaugaugcagcuggaccccagcgccaagaccuggaucgacaucgagggccgcccggaggaccccgucgagaucgcccucuaccagcccauguccgggugcuacauccacuucuuccgggagcccacggaccugaagcaguucaagcaggacgcgaaguacagccacggcaucgacgugaccgaccuguucccggcccagcccggccucaccagcgccgugaucgaggcccugccccgcaacaugguccugaccugccagggguccgacgacaucaagcggcuccuggacagccagggccgccgcgacaucaagcugaucgacaucgcccucuccaaggcggacagccggcgcuucgagaacgccgugugggaccagugcaaggaccugugccacaugcacacggggguggucguggagaagaagaagcggggcgggaaggaggagaucacgccccacugcgcccugauggacugcaucauguacgacgccgccguguccggcggccucaacaucccgguccugcgcgcggugcugccccgggacaugguguuccgcaccagcucccccaaggucgugcucugaggacuagucccuguucccagagcccacuuuuuuuucuuuuuuugaaauaaaauagccugucuuucagaucuaaaaaaaaaaaaaaaaaaaaaaaaaaaaaaaaaaaaaaaaaaaaaaaaaaaaaaaaaaaaaaaaugcaucccccccccccccccccccccccccccccccaaaggcucuuuucagagccaccagaauu

SEQ ID NO: 9855 - RNA, 1986 nt, Artificial Sequence
  mRNA product Design a-1 comprising derived and/or modified sequence from LASV(LASV035-NIG-2009;Clade II)__AIT17589__NP (opt1)
gggagagucccgcagucggcguccagcggcucugcuuguucgugugugugucguugcaggccuuauucaagcuuaccaugagcgccuccaaggaggugaaguccuuccuguggacccagagccuccgccgggagcugagcggcuacugcuccagcaucaagcugcaggucgugaaggacgcccaggcgcuccugcacgggcuggacuucuccgaggugagcaacguccagcgccucaugcggaagcagaagcgcgacgacuccgaccugaagcggcugcgcgaccucaaccaggccgugaacaaccugguggagcucaagagcacccagcagaaguccauccugcgggucggcacgcugaccagcgacgaccugcucacccuggccgccgaccuggagaagcucaaguccaaggugauccgcaccgagcggccccugagcuccgggguguacaugggcaaccugagcgcccagcagcucgagcagcgccgggcgcugcugaacaugaucgggauggucggcggcgcccaggggacgcagccgggccgcgacgggguggugcgggucugggacgugaagaaccccgaccuccugaacaaccaguucggcaccaugcccucccugacccucgccugccugaccaagcagggccagguggaccugaacgacgccguccucgcgcugacggaccuggggcucaucuacaccgccaaguaccccaacagcuccgaccuggaccgccugagccagagccacccgauccucaacaugguggacaccaagaaguccagccugaacaucuccggcuacaacuucagccugggggccgccgugaaggccggcgcgugcaugcucgacgggggcaacaugcuggagaccaucaaggucacgccccagaccauggacggcauccugaaguccauccucaaggugaagcggagccuggggauguucguguccgacacccccggcgagcgcaaccccuacgagaacauccuguacaagaucugccucagcggggacggcuggccguacaucgccucccggaccagcaucgucgggcgcgccugggagaacacgaccguggaccuggaguccgacggcaagccccagaaggugggcaccaccgggagcaacaagucccugcagagcgccggcuuccccacggggcucaccuacucccagcugaugacccugaaggacagcaugaugcagcuggaccccuccgccaagaccuggaucgacaucgagggccggccggaggaccccgucgagaucgcgcucuaccagcccaugagcgggugcuacauccacuucuuccgcgagcccacggaccugaagcaguucaagcaggacgccaaguacucccacggcaucgacguggccgaccuguucccggcccagcccggccucaccagcgccgucaucgaggcgcugccccggaacauggugcugaccugccaggggagcgacgacaucaagaagcuccuggacucccagggccgccgcgacaucaagcugaucgacaucgcccucagcaaggccgacucccggaaguucgagaacgccgugugggaccagugcaaggaccugugccacaugcacaccggggucgugguggagaagaagaagcgcggcgggaaggaggagaucacgccccacugcgcccugauggacugcaucauguacgacgcggccgucagcggcggccucaacaucccggugcugcgggccgugcugccccgcgacauggucuuccggaccuccagccccaagguggugcucugaggacuagucccuguucccagagcccacuuuuuuuucuuuuuuugaaauaaaauagccugucuuucagaucuaaaaaaaaaaaaaaaaaaaaaaaaaaaaaaaaaaaaaaaaaaaaaaaaaaaaaaaaaaaaaaaaugcaucccccccccccccccccccccccccccccccaaaggcucuuuucagagccaccagaauu

SEQ ID NO: 9856 - RNA, 1986 nt, Artificial Sequence
  mRNA product Design a-1 comprising derived and/or modified sequence from LASV(LASV1000-NIG-2009;Clade II)__AIT17783__NP (opt1)
gggagagucccgcagucggcguccagcggcucugcuuguucgugugugugucguugcaggccuuauucaagcuuaccaugagcgccuccaaggaggugaaguccuuccuguggacccagagccuccgccgggagcugagcggcuacugcuccaacaucaagcugcaggucgugaaggacgcccaggcgcuccugcacgggcuggacuucagcgagguguccaacguccagcgccucaugcggaagcagaagcgcgacgacagcgaccugaagcggcugcgcgaccucaaccaggccgugaacaaccugguggagcugaaguccacccagcagaaguccauccuccgggucggcacgcugaccagcgacgaccugcucacccuggccgccgaccuggagaagcucaagagcaaggugauccgcaccgagcggccccuguccagcgggguguacaugggcaaccuguccacgcagcagcucgagcagcgccgggcccugcugaacaugaucgggauggucggcggcgcgcaggggacccagccgggccgcgacgggguggugcgggucugggacgugaagaaccccgaccuccugaacaaccaguucggcaccaugcccagccugacccucgccugccugacgaagcagggccagguggaccugaacgacgucgugcucgcccugaccgaccuggggcucaucuacaccgccaaguaccccaacuccagcgaccuggaccgccugucccagagccacccgauccucaacaugguggacaccaagaaguccagccugaacaucagcggcuacaacuucucccugggggcggccgucaaggccggcgccugcaugcucgacgggggcaacaugcuggagacgaucaaggugacgccccagaccauggacggcauccucaagagcauccugaaggugaagaagucccuggggauguucgucagcgacacccccggcgagcggaaccccuacgagaacauccuguacaagaucugccucuccggggacggcuggccguacaucgccagccgcaccuccaucguggggcgggcgugggagaacaccaccguggaccuggagagcgacggcaagccccagaaggucggcaccgccggguccaacaagagccugcaguccgccggcuuccccacggggcucaccuacagccagcugaugacccugaaggacuccaugaugcagcuggaccccagcgccaagaccuggaucgacaucgagggccgcccggaggaccccguggagaucgcccucuaccagcccgucuccgggugcuacauccacuucuuccgggagcccacggaccugaagcaguucaagcaggacgcgaaguacagccacggcaucgacguggccgaccuguucccggcccagcccggccucaccuccgccgugaucgaggcccugccccgcaacaugguccugaccugccaggggagcgacgacaucaagcggcuccuggacagccagggccgccgcgacaucaagcugaucgacaucgcgcucuccaaggccgacagccggcgcuucgagaacgccgugugggaccagugcaaggaccugugccacaugcacaccgggguggucguggagaagaagaagcggggcgggaaggaggagaucacgccccacugcgcccugauggacugcaucauguacgacgccgcgguguccggcggccucaacaucccgguccugcgcgccgugcugccccgggacaugguguuccgcaccagcucccccaaggucgugcucugaggacuagucccuguucccagagcccacuuuuuuuucuuuuuuugaaauaaaauagccugucuuucagaucuaaaaaaaaaaaaaaaaaaaaaaaaaaaaaaaaaaaaaaaaaaaaaaaaaaaaaaaaaaaaaaaaugcaucccccccccccccccccccccccccccccccaaaggcucuuuucagagccaccagaauu

SEQ ID NO: 9857 - RNA, 1986 nt, Artificial Sequence
  mRNA product Design a-1 comprising derived and/or modified sequence from LASV(LASV221-NIG-2010;Clade II)__AIT17625__NP (opt1)
gggagagucccgcagucggcguccagcggcucugcuuguucgugugugugucguugcaggccuuauucaagcuuaccaugagcgccuccaaggaggugaaguccuuccuguggacccagagccuccgccgggagcugagcggcuacugcuccagcaucaagcugcaggucgugaaggacgcccaggcgcuccugcacgggcuggacuucuccgaggugagcaacguccagcgccucaugcggaagcagcgccgggacgacuccgaccugaagcgccugcgggaccucaaccaggccgugaacaaccugguggagcucaagagcacccagcagaaguccauccugcgcgucggcacgcugaccagcgacgaccugcucacccuggccgccgaccuggagaagcucaaguccaaggugauccggaccgagcgcccccugagcuccgggguguacaugggcaaccugagcacgcagcagcucgagcagcggcgcgcccugcugaacaugaucgggauggucggcggcgcgcaggggacccagccgggccgggacgggguggugcgcgucugggacgugaagaaccccgaccuccugaacaaccaguucggcaccaugcccucccugacccucgccugccugacgaagcagggccagguggaccugaacgacgccguccucgcccugaccgaccuggggcucaucuacaccgcgaaguaccccaacagcuccgaccuggaccggcugagccagagccacccgauccucaacaugguggacaccaagaaguccagccugaacaucuccggcuacaacuucagccugggggccgccgugaaggccggcgccugcaugcucgacgggggcaacaugcuggagacgaucaaggucacgccccagaccguggacggcauccugaaguccauccucaaggugaagcgcagccuggggauguucgucuccgacacccccggcgagcggaaccccuacgagaacauccuguacaagaucugccucagcggggacggcuggccguacaucgcgucccgcaccagcaucguggggcgggccugggagaacaccaccguggaccuggaguccgacggcaagccccagaaggucggcaccgccgggagcaacaagucccugcagagcgccggcuuccccacggggcucaccuacucccagcugaugacccugaaggacagcaugaugcagcuggaccccuccgccaagaccuggaucgacaucgagggccgcccggaggaccccguggagaucgcgcucuaccagcccaugagcgggugcuacauccacuucuuccgggagcccacggaccugaagcaguucaagcaggacgccaaguacucccacggcaucgacgucgccgaccuguucccggcccagcccggccucaccagcgccgugaucgaggcgcugccccgcaacauggugcugaccugccaggggagcgacgacaucaagcgccuccuggacucccagggccggcgcgacaucaagcugaucgacaucgcccucagcaaggccgacucccggaaguucgagaacgccgucugggaccagugcaaggaccugugccacaugcacaccggggugguggucgagaagaagaagcgcggcgggaaggaggagaucacgccccacugcgcccugauggacugcaucauguacgacgcggccgugagcggcggccucaacaucccggugcugcgggccguccugccccgcgacaugguguuccggaccuccagccccaaggugguccucugaggacuagucccuguucccagagcccacuuuuuuuucuuuuuuugaaauaaaauagccugucuuucagaucuaaaaaaaaaaaaaaaaaaaaaaaaaaaaaaaaaaaaaaaaaaaaaaaaaaaaaaaaaaaaaaaaugcaucccccccccccccccccccccccccccccccaaaggcucuuuucagagccaccagaauu

SEQ ID NO: 9858 - RNA, 1986 nt, Artificial Sequence
  mRNA product Design a-1 comprising derived and/or modified sequence from LASV(LASV237-NIG-2010;Clade II)__AIT17639__NP (opt1)
gggagagucccgcagucggcguccagcggcucugcuuguucgugugugugucguugcaggccuuauucaagcuuaccaugagcgccuccaaggaggugaaguccuuccuguggacccagagccuccgccgggagcugagcggcuacugcuccaacaucaagcugcaggucgugaaggacgcccaggcgcuccugcacgggcuggacuucagcgagguguccaacguccagcgccucaugcggaagcagaagcgcgacgacagcgaccugaagcggcugcgcgaccucaaccaggccgugaacaaccugguggagcugaaguccacccagcagaaguccauccuccgggucggcacccugaccagcgacgaccugcucacccuggccgccgaccuggagaagcucaagagcaaggugauccgcaccgagcggccccuguccagcgggguguacaugggcaaccuguccacgcagcagcucgagcagcgccgggcccugcugaacaugaucgggauggucggcggcgcgcaggggacccagccgggccgcgacgggguggugcgggucugggacgugaagaaccccgaccuccugaacaaccaguucggcaccaugcccagccugacccucgccugccugacgaagcagggccagguggaccugaacgacgccguccucgcccugaccgaccuggggcucaucuacaccgcgaaguaccccaacuccagcgaccuggaccgccugucccagagccacccgauccucaacaugguggacaucaagaaguccagccugaacaucagcggcuacaacuucucccugggggccgccgugaaggccggcgccugcaugcucgacgggggcaacaugcuggagaccaucaaggucacgccccagaccauggacggcauccucaagagcauccugaaggugaagcggucccuggggauguucgugagcgacacccccggcgagcgcaaccccuacgagaacauccuguacaagaucugccucuccggggacggcuggccguacaucgcgagccggaccuccaucgucgggcgcgccugggagaacacgaccguggaccuggagagcgacggcaagccccagaaggugggcuccgccgggagcaacaagucccugcagagcgccggcuuccccaccgggcucaccuacucccagcugaugacgcugaaggacagcaugaugcagcuggaccccuccgccaagaccuggaucgacaucgagggccggccggaggaccccgucgagaucgcgcucuaccagcccaugagcgggugcuacauccacuucuuccgcgagcccaccgaccugaagcaguucaagcaggacgccaaguacucccacggcaucgacguggccgaccuguucccggcccagcccggccucaccagcgccgucaucgaggcgcugccccggaacauggugcugacgugccaggggagcgacgacaucaagcgccuccuggacucccagggccgccgggacaucaagcugaucgacaucgcccucagcaaggccgacucccgccgguucgagaacgccgugugggaccagugcaaggaccugugccacaugcacaccggggucgugguggagaagaagaagcgcggcgggaaggaggagaucacgccccacugcgcccugauggacugcaucauguacgacgcggccgucagcggcggccucaacaucccggugcugcgggccgugcugccccgcgacauggucuuccggaccuccagccccaagguggugcucugaggacuagucccuguucccagagcccacuuuuuuuucuuuuuuugaaauaaaauagccugucuuucagaucuaaaaaaaaaaaaaaaaaaaaaaaaaaaaaaaaaaaaaaaaaaaaaaaaaaaaaaaaaaaaaaaaugcaucccccccccccccccccccccccccccccccaaaggcucuuuucagagccaccagaauu

SEQ ID NO: 9859 - RNA, 1986 nt, Artificial Sequence
  mRNA product Design a-1 comprising derived and/or modified sequence from LASV(LASV253-NIG-2011;Clade II)__AIT17671__NP (opt1)
gggagagucccgcagucggcguccagcggcucugcuuguucgugugugugucguugcaggccuuauucaagcuuaccaugagcgccuccaaggaggugaaguccuuccuguggacccagagccuccgccgggagcugagcggcuacugcuccagcaucaagcugcaggucgugaaggacgcccaggcgcuccugcacgggcuggacuucuccgaggugagcaacguccagcgccucaugcggaagcagaagcgcgacgacuccgaccugaagcggcugcgcgaccucaaccaggccgugaacaaccugguggagcucaagagcacccagcagaaguccguccugcgggugggcacccugaccagcgacgaccugcucacccuggccgccgaccuggagaagcucaaguccaaggugauccgcaccgagcggccccugagcuccggggucuacaugggcaaccugagcacgcagcagcucgagcagcgccgggcccugcugaacaugaucgggauggugggcggcgcgcaggggacccagccgggccgcgacggggugguccgggugugggacgugaagaaccccgaccuccugaacaaccaguucggcaccaugcccucccugacccucgccugccugacgaagcaggggcaggucgaccugaacgacguggugcucgcccugaccgaccugggccucaucuacaccgccaaguaccccaacagcuccgaccuggaccgccugagccagagccacccgauccucaacauggucgacaccaagaaguccagccugaacaucuccggcuacaacuucagccugggggcggccgugaaggccggcgccugcaugcucgacgggggcaacaugcuggagacgaucaaggugacgccccagaccauggacggcauccugaaguccauccucaaggucaagaagucccuggggauguucgugagcgacacccccggcgagcggaaccccuacgagaacauccuguacaagaucugccucagcggggacggcuggccguacaucgccucccgcaccagcaucguggggcgggcgugggagaacaccaccgucgaccuggaguccgacggcaagccccagaaggugggcaccgccgggagcaacaagucccugcagagcgccggcuuccccacggggcucaccuacucccagcugaugacccugaaggacagcaugaugcagcuggaccccuccgccaagaccuggaucgacaucgagggccgcccggaggaccccgucgagaucgcccucuaccagcccaugagcgggugcuacauccacuucuuccgggagcccacggaccugaagcaguucaagcaggacgcgaaguacucccacggcaucgacgugaccgaccuguucccggcccagcccggccucaccagcgccgugaucgaggcccugccccgcaacaugguccugaccugccaggggagcgacgacaucaagcggcuccuggacucccagggccgccgcgacaucaagcugaucgacaucgcccucagcaaggcggacucccggcgcuucgagaacgccgugugggaccagugcaaggaccugugccacaugcacacggggguggucguggagaagaagaagcggggcgggaaggaggagaucacgccccacugcgcccugauggacugcaucauguacgacgccgccgugagcggcggccucaacaucccgguccugcgcgcggugcugccccgggacaugguguuccgcaccuccagccccaaggucgugcucugaggacuagucccuguucccagagcccacuuuuuuuucuuuuuuugaaauaaaauagccugucuuucagaucuaaaaaaaaaaaaaaaaaaaaaaaaaaaaaaaaaaaaaaaaaaaaaaaaaaaaaaaaaaaaaaaaugcaucccccccccccccccccccccccccccccccaaaggcucuuuucagagccaccagaauu

SEQ ID NO: 9860 - RNA, 1986 nt, Artificial Sequence
  mRNA product Design a-1 comprising derived and/or modified sequence from LASV(LASV254-NIG-2011;Clade II)__AIT17675__NP (opt1)
gggagagucccgcagucggcguccagcggcucugcuuguucgugugugugucguugcaggccuuauucaagcuuaccaugagcgccuccaaggaggugaaguccuuccuguggacccagagccuccgccgggagcugagcggcuacugcuccagcaucaagcugcaggucgugaaggacgcccaggcgcuccugcacgggcuggacuucuccgaggugagcaacguccagcgccucaugcggaagcagaagcgcgacgacuccgaccugaagcggcugcgcgaccucaaccaggccgugaacaaccugguggagcucaagagcacccagcagaaguccguccugcgggugggcacgcugaccagcgacgaccugcucacccuggccgccgaccuggagaagcucaaguccaaggugauccgcaccgagcggccccugagcuccggggucuacaugggcaaccugagcacgcagcagcucgagcagcgccgggcccugcugaacaugaucgggauggugggcggcgcgcaggggacccagccgggccgcgacggggugguccgggugugggacgugaagaaccccgaccuccugaacaaccaguucggcaccaugcccucccugacccucgccugccugacgaagcaggggcaggucgaccugaacgacgccgugcucgcccugaccgaccugggccucaucuacaccgcgaaguaccccaacagcuccgaccuggaccgccugagccagagccacccgauccucaacaugguggacaccaagaaguccagccugaacaucuccggcuacaacuucagccugggggccgccgucaaggccggcgccugcaugcucgacgggggcaacaugcuggagacgaucaaggugacgccccagaccauggacggcauccugaaguccauccucaaggugaagaagucccuggggauguucgucagcgacacccccggcgagcggaaccccuacgagaacauccuguacaagaucugccucagcggggacggcuggccguacaucgcgucccgcaccagcaucguggggcgggccugggagaacaccaucguggaccuggaguccgacggcaagccccagaaggucggcaccgccgggagcaacaagucccugcagagcgccggcuuccccaccgggcucacguacucccagcugaugacccugaaggacagcaugaugcagcuggaccccuccgccaagaccuggaucgacaucgagggccgcccggaggaccccguggagaucgcgcucuaccagcccaugagcgggugcuacauccacuucuuccgggagcccaccgaccugaagcaguucaagcaggacgccaaguacucccacggcaucgacgucgccgaccuguucccggcccagcccggccucacgagcgccgugaucgaggcgcugccccgcaacauggugcugaccugccaggggagcgacgacaucaagcggcuccuggacucccagggccgccgcgacaucaagcugaucgacaucgcccucagcaaggccgacucccggcgcuucgagaacgccgucugggaccagugcaaggaccugugccacaugcacaccggggugguggucgagaagaagaagcggggcgggaaggaggagaucacgccccacugcgcccugauggacugcaucauguacgacgcggccgugagcggcggccucaacaucccggugcugcgcgccguccugccccgggacaugguguuccgcaccuccagccccaaggugguccucugaggacuagucccuguucccagagcccacuuuuuuuucuuuuuuugaaauaaaauagccugucuuucagaucuaaaaaaaaaaaaaaaaaaaaaaaaaaaaaaaaaaaaaaaaaaaaaaaaaaaaaaaaaaaaaaaaugcaucccccccccccccccccccccccccccccccaaaggcucuuuucagagccaccagaauu

SEQ ID NO: 9861 - RNA, 1986 nt, Artificial Sequence
  mRNA product Design a-1 comprising derived and/or modified sequence from LASV(Nig08-04;Clade II)__ADU56611__NP (opt1)
gggagagucccgcagucggcguccagcggcucugcuuguucgugugugugucguugcaggccuuauucaagcuuaccaugagcgccuccaaggaggugaaguccuuccuguggacccagagccuccgccgggagcugagcggcuacugcuccaacaucaagcugcaggucgugaaggacgcccaggcgcuccugcacgggcuggacuucagcgagguguccaacguccagcgccucaugcggaagcagaagcgcgacgacggcgaccugaagcggcugcgcgaccucaaccaggccgugaacaaccugguggagcucaagagcacccagcagaaguccguccugcggguggggacccugaccagcgacgaccugcucacccuggccgccgaccuggagaagcucaaguccaaggugauccgcaccgagcggccccugagcuccggcgucuacauggggaaccugagcacgcagcagcucgagcagcgcaaggcccugcuguccaugaucggcauggugggcggggcgcagggcacccagccggggcgggacggcgugguccgcgugugggacgugaagaaccccgaccuccugaacaaccaguucgggaccaugcccagccugacccucgccugccugacgaagcagggccaggucgaccugaacgacgccgugcucgcccugaccgaccugggccucaucuacaccgcgaaguaccccaacuccagcgaccuggaccggcugucccagagccacccgauccucaacaugguggacaccaagaaguccagccugaacaucagcggguacaacuucucccugggcgccgccgucaaggccggggccugcaugcucgacggcggcaacaugcuggagacgaucaaggugacgccccagaccauggacgggauccucaagagcauccugaaggugaagcgcucccugggcauguucgucagcgacacccccggggagcggaaccccuacgagaacauccuguacaagaucugccucuccggcgacggguggccguacaucgcgagccgcaccuccaucgugggccgggccugggagaacaccaccguggaccuggagagcgacggcaagccccagaaggucgggaccgccggcuccaacaagagccugcaguccgccggguuccccacgggccucaccuacagccagcugaugacccugaaggacuccaugaugcagcuggaccccagcgccaagaccuggaucgacaucgaggggcgcccggaggaccccguggagaucgcgcucuaccagcccauguccggcugcuacauccacuucuuccgggagcccacggaccugaagcaguucaagcaggacgccaaguacagccacggcaucgacgucaccgaccuguucuccgcccagccggggcucaccagcgccgugaucgaggcccugccccgcaacauggugcugaccugccagggcagcgacgacaucaagaagcuccuggacucccaggggcggcgcgacaucaagcugaucgacaucagccucaacaaggcggacucccgccgguucgagaacgccgucugggaccagugcaaggaccugugccacaugcacacgggcgugguggucgagaagaagaagcgcgggggcaaggaggagaucacgccccacugcgcccugauggacugcaucauguucgacgccgccgugagcggcgggcucaacauccccauccugcgggcggugcugccgcgcgacauggucuuccggaccuccagccccaagguggugcucugaggacuagucccuguucccagagcccacuuuuuuuucuuuuuuugaaauaaaauagccugucuuucagaucuaaaaaaaaaaaaaaaaaaaaaaaaaaaaaaaaaaaaaaaaaaaaaaaaaaaaaaaaaaaaaaaaugcaucccccccccccccccccccccccccccccccaaaggcucuuuucagagccaccagaauu

SEQ ID NO: 9862 - RNA, 1989 nt, Artificial Sequence
  mRNA product Design a-1 comprising derived and/or modified sequence from LASV(GA391;Clade III)__AAA46284__NP (opt1)
gggagagucccgcagucggcguccagcggcucugcuuguucgugugugugucguugcaggccuuauucaagcuuaccaugagcgccuccaaggaggugcgcagcugccuguggacccagucccuccggcgcgagcugagcggcuacugcuccaacaucaagcugcaggucgugaaggacgcccaggcgcuccugcacgggcuggacuucagcgagguguccaacguccagcggcucaugcgcaagcagaagcgggacgacggcgaccugaagcgccugcgggaccucaaccaggccgugaacaaccugguggagcugaaguccacccagcagaaguccguccuccgcguggggacgcugagcuccgacgaccugcucauccuggccgccgaccuggagaagcucaagagcaaggugacccggaccgagcgcccccuguccagcggcgucuacauggggaaccuguccagccagcagcucgaccagcggcgcgcccugcugaacaugaucggcaugaccggcguguccgggggcgggaagggcgcgagcaacgggaucgugcgggucugggacgugaagaacgccgagcuccugaacaaccaguucggcacgaugccgucccugacccucgccugccugaccaagcagggccagguggaccugaacgacgccguccaggcgcucaccgaccuggggcugaucuacacggccaaguaccccaacagcagcgaccucgaccgccugucccagagccaccccauccugaacaugaucgacaccaagaaguccagccucaacaucuccggcuacaacuucagccugggggccgccgugaaggccggcgcgugcaugcuggacggcgggaacaugcucgagaccaucaaggugagcccccagaccauggacggcauccucaagagcauccugaaggucaagaagucccuggggauguucgugagcgacacgccgggcgagcggaaccccuacgagaacauccuguacaagaucugccuguccggggacggcuggagcuacaucgccucccgcaccagcaucgugggccgggccugggagaacaccgucguggaccucgagcaggacaacaagccccagaagaucgggaacggcggguccaacaagagccugcaguccgccggcuucgccgcggggcugaucuacagccagcucaugacccugaaggacuucaagugcuucaaccugauccccaacgccaagacguggauggacaucgagggccgcccggaggaccccguggagaucgcccuguaccagcccuccagcggcugcuacguccacuucuuccgggagcccaccgaccucaagcaguucaagcaggacgccaaguacagccacgggcgcgacgugaccgaccuguucgccgcgcagccgggccugaccuccgccgucaucgaggcccucccccggaacauggugaucacgugccaggggagcgaggacauccgcaagcugcuggagucccagggccgccgggacaucaagcucaucgacaucacccugagcaaggccgacucccgcaaguucgagaacgccgugugggaccaguucaaggaccugugccacaugcacaccggggucgugguggagaagaagaagcggggcggcaaggaggagaucacgccccacugcgcgcucauggacugcaucauguucgacgccgccgucagcgggggccuggacgccaaggugcugcgcgugguccucccccgggacaugguguuccgcaccuccaccccgaaggugguccugugaggacuagucccuguucccagagcccacuuuuuuuucuuuuuuugaaauaaaauagccugucuuucagaucuaaaaaaaaaaaaaaaaaaaaaaaaaaaaaaaaaaaaaaaaaaaaaaaaaaaaaaaaaaaaaaaaugcaucccccccccccccccccccccccccccccccaaaggcucuuuucagagccaccagaauu

SEQ ID NO: 9863 - RNA, 1986 nt, Artificial Sequence
  mRNA product Design a-1 comprising derived and/or modified sequence from LASV(Nig08-A19;Clade III)__ADU56619__NP (opt1)
gggagagucccgcagucggcguccagcggcucugcuuguucgugugugugucguugcaggccuuauucaagcuuaccaugagcgccuccaaggaggugaaguccuuccuguggacccagucccuccgccgggagcugagcggcuacugcuccaacaucaagcugcaggucgugaaggacgcccaggcgcuccugcacgggcuggacuucagcgagguguccaacguccagcgccucaugcggaagcagaagcgcgacgacggcgaccugaagcggcugcgcgaccucaaccaggccgugaacaaccugguggagcucaagagcacccagcagaaguccguccugcggguggggacccugagcuccgacgaccugcucgugcuggccgccgaccuggagaagcucaagagcaaggucgugcgcaccgagcggccccuguccagcggcaucuacauggggaaccuguccagccagcagcucgaccagcgcaaggcccugcugaacaugaucggcaugaccggcgggaacggcgggcggaacaccacguccgacggcaucgugcgcgucugggacgugaagaacgcggagcuccugaacaaccaguucgggaccaugccgagccugacccucgccugccugaccaagcagggccagguggaccugaacgacgccguccaggcccucacggaccugggccugaucuacaccgcgaaguaccccaacuccagcgaccucgaccggcuggcccagagccaccccauccugaacaugaucgacaccaagaaguccagccucaacaucuccggguacaacuucagccugggcgccgccgugaaggccggggcgugcaugcuggacggcggcaacaugcucgagaccaucaaggugagcccccagacgauggacgggauccucaagagcauccugaaggucaagcgcucccugggcauguucaucagcgacaccccgggggagcggaaccccuacgagaacauccuguacaagaucugccuguccggcgacggguggcccuacaucgccagccgcaccuccaucgugggccgggccugggagaacaccguggucgaccucgagagcgacaacaagccccagaagacgggcaacgggggcuccaacaagagccugcaguccgccggguucgccgcgggccugaccuacagccagcucaugacccugaaggacuccaugcugcagcuggacccgaacgccaagaccuggauggacaucgaggggcgccccgaggaccccguggagaucgcccucuaccagcccagcuccggcugcuacauccacuucuuccgggagccgacggaccugaagcaguucaagcaggacgccaaguacagccacggcaucgacgugaccgaccuguucgccgcgcagcccgggcucaccagcgccgucaucgaggcccugccccgcaacauggugaucacgugccagggcuccgaggacauccggaagcugcucgagagccaggggcgccgcgacaucaagcugaucgacaucucccugagcaaggucgacucccggaaguucgagaacgccgugugggaccaguucaaggaccucugccacaugcacaccggcaucguggucgagaagaagaagcgcgggggcaaggaggagaucacgccccacugcgcccugauggacugcaucauguucgacgcggccgugagcggcgggguggacgccaagguccugcgggccgugcucccgcgcgacaugguguuccggaccuccacccccaaggucgugcugugaggacuagucccuguucccagagcccacuuuuuuuucuuuuuuugaaauaaaauagccugucuuucagaucuaaaaaaaaaaaaaaaaaaaaaaaaaaaaaaaaaaaaaaaaaaaaaaaaaaaaaaaaaaaaaaaaugcaucccccccccccccccccccccccccccccccaaaggcucuuuucagagccaccagaauu

SEQ ID NO: 9864 - RNA, 1986 nt, Artificial Sequence
  mRNA product Design a-1 comprising derived and/or modified sequence from LASV(G1180-SLE-2010;Clade IV)__AIT17169__NP (opt1)
gggagagucccgcagucggcguccagcggcucugcuuguucgugugugugucguugcaggccuuauucaagcuuaccaugagcgccuccaaggagaucaagagcuuccuguggacccagucccuccgccgggagcugagcggcuacugcuccaacaucaagcuccagguggucaaggacgcccaggcgcugcugcacgggcuggacuucagcgagguguccaacgugcagcgccucaugcggaaggagcgccgggacgacaacgaccugaagcgccugcgggaccucaaccaggccgucaacaaccugguggagcucaagagcacccagcagaaguccauccugcgcgugggcacccugaccagcgacgaccugcucauccuggccgccgaccuggagaagcucaaguccaaggucauccggaccgagcgcccccugagcgccgggguguacaugggcaaccuguccagccagcagcucgaccagcggcgcgcgcugcuguccaugaucgggaugagcuccggcaaccagcgggcccaggccggccgcgacggggugguccgggugugggacgugaagaacgucgagcuccugaacaaccaguucggcaccaugccgagccugacgcucgccugccugaccaagcagggccagguggaccugaacgacgcggugcaggcccucaccgaccuggggcugaucuacaccgccaaguaccccaacacguccgaccucgaccgccugacccagagccaccccauccugaacaugaucgacaccaagaaguccagccucaacaucagcggguacaacuucucccugggcgccgccgucaaggcgggcgccugcaugcuggacgggggcaacaugcucgagaccaucaaggugagcccccagacgauggacgggauccugaaguccauccugaaggugaagaaggcccucggcauguucaucagcgacaccccgggcgagcggaaccccuacgagaacauccuguacaagaucugccuguccggggacggcuggcccuacaucgccagccgcaccuccaucaccgggcgggccugggagaacacggucguggaccucgagagcgacggcaagccccagaaggcgggguccaacaacagcaacaagucccugcagagcgugggcuucaccgccggccugaccuacucccagcucaugacccugaaggacgccaugcugcagcuggacccgaacgccaagacguggauggacaucgaggggcgccccgaggaccccgucgagaucgcccucuaccagcccagcuccggcugcuacauccacuucuuccgggagccgaccgaccugaagcaguucaagcaggacgcgaaguacagccacgggaucgacgugaccgaccuguucgccgcccagcccggccucaccuccgccgugaucgacgcccugccccgcaacauggucaucacgugccaggggagcgacgacauccgcaagcugcucgagagccagggccggaaggacaucaagcugaucgacaucgcgcuguccaagaccgacagccgcaaguacgagaacgccgugugggaccaguacaaggaccucugccacaugcacaccggcgucgugguggagaagaagaagcgcgggggcaaggaggagaucacgccccacugcgcccugauggacugcaucauguucgacgccgcggucuccgggggccugaacaccagcgugcuccgggccgugcugccgcgggacauggucuuccgcaccuccacgccccggguggugcugugaggacuagucccuguucccagagcccacuuuuuuuucuuuuuuugaaauaaaauagccugucuuucagaucuaaaaaaaaaaaaaaaaaaaaaaaaaaaaaaaaaaaaaaaaaaaaaaaaaaaaaaaaaaaaaaaaugcaucccccccccccccccccccccccccccccccaaaggcucuuuucagagccaccagaauu

SEQ ID NO: 9865 - RNA, 1986 nt, Artificial Sequence
  mRNA product Design a-1 comprising derived and/or modified sequence from LASV(G1442-SLE-2011;Clade IV)__AIT17181__NP (opt1)
gggagagucccgcagucggcguccagcggcucugcuuguucgugugugugucguugcaggccuuauucaagcuuaccaugagcgccuccaaggaggugaaguccuuccuguggacccagagccuccgccgggagcugagcggcuacugcuccaacaucaagcugcaggucgugaaggacgcccaggcgcuccugcacgggcuggacuucagcgagguguccaacguccagcgccucaugcggaagcagcgccgggacgacaacgaccugaagcgccugcgggaccucaaccaggccgugaacaaccugguggagcucaagagcacccagcagaaguccguccugcgcgugggcacccugaccagcgacgaccugcucgugcuggccgccgaccuggagaagcucaaguccaaggucauccggaccgagcgcccccugagcgccgggguguacaugggcaaccuguccagccagcagcucgaccagcggcgcgcgcugcugaacaugaucgggauguccggcggcauccaggggacccggacgggccgcgacggggugguccgggugugggacgugaagaacgccgaccuccugaacaaccaguucggcaccaugccgagccugacccucgccugccugaccaagcaggggcaggucgaccugaacgacguggugcaggcccucacggaccugggccugaucuacaccgcgaaguaccccaacgccuccgaccucgaccgccugacccagagccaccccauccugaacaugaucgacaccaagaaguccagccucaacaucagcggcuacaacuucucccugggggccgccgucaaggccggcgcgugcaugcuggacgggggcaacaugcucgagacgaucaaggugagcccccagaccauggacggcauccugaaguccauccugaaggugaagaagacccucgggauguucaucagcgacaccccgggcgagcggaaccccuacgagaacauccuguacaagaucugccuguccggggacggcuggcccuacaucgccagccgcacguccaucaccgggcgggccugggagaacaccgucguggaccucgagagcgacggcaagccccagaaggccggcuccaacaacagcaacaagucccugcagagcgccggguucgcggccggccugaccuacucccagcucaugacgcugaaggacgccaugcugcagcuggacccgaacgccaagaccuggauggacaucgaggggcgccccgaggaccccguggagaucgcccucuaccagcccagcuccggcugcuacauccacuucuuccgggagccgaccgaccugaagcaguucaagcaggacgcgaaguacagccacgggaucgacgucaccgaccuguucgccgcccagcccggccucacguccgccgugaucgaggcccugccccgcaacauggucaucacgugccagggcagcgacgacaucaagaagcugcucgagucccaggggcgcaaggacaucaagcugaucgacaucgcgcugagcaagaccgacagccggaaguacgagaacgccgugugggaccaguacaaggaccucugccacaugcacaccggcguggucguggagaagaagaagcgcgggggcaaggaggagaucaccccgcacugcgcccugauggacugcaucauguucgacgccgcgguguccgggggccugaacacccucguccugcgggccgugcugccccgcgacaugguguuccggaccagcacgccccgcgucgugcucugaggacuagucccuguucccagagcccacuuuuuuuucuuuuuuugaaauaaaauagccugucuuucagaucuaaaaaaaaaaaaaaaaaaaaaaaaaaaaaaaaaaaaaaaaaaaaaaaaaaaaaaaaaaaaaaaaugcaucccccccccccccccccccccccccccccccaaaggcucuuuucagagccaccagaauu

SEQ ID NO: 9866 - RNA, 1986 nt, Artificial Sequence
  mRNA product Design a-1 comprising derived and/or modified sequence from LASV(G3010-SLE-2013;Clade IV)__AIT17345__NP (opt1)
gggagagucccgcagucggcguccagcggcucugcuuguucgugugugugucguugcaggccuuauucaagcuuaccaugagcgccuccaaggagaucaagagcuuccuguggacccagucccuccgccgggagcugagcggcuacugcuccaacaucaagcuccagguggucaaggacgcccaggcgcugcugcacgggcuggacuucagcgagguguccaacgugcagcgccucaugcggaaggagcgccgggacgacaacgaccugaagcgccugcgggaccucaaccaggccgucaacaaccugguggagcucaagagcacccagcagaaguccauccugcgcgugggcacccugaccagcgacgaccugcucauccuggccgccgaccuggagaagcucaaguccaaggucacccggaccgagcgcccccugagcgccgggguguacaugggcaaccuguccagccagcagcucgaccagcggcgcgcgcugcuguccaugaucgggaugagcuccggcgugcagggcgcccgggccgggcgcgacggcgucgugcgggugugggacgucaagaacgccgagcuccugaacaaccaguucgggacgaugccgagccugacccucgcgugccugaccaagcagggccagguggaccugaacgacgugguccaggcccucaccgaccuggggcugaucuacacggccaaguaccccaacaccuccgaccucgaccgccugacccagagccaccccauccugaacaugaucgacaccaagaaguccagccucaacaucagcggcuacaacuucucccugggcgccgccgugaaggcgggggccugcaugcuggacggcgggaacaugcucgagacgaucaaggugagcccccagaccauggacggcauccugaaguccauccugaaggucaagaaggcccucggcauguucaucagcgagaccccgggggagcggaaccccuacgagaacauccuguacaagaucugccuguccggcgacggguggcccuacaucgccagccgcaccuccaucacgggccgggccugggagaacaccgugguggaccucgagagcgacgggaagccccagaaggcgggcuccaacaacagcaacaagucccugcagagcgccggcuucaccgccgggcugaccuacucccagcucaugacgcugaaggacgccaugcugcagcuggacccgaacgccaagaccuggauggacaucgagggccgccccgaggaccccgucgagguggcgcucuaccagcccagcuccgggugcuacauccacuucuuccgggagccgaccgaccugaagcaguucaagcaggacgccaaguacagccacggcaucgacgugaccgaccuguucgccgcccagcccgggcucacguccgccgucaucgacgcgcugccccgcaacauggugaucacgugccagggcagcgacgacaucaagaagcugcucgagagccagggccgcaaggacaucaagcugaucgacaucgcccuguccaagaccgacagccggaaguacgagaacgccgucugggaccaguacaaggaccucugccacaugcacaccggggugguggucgagaagaagaagcgcggcgggaaggaggagaucaccccgcacugcgcccugauggacugcaucauguucgacgcggccguguccggcgggcugaacaccagcgugcuccgggccguccugccccgcgacaugguguuccggaccuccacgccccgcgugguccugugaggacuagucccuguucccagagcccacuuuuuuuucuuuuuuugaaauaaaauagccugucuuucagaucuaaaaaaaaaaaaaaaaaaaaaaaaaaaaaaaaaaaaaaaaaaaaaaaaaaaaaaaaaaaaaaaaugcaucccccccccccccccccccccccccccccccaaaggcucuuuucagagccaccagaauu

SEQ ID NO: 9867 - RNA, 1986 nt, Artificial Sequence
  mRNA product Design a-1 comprising derived and/or modified sequence from LASV(G502-SLE-2009;Clade IV)__AIT17127__NP (opt1)
gggagagucccgcagucggcguccagcggcucugcuuguucgugugugugucguugcaggccuuauucaagcuuaccaugagcgccuccaaggagaucaagagcuuccuguggacccagucccuccgccgggagcugagcggcuacugcuccaacaucaagcuccagguggucaaggacgcccaggcgcugcugcacgggcuggacuucagcgagguguccaacgugcagcgccucaugcggaaggagcgccgggacgacaacgaccugaagcgccugcgggaccucaaccaggccgucaacaaccugguggagcucaagagcacccagcagaaguccauccugcgcgugggcacccugaccagcgacgaccugcucauccuggccgccgaccuggagaagcucaaguccaaggucauccggaccgagcgcccccugagcgccgggguguacaugggcaaccuguccagccagcagcucgaccagcggcgcgcgcugcuguccaugaucgggaugagcggcggcaaccagggggugcgggccggcaaggacggggucgugcgcgugugggacgucaagaacgccgagcuccugaacaaccaguucggcaccaugccgucccugacgcucgccugccugaccaagcagggccagguggaccugaacgacgcggugcaggcccucaccgaccuggggcugaucuacaccgccaaguaccccaacacgagcgaccucgaccggcugacccagucccaccccauccugaacaugaucgacaccaagaaguccagccucaacaucuccggcuacaacuucagccugggggccgccgucaaggcgggcgccugcaugcuggacgggggcaacaugcucgagaccaucaaggugagcccccagacgauggacggcauccucaagagcauccugaaggugaagaaggcccuggggauguucaucuccgacaccccgggcgagcgcaaccccuacgagaacauccuguacaagaucugccugagcggggacggcuggcccuacaucgccucccggaccagcaucaccgggcgcgccugggagaacacggucguggaccucgaguccgacggcaagccccagaaggcgggcagcaacaacuccaacaagagccugcaguccgccggguucaccgccggccugaccuacagccagcucaugacccugaaggacgccaugcugcagcuggacccgaacacgaagaccuggauggacaucgaggggcggcccgaggaccccguggagaucgcccucuaccagcccuccagcggcugcuacauccacuucuuccgcgagccgaccgaccugaagcaguucaagcaggacgcgaaguacucccacgggaucgacgucaccgaccuguucgccgcccagcccggccucacgagcgccgugaucgacgcccugccccggaacauggugaucacgugccagggcuccgacgacauccgcaagcugcucgagagccaggggcgcaaggacaucaagcugaucgacaucgcgcugaacaagaccgacagccggaaguacgagaacgccgucugggaccaguacaaggaccucugccacaugcacaccggcguggucguggagaagaagaagcgcgggggcaaggaggagaucaccccgcacugcgcccugauggacugcaucauguucgacgccgcgguguccgggggccugaacaccagcguccuccgggccgugcugccccgcgacaugguguuccggaccuccacgccccgcgucgugcugugaggacuagucccuguucccagagcccacuuuuuuuucuuuuuuugaaauaaaauagccugucuuucagaucuaaaaaaaaaaaaaaaaaaaaaaaaaaaaaaaaaaaaaaaaaaaaaaaaaaaaaaaaaaaaaaaaugcaucccccccccccccccccccccccccccccccaaaggcucuuuucagagccaccagaauu

SEQ ID NO: 9868 - RNA, 1986 nt, Artificial Sequence
  mRNA product Design a-1 comprising derived and/or modified sequence from LASV(G733-SLE-2010;Clade IV)__AIT17155__NP (opt1)
gggagagucccgcagucggcguccagcggcucugcuuguucgugugugugucguugcaggccuuauucaagcuuaccaugagcgccuccaaggagaucaagagcuuccuguggacccagucccuccgccgggagcugagcggcuacugcuccaacaucaagcuccagguggucaaggacgcccaggcgcugcugcacgggcuggacuucagcgagguguccaacgugcagcgccucaugcggaaggagcgccgggacgacaacgaccugaagcgccugcgggaccucaaccaggccgucaacaaccugguggagcucaagagcacccagcagaaguccgugcugcgcgucggcacccugaccagcgacgagcugcucgugcuggccgccgaccuggagaagcucaaguccaaggugauccggaccgagcgcccccugagcgccggggucuacaugggcaaccuguccagccagcagcucgaccagcggcgcgcgcugcuguccaugaucgggaugagcggcggcaaccagggggcccggaccggccgcgacgggguggugcgggucugggacgugaagaacgccgagcuccugaacaaccaguucggcaccaugccgucccugacccucgccugccugaccaagcagggccagguggaccugaacgacgcgguccaggcccucaccgaccuggggcugaucuacacggccaaguaccccaacaccagcgaccucgaccgccugacccagucccaccccauccugaacaugaucgacaccaagaaguccagccucaacaucuccggcuacaacuucagccugggggccgccgugaaggcgggcgccugcaugcuggacgggggcaacaugcucgagacgaucaaggugagcccccagaccauggacggcauccucaagagcauccugaaggucaagaaggcccuggggauguucaucuccgacaccccgggcgagcggaaccccuacgagaacauccuguacaagaucugccugagcggggacggcuggcccuacaucgccucccgcaccagcaucacggggcgggccugggagaacaccgugguggaccucgaguccgacggcaagccccagaaggcgggcagcaacaacuccaacaagagccugcaguccgccggguucaccgccggccugaccuacagccagcucaugacgcugaaggacgccaugcugcagcuggacccgaacgccaagaccuggauggacaucgaggggcgccccgaggaccccgucgagaucgcgcucuaccagcccuccagcggcugcuacauccacuucuuccgggagccgaccgaccugaagcaguucaagcaggacgccaaguacucccacgggaucgacgugaccgaccuguucgccgcccagcccggccucacgagcgccgugaucgacgcgcugccccgcaacauggucaucacgugccagggcuccgacgacauccgcaagcugcucgagagccaggggcggaaggacaucaagcugaucgacaucgcccugagcaagaucgacucccgcaaguacgagaacgccgugugggaccaguacaaggaccucugccacaugcacaccggcgucgugguggagaagaagaagcgcgggggcaaggaggagaucacgccccacugcgcccugauggacugcaucauguucgacgcggccgucagcgggggccugaacucccucgugcugcgggccgugcugccgcgggacauggucuuccgcaccagcacgccccggguggugcucugaggacuagucccuguucccagagcccacuuuuuuuucuuuuuuugaaauaaaauagccugucuuucagaucuaaaaaaaaaaaaaaaaaaaaaaaaaaaaaaaaaaaaaaaaaaaaaaaaaaaaaaaaaaaaaaaaugcaucccccccccccccccccccccccccccccccaaaggcucuuuucagagccaccagaauu

SEQ ID NO: 9869 - RNA, 1986 nt, Artificial Sequence
  mRNA product Design a-1 comprising derived and/or modified sequence from MOPV/LASV reassortant(IGS-1;Clade IV)__AFY05578__NP (opt1)
gggagagucccgcagucggcguccagcggcucugcuuguucgugugugugucguugcaggccuuauucaagcuuaccaugagcgccuccaaggagaucaagagcuuccuguggacccagucccuccgccgggagcugagcggcuacugcuccaacaucaagcuccagguggucaaggacgcccaggcgcugcugcacgggcuggacuucagcgagguguccaacgugcagcgccucaugcggaaggagcgccgggacgacaacgaccugaagcgccugcgggaccucaaccaggccgucaacaaccugguggagcucaagagcacccagcagaaguccauccugcgcgugggcacccugaccagcgacgaccugcucauccuggccgccgaccuggagaagcuccgguccaaggucauccgcaccgagcggccccugagcgccgggguguacaugggcaaccuguccagccagcagcucgaccagcgccgggcgcugcugaacaugaucgggauguccggcggcaaccagggggcccgcgccggccgggacggggugguccgcgugugggacgugaagaacgccgagcuccugagcaaccaguucggcaccaugccgucccugacgcucgcgugccugaccaagcaggggcaggucgaccugaacgacgccgugcaggcccucaccgaccugggccugaucuacaccgccaaguaccccaacacgagcgaccucgaccggcugacccagucccaccccauccugaacaugaucgacaccaagaaguccagccucaacaucuccggcuacaacuucagccugggggccgcggugaaggccggcgccugcaugcuggacgggggcaacaugcucgagaccaucaaggucagcccccagacgauggacggcauccucaagagcauccugaaggugaagaaggcccuggggauguucaucuccgacaccccgggcgagcgcaaccccuacgagaacauccuguacaagaucugccugagcggggacggcuggcccuacaucgccucccggaccagcaucaccgggcgcgcgugggagaacacgguggucgaccucgaguccgacggcaagccccagaaggccgacagcaacaacuccagcaagucccugcagagcgccggcuucaccgccgggcugaccuacucccagcucaugacccugaaggacgccaugcugcagcuggacccgaacgcgaagacguggauggacaucgagggccggcccgaggaccccguggagaucgcccucuaccagcccagcuccgggugcuacauccacuucuuccgcgagccgaccgaccugaagcaguucaagcaggacgccaaguacagccacggcaucgacgugaccgaccuguucgccacccagcccgggcucacguccgccgucaucgacgcgcugccccgcaacauggugaucacgugccagggcagcgacgacauccggaagcugcucgagagccagggccgcaaggacaucaagcugaucgacaucgaccuguccaagaccgacagccggaaguacgagaacgccgugugggaccaguacaaggaccucugccacaugcacaccggggucguggucgagaagaagaagcgcggcgggaaggaggagaucaccccgcacugcgcccugauggacugcaucauguucgacgccgcgguguccggcgggcugaacaccagcgugcuccgggccguccugccccgcgacaugguguuccggaccuccacgccccgcgugguccugugaggacuagucccuguucccagagcccacuuuuuuuucuuuuuuugaaauaaaauagccugucuuucagaucuaaaaaaaaaaaaaaaaaaaaaaaaaaaaaaaaaaaaaaaaaaaaaaaaaaaaaaaaaaaaaaaaugcaucccccccccccccccccccccccccccccccaaaggcucuuuucagagccaccagaauu

SEQ ID NO: 9870 - RNA, 1986 nt, Artificial Sequence
  mRNA product Design a-1 comprising derived and/or modified sequence from LASV(LM765-SLE-2012;Clade IV)__AIT17815__NP (opt1)
gggagagucccgcagucggcguccagcggcucugcuuguucgugugugugucguugcaggccuuauucaagcuuaccaugagcgccuccaaggagaucaagagcuuccuguggacccagucccuccgccgggagcugagcggcuacugcuccaacaucaagcuccagguggucaaggacgcccaggcgcugcugcacgggcuggacuucagcgagguguccaacgugcagcgccucaugcggaaggagcgccgggacgacaacgaccugaagcgccugcgggaccucaaccaggccgucaacaaccugguggagcucaagagcacccagcagaaguccauccugcgcgugggcacccugaccagcgacgaccugcucauccuggccgccgaccuggagaagcucaaguccaaggucacccggaccgagcgcccccugagcgccgggguguacaugggcaaccuguccagccagcagcucgaccagcggcgcgcgcugcuggacaugaucgggauguccggcagcaaccagggcgcccgggccgggcgcgacggcgugguccgggugugggacgugaagaacgccgagcuccugaacaaccaguucgggacgaugccgucccugacccucgcgugccugaccaagcagggccaggucgaccugaacgacgccgugcaggcccucaccgaccuggggcugaucuacacggccaaguaccccaacaccagcgaccucgaccgccugacccagucccaccccauccugaacaugaucgacaccaagaaguccagccucaacaucuccggcuacaacuucagccugggcgccgcggugaaggccggggccugcaugcuggacggcgggaacaugcucgagacgaucaaggucagcccccagaccauggacggcauccucaagagcauccugaaggugaagaaggcccugggcauguucaucuccgacgccccgggggagcggaaccccuacgagaacauccuguacaagaucugccugagcggcgacggguggcccuacaucgcgucccgcaccagcaucaccggccgggccugggagaacacgguggucgaccucgaguccgacgggaagccccagaaggccggcagcaacggcuccaacaagagccugcaguccgccggguucaccgccggccugaccuacagccagcucaugacccugaaggacgcgaugcugcagcuggacccgaacgccaagacguggauggacaucgaggggcgccccgaggaccccguggagaucgcccucuaccagcccuccagcggcugcuacauccacuucuuccgggagccgaccgaccugaagcaguucaagcaggacgccaaguacucccacgggaucgacgugaccgaccuguucgccgcgcagcccggccucaccagcgccgucaucgacgcccugccccgcaacauggugaucacgugccagggcuccgacgacauccgcaagcuguucgagagccaggggcggaaggacaucaagcucaucgacaucgcccugagcaagaccgacucccgcaaguacgagaacgcggugugggaccaguacaaggaccugugccacaugcacaccggcaucgucguggagaagaagaagcgcgggggcaaggaggagaucacgccccacugcgcccucauggacugcaucauguucgacgccgccgucagcgggggccugaacaccuccgugcugcgggccgugcucccgcgggacauggucuuccgcaccagcacgccccggguggugcugugaggacuagucccuguucccagagcccacuuuuuuuucuuuuuuugaaauaaaauagccugucuuucagaucuaaaaaaaaaaaaaaaaaaaaaaaaaaaaaaaaaaaaaaaaaaaaaaaaaaaaaaaaaaaaaaaaugcaucccccccccccccccccccccccccccccccaaaggcucuuuucagagccaccagaauu

SEQ ID NO: 9871 - RNA, 1986 nt, Artificial Sequence
  mRNA product Design a-1 comprising derived and/or modified sequence from LASV(LM776-SLE-2012;Clade IV)__AIT17825__NP (opt1)
gggagagucccgcagucggcguccagcggcucugcuuguucgugugugugucguugcaggccuuauucaagcuuaccaugagcgccuccaaggagaucaagagcuuccuguggacccagucccuccgccgggagcugagcuccuacugcagcaacaucaagcuccagguggucaaggacgcccaggcgcugcugcacggccuggacuucuccgaggugagcaacgugcagcgccucaugcggaaggagcgccgggacgacaacgaccugaagcgccugcgggaccucaaccaggccgucaacaaccugguggagcugaaguccacccagcagaaguccauccuccgcguggggacccugaccuccgacgaccugcucauccuggccgccgaccuggagaagcucaagagcaaggucacccggaccgagcgcccccuguccgccggcguguacauggggaaccugagcucccagcagcucgaccagcggcgcgcgcugcugagcaugaucggcauguccgggagcaaccagggcgcccgggccggccgcgacggggugguccgggugugggacgugaagaacgccgagcuccugaacaaccaguucggcacgaugccgucccugacccucgcgugccugaccaagcaggggcaggucgaccugaacgacgccgugcaggcccucaccgaccugggccugaucuacacggccaaguaccccaacaccagcgaccucgaccgccugacccagagccaccccauccugaacaugaucgacaccaagaaguccagccucaacaucuccggguacaacuucagccugggcgccgcggugaaggccggcgccugcaugcuggacgggggcaacaugcucgagacgaucaaggucagcccccagaccauggacgggauccucaagagcauccugaaggugaagaaggcccugggcauguucaucuccgacaccccgggcgagcggaaccccuacgagaacauccuguacaagaucugccugagcggggacggcuggcccuacaucgccucccgcaccagcaucacggggcgggcgugggagaacaccguggucgaccucgaguccgacggcaagccccagaaggccgggagcaacaacuccaacaagagccugcaguccgccggcuucaccgccggccugaccuacagccagcucaugacgcugaaggacgccaugcugcagcuggacccgaacgcgaagaccuggauggacaucgaggggcgccccgaggaccccguggagguggcccucuaccagcccuccagcggcugcuacauccacuucuuccgggagccgaccgaccugaagcaguucaagcaggacgccaaguacucccacgggaucgacgucaccgaccuguucgccgcccagcccggccucacgagcgcggugaucgacgcccugccccgcaacauggugaucacgugccaggggagcgacgacauccgcaagcugcucgagucccagggccggaaggacaucaagcugaucgacaucgcccugagcaagaccgacucccgcaaguacgagaacgccgucugggaccaguacaaggaccucugccacaugcacaccggcguggucguggagaagaagaagcgcgggggcaaggaggagaucaccccgcacugcgcgcugauggacugcaucauguucgacgccgccgugagcgggggccugaacaccuccguccuccgggccgugcugccccgggacaugguguuccgcaccagcacgccccgggucgugcugugaggacuagucccuguucccagagcccacuuuuuuuucuuuuuuugaaauaaaauagccugucuuucagaucuaaaaaaaaaaaaaaaaaaaaaaaaaaaaaaaaaaaaaaaaaaaaaaaaaaaaaaaaaaaaaaaaugcaucccccccccccccccccccccccccccccccaaaggcucuuuucagagccaccagaauu

SEQ ID NO: 9872 - RNA, 1986 nt, Artificial Sequence
  mRNA product Design a-1 comprising derived and/or modified sequence from LASV(Mad39;Clade IV)__ANH09723__NP (opt1)
gggagagucccgcagucggcguccagcggcucugcuuguucgugugugugucguugcaggccuuauucaagcuuaccaugagcgccuccaaggagaucaagagcuuccuguggacccagucccuccgccgggagcugagcggcuacugcuccaacaucaagcuccagguggucaaggacgcccaggcgcugcugcacgggcuggacuucagcgagguguccaacgugcagcgccucaugcggaagcagcgccgggacgacaacgaccugaagcgccugcgggaccucaaccaggccgucaacaaccugguggagcugaaguccacccagcagaaguccgugcuccgcgucggcacgcugaccagcgacgaccugcucacccuggccgccgaccuggagaagcucaaguccaaggugacccggacggagcgcccccugaccgccgggguguacaugggcaaccugagcucccagcagcucgaccagcggcgcgcgcugcugaacaugaucgggaugagcggcggcaaccagggggcccggaccggccgcgacggggucgugcgggugugggacgucaagaacgccgagcuccugaacaaccaguucggcaccaugccgucccugacgcucgccugccugaccaagcagggccagguggaccugaacgacgugguccaggcgcucaccgaccuggggcugaucuacaccgccaaguaccccaacacgagcgaccucgaccgccugacccagucccaccccauccugaacaugaucgacaccaacaagagcucccucaacaucagcggcuacaacuucagccugggggccgccgugaaggccggcgcgugcaugcuggacgggggcaacaugcucgagaccaucaaggugagcccccagacgauggacggcauccucaagagcauccugaaggucaagaagucccuggggauguucaucagcgacaccccgggcgagcggaaccccuacgagaacauccuguacaagaucugccuguccggggacggcuggcccuacaucgccagccgcaccuccaucaccgggcgggccugggagaacacggugguggaccucgagagcggcggcaagccccagaaggccggguccaacaacagcaacaagucccugcagagcgccggcuucgcggccgggcugaccuacucccagcucaugacccugaaggacgccaugcugcagcuggacccgaacgccaagaccuggauggacaucgagggccgccccgaggaccccgucgagaucgcccucuaccagcccaucagcgggugcuacauccacuucuuccgggagccgacggaccugaagcaguucaagcaggacgcgaaguacucccacggcaucgacgugaccgaccuguucgccgcccagcccggccucaccagcgccgugaucgaggcccugccccgcaacauggucaucacgugccagggguccgacgacauccgcaagcuguucgagagccagggccggaaggacaucaagcucaucgacaucgcgcuguccaagaccgacagccgcaaguacgagaacgccgugugggaccaguacaaggaccugugccacaugcacaccggggucgugguggagaagaagaagaagggcgggaaggaggagaucacgccccacugcgcccucauggacugcaucauguucgacgccgcggucagcggcggccugaacacccuggugcuccgggccgugcugccgcgcgacauggucuuccggaccuccacccccaagguggugcugugaggacuagucccuguucccagagcccacuuuuuuuucuuuuuuugaaauaaaauagccugucuuucagaucuaaaaaaaaaaaaaaaaaaaaaaaaaaaaaaaaaaaaaaaaaaaaaaaaaaaaaaaaaaaaaaaaugcaucccccccccccccccccccccccccccccccaaaggcucuuuucagagccaccagaauu

SEQ ID NO: 9873 - RNA, 1986 nt, Artificial Sequence
  mRNA product Design a-1 comprising derived and/or modified sequence from LASV(Z0947-SLE-2011;Clade IV)__AIT17841__NP (opt1)
gggagagucccgcagucggcguccagcggcucugcuuguucgugugugugucguugcaggccuuauucaagcuuaccaugagcgccuccaaggagaucaagagcuuccuguggacccagucccuccgccgggagcugagcggcuacugcuccaacaucaagcuccagguggucaaggacgcccaggcgcugcugcacgggcuggacuucagcgagguguccaacgugcagcgccucaugcggaaggagcgccgggacgacaacgaccugaagcgccugcgggaccucaaccaggccgucaacaaccugguggagcucaagagcacccagcagaaguccauccugcgcgugggcacccugaccagcgacgaccugcucauccuggccgccgaccuggagaagcucaaguccaaggucacccggaccgagcgcccccugagcgccgggguguacaugggcaaccuguccagccagcagcucgaccagcggcgcgcgcugcugaacaugaucgggauguccggcagcaaccagggcgcccggacggggcgcgacggcgugguccgggugugggacgugaagaacgccgagcuccugaacaaccaguucgggaccaugccgucccugacccucgccugccugaccaagcagggccaggucgaccugaacgacgcggugcaggcccucacggaccuggggcugaucuacaccgccaaguaccccaacaccagcgaccucgaccgccugacccagucccaccccauccugaacaugaucgacacgaagaaguccagccucaacaucuccggcuacaacuucagccugggcgccgccgugaaggcgggggccugcaugcuggacggcgggaacaugcucgagaccaucaaggucagcccccagaccauggacggcauccucaagagcauccugaaggugaagaaggcccugggcauguucaucuccgacgccccgggggagcggaaccccuacgagaacauccuguacaagaucugccugagcggcgacggguggcccuacaucgccucccgcaccagcaucacgggccgggcgugggagaacaccguggucgaccucgaguccgacgggaagccccagaaggccggcagcaacggcuccaacaagagccugcaguccgccggguucaccgccggccugaccuacagccagcucaugacgcugaaggacgccaugcugcagcuggacccgaacgcgaagaccuggauggacaucgaggggcgccccgaggaccccguggagaucgcccucuaccagcccuccagcggcugcuacauccacuucuuccgggagccgaccgaccugaagcaguucaagcaggacgccaaguacucccacgggaucgacgugaccgaccuguucgccgcccagcccggccucacgagcgcggucaucgacgcccugccccgcaacauggugaucacgugccagggcuccgacgacauccgcaagcuguucgagagccaggggcggaaggacaucaagcucaucgacaucgcccugagcaagaccgacucccgcaaguacgagaacgccgugugggaccaguacaaggaccugugccacaugcacaccggcaucgucguggagaagaagaagcgcgggggcaaggaggagaucaccccgcacugcgcgcucauggacugcaucauguucgacgccgccgucagcgggggccugaacaccuccgugcugcgggccgugcucccccgggacauggucuuccgcaccagcacgccccggguggugcugugaggacuagucccuguucccagagcccacuuuuuuuucuuuuuuugaaauaaaauagccugucuuucagaucuaaaaaaaaaaaaaaaaaaaaaaaaaaaaaaaaaaaaaaaaaaaaaaaaaaaaaaaaaaaaaaaaugcaucccccccccccccccccccccccccccccccaaaggcucuuuucagagccaccagaauu

SEQ ID NO: 9874 - RNA, 1986 nt, Artificial Sequence
  mRNA product Design a-1 comprising derived and/or modified sequence from LASV(Josiah;Clade IV)__NP_694869__NP (opt2)
gggagagucccgcagucggcguccagcggcucugcuuguucgugugugugucguugcaggccuuauucaagcuuaccauguccgccuccaaggagaucaaguccuuccucuggacccagucccuccgccgcgagcucuccggcuacugcuccaacaucaagcuccaggucgucaaggacgcccaggcccuccuccacggccucgacuucuccgaggucuccaacguccagcgccucaugcgcaaggagcgccgcgacgacaacgaccucaagcgccuccgcgaccucaaccaggccgucaacaaccucgucgagcucaaguccacccagcagaaguccauccuccgcgucggcacccucaccuccgacgaccuccucauccucgccgccgaccucgagaagcucaaguccaaggucauccgcaccgagcgcccccucuccgccggcgucuacaugggcaaccucuccucccagcagcucgaccagcgccgcgcccuccucaacaugaucggcauguccggcggcaaccagggcgcccgcgccggccgcgacggcgucguccgcgucugggacgucaagaacgccgagcuccucaacaaccaguucggcaccaugcccucccucacccucgccugccucaccaagcagggccaggucgaccucaacgacgccguccaggcccucaccgaccucggccucaucuacaccgccaaguaccccaacaccuccgaccucgaccgccucacccagucccaccccauccucaacaugaucgacaccaagaaguccucccucaacaucuccggcuacaacuucucccucggcgccgccgucaaggccggcgccugcaugcucgacggcggcaacaugcucgagaccaucaaggucuccccccagaccauggacggcauccucaaguccauccucaaggucaagaaggcccucggcauguucaucuccgacacccccggcgagcgcaaccccuacgagaacauccucuacaagaucugccucuccggcgacggcuggcccuacaucgccucccgcaccuccaucaccggccgcgccugggagaacaccgucgucgaccucgaguccgacggcaagccccagaaggccgacuccaacaacuccuccaagucccuccaguccgccggcuucaccgccggccucaccuacucccagcucaugacccucaaggacgccaugcuccagcucgaccccaacgccaagaccuggauggacaucgagggccgccccgaggaccccgucgagaucgcccucuaccagcccuccuccggcugcuacauccacuucuuccgcgagcccaccgaccucaagcaguucaagcaggacgccaaguacucccacggcaucgacgucaccgaccucuucgccacccagcccggccucaccuccgccgucaucgacgcccucccccgcaacauggucaucaccugccagggcuccgacgacauccgcaagcuccucgagucccagggccgcaaggacaucaagcucaucgacaucgcccucuccaagaccgacucccgcaaguacgagaacgccgucugggaccaguacaaggaccucugccacaugcacaccggcgucgucgucgagaagaagaagcgcggcggcaaggaggagaucaccccccacugcgcccucauggacugcaucauguucgacgccgccgucuccggcggccucaacaccuccguccuccgcgccguccucccccgcgacauggucuuccgcaccuccaccccccgcgucguccucugaggacuagucccuguucccagagcccacuuuuuuuucuuuuuuugaaauaaaauagccugucuuucagaucuaaaaaaaaaaaaaaaaaaaaaaaaaaaaaaaaaaaaaaaaaaaaaaaaaaaaaaaaaaaaaaaaugcaucccccccccccccccccccccccccccccccaaaggcucuuuucagagccaccagaauu

SEQ ID NO: 9875 - RNA, 1986 nt, Artificial Sequence
  mRNA product Design a-1 comprising derived and/or modified sequence from LASV(LP;Clade I)__AAF86702__NP (opt2)
gggagagucccgcagucggcguccagcggcucugcuuguucgugugugugucguugcaggccuuauucaagcuuaccauguccaacuccaaggagaucaaguccuuccucuggacccagucccuccgccgcgagcucuccggcuacugcuccaacaucaagcuccaggucgucaaggacgcccaggcccuccuccacggccucgacuucuccgaggucuccaacguccagcgccucaugcgcaagcagaagcgcgacgacgccgaccucaagcgccuccgcgaccucaaccaggccgucaacaaccucgucgagcucaaguccacccagcagaagaacguccuccgcgucggcacccucuccuccgacgaccucaucacccucgccgccgaccucgagaagcucaaguccaaggucauccgcaccgagcgcccccucuccuccggcgucuacaugggcaaccucuccucccagcagcucgaccagcgccgcgcccuccucuccaugaucggcauguccggcggcccccagggcaaccgcaccggcggcgacggcgucguccgcgucugggacgucaagaacgccgagcuccucaacaaccaguucggcaccaugcccucccucacccucgccugccucaccaagcagggccaggucgaccucaacgacgccguccaggcccucaccgaccucggccucaucuacaccgccaaguaccccaacuccuccgaccucgacaugcucacccagucccaccccauccucggcauggucgacaccaagaaguccucccucaacaucuccggcuacaacuucucccucggcgccgccgucaaggccggcgccugcaugcucgacggcggcaacaugcucgagaccaucaaggucuccccccagaccauggacggcauccucaaguccauccucaaggucaagcgcucccucggcauguucaucuccgacacccccggcgagcgcaaccccuacgagaacauccucuacaagaucugccucuccggcgagggcuggcccuacaucgccucccgcaccuccaucaccggccgcgccugggagaacacccucgucgaccucgaguccgacaacaagccccccaagcucaacuccgccggcuccaacaagucccuccaggccgccggccucaacgccggccucaccuacucccagcucaugacccucaaggacugcaugcuccagcucgaccccuccuccaagaccuggaucgacaucgagggccgccccgaggaccccgucgagaucgcccucuuccagcccuccuccggcugcuacauccacuucuuccgcgagcccaccgaccucaagcaguucaagcaggacgccaaguacucccacggcaucgacgucaccgaccucuucuccacccagcccggccucaccuccgccgucaucgaggcccucccccgcaacaugguccucaccugccagggcuccgacgacaucaagaagcuccucgagucccagggccgccgcgacaucaagcucaucgacaucucccucuccaaggccgacucccgcaaguucgagaacgccgucugggaccaguacaaggaccucugccacaugcacaccggcgucgucgucgagaagaagaagcgcggcggcaaggaggagaucaccccccacugcgcccuccucgacugcaucauguucgacgccgccaccaccggcucccucaacaucaccacccuccgcgccguccucccccgcgacauggucuuccgcaccuccacccccaaggucguccucugaggacuagucccuguucccagagcccacuuuuuuuucuuuuuuugaaauaaaauagccugucuuucagaucuaaaaaaaaaaaaaaaaaaaaaaaaaaaaaaaaaaaaaaaaaaaaaaaaaaaaaaaaaaaaaaaaugcaucccccccccccccccccccccccccccccccaaaggcucuuuucagagccaccagaauu

SEQ ID NO: 9876 - RNA, 1986 nt, Artificial Sequence
  mRNA product Design a-1 comprising derived and/or modified sequence from LASV(803213;Clade II)__AAF86704__NP (opt2)
gggagagucccgcagucggcguccagcggcucugcuuguucgugugugugucguugcaggccuuauucaagcuuaccauguccgccuccaaggaggucaaguccuuccucuggacccagucccuccgccgcgagcucuccggcuacugcuccaacaucaagcuccaggucgucaaggacgcccaggcccuccuccacggccucgacuucuccgaggucaacaacguccagcgccucaugcgcaagcagaagcgcgacgacggcgaccucaagcgccuccgcgaccucaaccaggccgucaacaaccucgucgagcucaaguccacccagcagaaguccauccuccgcgucggcacccucaccuccgacgaccuccucacccucgccgccgaccucgagaagcucaaguccaaggucauccgcaccgagcgcccccucuccuccggcgucuacaugggcaaccucuccacccagcagcucgagcagcgccgcgcccuccucaacaugaucggcauggucggcggcgcccagggcacccagcccggccgcgacggcgucguccgcgucugggacgucaagaaccccgaccuccucaacaaccaguucggcaccaugcccucccucacccucgccugccucaccaagcagggccaggucgaccucaacgacgccguccucgcccucaccgaccucggccucaucuacaccgccaaguaccccaacuccuccgaccucgaccgccucucccagucccaccccauccucaacauggucgacaccaagaaguccucccucaacaucuccggcuacaacuucucccucggcgccgccgucaaggccggcgccugcaugcucgacggcggcaacaugcucgagaccaucaaggucaccccccagaccauggacggcauccucaaguccauccucaaggucaagcgcucccucggcauguucgucuccgacacccccggcgagcgcaaccccuacgagaacauccucuacaagaucugccucuccggcgacggcuggcccuacaucgccucccgcaccuccaucgucggccgcgccugggagaacaccaccgucgaccucgaguccgacggcaagccccagaaggucggcaccgccggcuccaacaagucccuccaguccgccggcuuccccaccggccucaccuacucccagcucaugacccucaaggacuccaugaugcagcucgaccccuccgccaagaccuggaucgacaucgagggccgccccgaggaccccgucgagaucgcccucuaccagcccauguccggcugcuacauccacuucuuccgcgagcccaccgaccucaagcaguucaagcaggacgccaaguacucccacggcaucgacgucgccgaccucuuccccgcccagcccggccucaccuccgccgucaucgaggcccucccccgcaacaugguccucaccugccagggcuccgacgacaucaagaagcuccucgacucccagggccgccgcgacaucaagcucaucgacaucucccucuccaaggucgacucccgcaaguucgagaacgccgucugggaccagugcaaggaccucugccacaugcacaccggcgucgucgucgagaagaagaagcgcggcggcaaggaggagaucaccccccacugcgcccucauggacugcaucauguucgacgccgccgucuccggcggccucaacauccccguccuccgcgccguccucccccgcgacauggucuuccgcaccuccucccccaaggucguccucugaggacuagucccuguucccagagcccacuuuuuuuucuuuuuuugaaauaaaauagccugucuuucagaucuaaaaaaaaaaaaaaaaaaaaaaaaaaaaaaaaaaaaaaaaaaaaaaaaaaaaaaaaaaaaaaaaugcaucccccccccccccccccccccccccccccccaaaggcucuuuucagagccaccagaauu

SEQ ID NO: 9877 - RNA, 1989 nt, Artificial Sequence
  mRNA product Design a-1 comprising derived and/or modified sequence from LASV(GA391;Clade III)__CAA36646__NP (opt2)
gggagagucccgcagucggcguccagcggcucugcuuguucgugugugugucguugcaggccuuauucaagcuuaccauguccgccuccaaggagguccgcuccuuccucuggacccagucccuccgccgcgagcucuccggcuacugcuccaacaucaagcuccaggucgucaaggacgcccaggcccuccuccacggccucgacuucuccgaggucuccaacguccagcgccucaugcgcaagcagaagcgcgacgacggcgaccucaagcgccuccgcgaccucaaccaggccgucaacaaccucgucgagcucaaguccacccagcagaaguccguccuccgcgucggcacccucuccuccgacgaccuccucauccucgccgccgaccucgagaagcucaaguccaaggucacccgcaccgagcgcccccucuccuccggcgucuacaugggcaaccucuccucccagcagcucgaccagcgccgcgcccuccucaacaugaucggcaugaccggcgucuccggcggcggcaagggcgccuccgacggcaucguccgcgucugggacgucaagaacgccgagcuccucaacaaccaguucggcaccaugcccucccucacccucgccugccucaccaagcagggccaggucgaccucaacgacgccguccaggcccucaccgaccucggccucaucuacaccgccaaguaccccaacuccuccgaccucgaccgccucucccagucccaccccauccucaacaugaucgacaccaagaaguccucccucaacaucuccggcuacaacuucucccucggcgccgccgucaaggccggcgccugcaugcucgacggcggcaacaugcucgagaccaucaaggucuccccccagaccauggacggcauccucaaguccauccucaaggucaagaagucccucggcauguucgucuccgacacccccggcgagcgcaaccccuacgagaacauccucuacaagaucugccucuccggcgacggcuggcccuacaucgccucccgcaccuccaucgucggccgcgccugggagaacaccgucgucgaccucgagcaggacaacaagccccagaagaucggcaacggcggcuccaacaagucccuccaguccgccggcuucgccgccggccucaccuacucccagcucaugacccucaaggacuucaagugcuucaaccucauccccaacgccaagaccuggauggacaucgagggccgccccgaggaccccgucgagaucgcccucuaccagcccuccuccggcugcuacguccacuucuuccgcgagcccaccgaccucaagcaguucaagcaggacgccaaguacucccacggcaucgacgucaccgaccucuucgccgcccagcccggccucaccuccgccgucaucgaggcccucccccgcaacauggucaucaccugccagggcuccgaggacauccgcaagcuccucgagucccagggccgccgcgacaucaagcucaucgacaucacccucuccaaggccgacucccgcaaguucgagaacgccgucugggaccaguucaaggaccucugccacaugcacaccggcgucgucgucgagaagaagaagcgcggcggcaaggaggagaucaccccccacugcgcccucauggacugcaucauguucgacgccgccgucuccggcggccucgacgccaagguccuccgcgucguccucccccgcgacauggucuuccgcaccuccacccccaaggucguccucugaggacuagucccuguucccagagcccacuuuuuuuucuuuuuuugaaauaaaauagccugucuuucagaucuaaaaaaaaaaaaaaaaaaaaaaaaaaaaaaaaaaaaaaaaaaaaaaaaaaaaaaaaaaaaaaaaugcaucccccccccccccccccccccccccccccccaaaggcucuuuucagagccaccagaauu

SEQ ID NO: 9878 - RNA, 1986 nt, Artificial Sequence
  mRNA product Design a-1 comprising derived and/or modified sequence from LASV(AV;Clade V)__CCA30315__NP (opt2)
gggagagucccgcagucggcguccagcggcucugcuuguucgugugugugucguugcaggccuuauucaagcuuaccauguccgccuccaaggaggucaaguccuuccucuggacccagucccuccgccgcgagcucuccggcuacugcuccaacaucaagcuccaggucgucaaggacgcccaggcccuccuccacggccucgacuucuccgaggucuccaacguccagcgccucaugcgcaagcagcgccgcgacgacuccgaccucaagcgccuccgcgaccucaaccaggccgucaacaaccucgucgagcucaaguccacccagcagaaguccguccuccgcgucggcacccucuccuccgacgaccuccucacccucgccgccgaccucgagaagcucaaguccaaggucacccgcaccgagcgcccccucuccuccggcgucuacaugggcaaccucuccucccagcagcucgaccagcgccgcgcccuccucaaccucaucggcaugaccaacggcucccagggcucccaggccggccgcgacggcgucguccgcgucugggacgucaagaacgccgagcuccucaacaaccaguucggcaccaugcccucccucacccucgccugccucaccaagcagggccaggucgaccucaacgacgucguccaggcccucaccgaccucggccucaucuacaccgccaaguaccccaacaccuccgaccucgaccgccucacccagucccaccccauccucaacaugaucgacaccaagaaguccucccucaacaucuccggcuacaacuucucccucggcgccgccgucaaggccggcgccugcaugcucgacggcggcaacaugcucgagaccaucaaggucuccccccaguccauggacggcauccucaaguccauccucaaggucaagcgcgcccucggcauguucgucuccgacacccccggcgagcgcaaccccuacgagaacauccucuacaagaucugccucuccggcgacggcuggcccuacaucgccucccgcaccuccaucgucggccgcgccugggagaacaccgucgucgaccucgagaccgacggcaagccccagaagaucggcuccggcaacuccaacaagucccuccaguccgccggcuucuccgccggccucaccuacucccagcucaugacccucaaggacgccaugcuccagcucgaccccaacgccaagaccuggauggacaucgagggccgccccgaggaccccgucgaggucgcccucuaccagcccaucuccggcugcuacauccacuucuuccgcgagcccaccgaccucaagcaguucaagcaggacgccaaguacucccacggcaucgacaucgccgaccucuucgccgcccagcccggccucaccuccgccgucaucgaggcccucccccgcaacauggucaucaccugccagggcuccgaggacaucaagaagcuccucgagucccagggccgcaaggacaucaagcucaucgacaucgcccucuccaagaucgacucccgcaaguucgagaacgccgucugggaccaguacaaggaccucugccacaugcacaccggcgucgucgucgagaagaagaagcgcggcggcaaggaggagaucaccccccacugcgcccucauggacugcaucauguucgacgccgccgucuccggcggccucaacacccucguccuccgcgccguccucccccgcgacauggucuuccgcaccuccaccccccgcgucguccucugaggacuagucccuguucccagagcccacuuuuuuuucuuuuuuugaaauaaaauagccugucuuucagaucuaaaaaaaaaaaaaaaaaaaaaaaaaaaaaaaaaaaaaaaaaaaaaaaaaaaaaaaaaaaaaaaaugcaucccccccccccccccccccccccccccccccaaaggcucuuuucagagccaccagaauu

SEQ ID NO: 9879 - RNA, 1986 nt, Artificial Sequence
  mRNA product Design a-1 comprising derived and/or modified sequence from LASV(Togo/2016/7082;Clade VI)__AMR44578__NP (opt2)
gggagagucccgcagucggcguccagcggcucugcuuguucgugugugugucguugcaggccuuauucaagcuuaccauguccaacuccaaggaggucaaguccuuccucuggacccagucccuccgccgcgagcucuccggcuacugcuccaacaucaagcuccaggucgucaaggacgcccaggcccuccuccacggccucgacuucuccgaggucuccaacguccagcgccucaugcgcaagcagaagcgcgacgacggcgaccucaagcgccuccgcgaccucaaccaggccgucaacaaccucgucgagcucaaguccguccagcagaaguccauccuccgcgucggcacccucaccuccgacgaccuccucacccucgccgccgaccucgagaagcucaaguccaaggucacccgcaccgagcgcccccucuccuccggcgucuacaugggcaaccucuccucccagcagcucgaccagcgccgcgcccuccucuccaugaucggcauguccggcggcaaccagaacucccagcccaagggcgacggcgucguccgcgucugggacgucaagaacgccgaccuccucaacaaccaguucggcaccaugcccucccucacccucgccugccucaccaagcagggccaggucgaccucaacgacgccguccaggcccucaccgaccucggccucaucuacaccgccaaguaccccaacuccuccgaccucgaccgccucucccagucccaccccauccucaacaugaucgacaccaagaaguccucccucaacaucuccggcuacaacuucucccucggcgccgccaucaagaccggcgccugcaugcucgacggcggcaacaugcucgagaccaucaaggucaccccccagaccauggacggcauccucaaguccauccucaaggucaagcgcucccucggcauguucaucuccgacacccccggcgagcgcaaccccuacgagaacauccucuacaagaucugccucuccggcgacggcuggcccuacaucgccucccgcaccgccaucaucggccgcgccugggagaacaccgucgucgaccucgaguccgacuccaagccccagaagaucggcuccaacggcuccaacaagucccuccaguccgccggcuucgcccccggccucaccuacucccagcucaugacccucaaggacuccaugcuccagcucgaccccaacgccaagaccuggaucgacaucgagggccgccccgaggaccccgucgaggucgcccucuuccagcccaucuccggcugcuacauccacuucuuccgcgagcccaccgaccucaagcaguucaagcaggacgccaaguacucccacggcaucgacgucaccgaccucuucgccgcccagcccggccucaccuccgccgucaucgaggcccucccccgcaacaugguccucaccugccagggcuccgacgacaucaagaagcuccucgacucccagggccgccgcgacaucaagcucaucgacgucucccucaacaagaucgacucccgcaaguucgagaacgccgucugggaccaguacaaggaccucugccacaugcacaccggcgucgucgucgagaagaagaagaagggcggcaaggaggagaucaccccccacugcgcccuccucgacugcaucauguucgacgccgccgucuccggcggccucaacgccaccguccuccgcgccguccucccccgcgacauggucuuccgcaccuccucccccaaggucguccucugaggacuagucccuguucccagagcccacuuuuuuuucuuuuuuugaaauaaaauagccugucuuucagaucuaaaaaaaaaaaaaaaaaaaaaaaaaaaaaaaaaaaaaaaaaaaaaaaaaaaaaaaaaaaaaaaaugcaucccccccccccccccccccccccccccccccaaaggcucuuuucagagccaccagaauu

SEQ ID NO: 9880 - RNA, 1986 nt, Artificial Sequence
  mRNA product Design a-1 comprising derived and/or modified sequence from LASV(KAK-428;Clade n.d. (VII))__ANH09741__NP (opt2)
gggagagucccgcagucggcguccagcggcucugcuuguucgugugugugucguugcaggccuuauucaagcuuaccauguccaacuccaaggaggucaaguccuuccucuggacccagucccuccgccgcgagcucuccggcuacugcaccaacaucaagcuccaggucgucaaggacgcccaggcccuccuccacggccucgacuucuccgaggucuccaacguccagcgccucaugcgcaagcagaagcgcgacgacaacgaccucaagcgccuccgcgaccucaaccaggccgucaacaaccucgucgagcucaaguccguccagcagaaguccguccucaaggucggcacccucaacuccgacgaccuccucacccucgccgccgaccucgagaagcucaaguccaaggucguccgcaccgagcgcccccucuccuccggcgucuacaugggcaaccucuccucccagcagcucgaccagcgccgcgcccuccucaacaugaucggcauggccggcggcucccagggcaaccagcccucccgcgacggcgucguccgcgucugggacgucaagaacgccgaccuccucaacaaccaguucggcaccaugcccucccucacccucgccugccucaccaagcagggccaggucgaccucaacgacgucguccucgcccucaccgaccucggccucaucuacaccgccaaguaccccaacuccuccgaccucgaccgccucucccagaaccaccccguccucaacaugaucgacgucaacaaguccucccucaacaucuccggcuacaacuucucccucggcgccgccgucaaggccggcgccugcaugcucgacggcggcaacaugcucgagaccaucaagaucuccccccagaccgucgacggcauccucaaguccauccucaaggucaagcgcgcccucggcauguucgucuccgacacccccggcgagcgcaaccccuacgagaacauccucuacaaggucugccucuccggcaacggcuggcccuacaucgccucccgcaccuccaucgucggccgcgccugggagaacaccgucgucgaccucgaguccaacaagaaccagcccaaggucggcaacaacggcuccaacaagaugcuccaguccuccggcuucgccaccggccucaccuacucccagcucaugacccuccgcgacuccaugcuccagcucgaccccaccgccaagaccuggaucgacaucgagggccgccccgaggaccccgucgagcucgcccucuuccagcccuccuccggcugcuacauccacuucuuccgcgagcccaccgaccucaagcaguucaagcaggacgccaaguacucccacggcaucgacgucaacgaccucuucuccgcccagcccggccucaccuccgccguccucgaggcccucccccgcaacaugguccucaccugccagggcuccgacgacauccgcaagcuccucgacucccaggaccgcaaggacaucaagcucaucgacaucucccucuccaaggccgacgcccgcaaguucgagaacgacgucugggaccaguucaaggaccucugccacaugcacaccggcaucgucgucgagaagaagaagaagggcggcaagcaggagaugaccccccacugcgcccuccucgacugcaucauguucgacgccgccgucuccggcggccucaacguccccacccuccgcgccguccuccccaccgacauggucuuccgcaccaucaccaccaaggucguccucugaggacuagucccuguucccagagcccacuuuuuuuucuuuuuuugaaauaaaauagccugucuuucagaucuaaaaaaaaaaaaaaaaaaaaaaaaaaaaaaaaaaaaaaaaaaaaaaaaaaaaaaaaaaaaaaaaugcaucccccccccccccccccccccccccccccccaaaggcucuuuucagagccaccagaauu

SEQ ID NO: 9881 - RNA, 1986 nt, Artificial Sequence; identical to SEQ ID NO: 9875
  mRNA product Design a-1 comprising derived and/or modified sequence from LASV(Pinneo-NIG-1969;Clade I)__AIT17837__NP (opt2)

SEQ ID NO: 9882 - RNA, 1986 nt, Artificial Sequence
  mRNA product Design a-1 comprising derived and/or modified sequence from LASV(ISTH0009-NIG-2011;Clade II)__AIT17405__NP (opt2)
gggagagucccgcagucggcguccagcggcucugcuuguucgugugugugucguugcaggccuuauucaagcuuaccauguccgucuccaaggaggucaaguccuuccucuggacccagucccuccgccgcgagcucuccggcuacugcuccaacaucaagcuccaggucgucaaggacgcccaggcccuccuccacggccucgacuucuccgaggucuccaacguccagcgccucaugcgcaagcagaagcgcgacgacuccgaccucaagcgccuccgcgaccucaaccaggccgucaacaaccucgucgagcucaaguccacccagcagaaguccauccuccgcgucggcacccucaccuccgacgaccuccucacccucgccgccgaccucgagaagcucaaguccaaggucauccgcaccgagcgcccccucuccuccggcgucuacaugggcaaccucuccacccagcagcucgagcagcgccgcgcccuccucaacaugaucggcauggucggcggcgcccagggcacccagcccggccgcgacggcgucguccgcgucugggacgucaagaaccccgaccuccucaacaaccaguucggcaccaugcccucccucacccucgccugccucaccaagcagggccaggucgaccucaacgacgccguccucgcccucaccgaccucggccucaucuacaccgccaaguaccccaacuccuccgaccucgaccgccucucccagucccaccccauccucaacauggucgacaucaagaaguccucccucaacaucuccggcuacaacuucucccucggcgccgccgucaaggccggcgccugcaugcucgacggcggcaacaugcucgagaccaucaaggucaccccccagaccauggacggcauccucaaguccauccucaaggucaagcgcucccucggcauguucgucuccgacacccccggcgagcgcaaccccuacgagaacauccucuacaagaucugccucuccggcgacggcuggcccuacaucgccucccgcaccuccaucgucggccgcgccugggagaacaccaccgucgaccucgaguccgacggcaagccccagaaggucggcuccgccggcuccaacaagucccuccaguccgccggcuuccccaccggccucaccuacucccagcucaugacccucaaggacuccaugaugcagcucgaccccuccgccaagaccuggaucgacaucgagggccgccccgaggaccccgucgagaucgcccucuaccagcccauguccggcugcuacauccacuucuuccgcgagcccaccgaccucaagcaguucaagcaggacgccaaguacucccacggcaucgacgucgccgaccucuuccccgcccagcccggccucaccuccgccgucaucgaggcccucccccgcaacaugguccucaccugccagggcuccgacgacaucaagcgccuccucgacucccagggccgccgcgacaucaagcucaucgacaucgcccucuccaaggccgacucccgccgcuucgagaacgccgucugggaccagugcaaggaccucugccacaugcacaccggcgucgucgucgagaagaagaagcgcggcggcaaggaggagaucaccccccacugcgcccucauggacugcaucauguacgacgccgccgucuccggcggccucaacauccccguccuccgcgccguccucccccgcgacauggucuuccgcaccuccucccccaaggucguccucugaggacuagucccuguucccagagcccacuuuuuuuucuuuuuuugaaauaaaauagccugucuuucagaucuaaaaaaaaaaaaaaaaaaaaaaaaaaaaaaaaaaaaaaaaaaaaaaaaaaaaaaaaaaaaaaaaugcaucccccccccccccccccccccccccccccccaaaggcucuuuucagagccaccagaauu

SEQ ID NO: 9883 - RNA, 1986 nt, Artificial Sequence
  mRNA product Design a-1 comprising derived and/or modified sequence from LASV(ISTH2010-NIG-2012;Clade II)__AIT17483__NP (opt2)
gggagagucccgcagucggcguccagcggcucugcuuguucgugugugugucguugcaggccuuauucaagcuuaccauguccgccuccaaggaggucaaguccuuccucuggacccagucccuccgccgcgagcucuccggcuacugcuccaacaucaagcuccaggucgucaaggacgcccaggcccuccuccacggccucgacuucuccgaggucuccaacguccagcgccucaugcgcaagcagaagcgcgacgacuccgaccucaagcgccuccgcgaccucaaccaggccgucaacaaccucgucgagcucaaguccacccagcagaaguccauccuccgcgucggcacccucaccuccgacgaccuccucacccucgccgccgaccucgagaagcucaaguccaaggucauccgcaccgagcgcccccucuccuccggcgucuacaugggcaaccucuccacccagcagcucgagcagcgccgcgcccuccucaaccucaucggcauggucggcggcgcccagggcacccagcccggccgcgacggcgucguccgcgucugggacgucaagaaccccgaccuccucaacaaccaguucggcaccaugcccucccucacccucgccugccucaccaagcagggccaggucgaccucaacgacgccguccucgcccucaccgaccucggccucaucuacaccgccaaguaccccaacuccuccgaccucgaccgccucucccagucccaccccauccucaacauggucgacaccaagaaguccucccucaacaucuccggcuucaacuucucccucggcgccgccgucaaggccggcgccugcaugcucgacggcggcaacaugcucgagaccaucaaggucaccccccagaccauggacggcauccucaaguccauccucaaggucaagaagucccucggcauguucgucuccgacacccccggcgagcgcaaccccuacgagaacauccucuacaagaucugccucuccggcgacggcuggcccuacaucgccucccgcaccuccaucgucggccgcgccugggagaacaccaccgucgaccucgaguccgacggcaagccccacaaggucggcaccgccggcuccaacaagucccuccaguccgccggcuuccccaccggccucaccuacucccagcucaugacccucaaggacuccaugaugcagcucgaccccuccgccaagaccuggaucgacaucgagggccgccccgaggaccccgucgagaucgcccucuaccagcccauguccggcugcuacauccacuucuuccgcgagcccaccgaccucaagcaguucaagcaggacgccaaguacucccacggcaucgacgucgccgaccucuuccccgcccagcccggccucaccuccgccgucaucgaggcccucccccgcaacaugguccucaccugccagggcuccgacgacaucaagcgccuccucgacucccagggccgccgcgacaucaagcucaucgacaucgcccucuccaaggccgacucccgccgcuucgagaacgccgucugggaccagugcaaggaccucugccacaugcacaccggcgucgucgucgagaagaagaagcgcggcggcaaggaggagaucaccccccacugcgcccucauggacugcaucauguacgacgccgccgucuccggcggccucaacauccccguccuccgcgccguccucccccgcgacauggucuuccgcaccuccucccccaaggucguccucugaggacuagucccuguucccagagcccacuuuuuuuucuuuuuuugaaauaaaauagccugucuuucagaucuaaaaaaaaaaaaaaaaaaaaaaaaaaaaaaaaaaaaaaaaaaaaaaaaaaaaaaaaaaaaaaaaugcaucccccccccccccccccccccccccccccccaaaggcucuuuucagagccaccagaauu

SEQ ID NO: 9884 - RNA, 1986 nt, Artificial Sequence
  mRNA product Design a-1 comprising derived and/or modified sequence from LASV(Lassa virus/H.sapiens-wt/NGA/2015/ISTH_0543;Clade II)__AVO03640__NP (opt2)
gggagagucccgcagucggcguccagcggcucugcuuguucgugugugugucguugcaggccuuauucaagcuuaccauguccgccuccaaggaggucaaguccuuccucuggacccagucccuccgccgcgagcucuccggcuacugcuccaacaucaagcuccaggucgucaaggacgcccaggcccuccuccacggccucgacuucuccgaggucuccaacguccagcgccucaugcgcaagcagaagcgcgacgacuccgaccucaagcgccuccgcgaccucaaccaggccgucaacaaccucgucgagcucaaguccacccagcagaaguccauccuccgcgucggcacccucaccuccgacgaccuccucacccucgccgccgaccucgagaagcucaaguccaaggucauccgcaccgagcgcccccucuccuccggcgucuacaugggcaaccucuccacccagcagcucgagcagcgccgcgcccuccucaacaugaucggcauggucggcggcgcccagggcacccagcccggccgcgacggcgucguccgcgucugggacgucaagaaccccgaccuccucaacaaccaguucggcaccaugcccucccucacccucgccugccucaccaagcagggccaggucgaccucaacgacgccguccucgcccucaccgaccucggccucaucuacaccgccaaguaccccaacuccuccgaccucgaccgccucucccagucccaccccauccucaacauggucgacaccaagaaguccucccucaacaucuccggcuacaacuucucccucggcgccgccgucaaggccggcgccugcaugcucgacggcggcaacaugcucgagaccaucaaggucaccccccagaccauggacggcauccucaaguccauccucaaggucaagaagucccucggcauguucgucuccgacacccccggcgagcgcaaccccuacgagaacauccucuacaagaucugccucuccggcgacggcuggcccuacaucgccucccgcaccuccaucgucggccgcgccugggagaacaccaccgucgaccucgaguccgacggcaagccccagaaggucggcuccgccggcuccaacaagucccuccaguccgccggcuuccccaccggccucaccuacucccagcucaugacccucaaggacuccaugaugcagcucgaccccuccgccaagaccuggaucgacaucgagggccgccccgaggaccccgucgagaucgcccucuaccagcccauguccggcugcuacauccacuucuuccgcgagcccaccgaccucaagcaguucaagcaggacgccaaguacucccacggcaucgacgucgccgaccucuuccccgcccagcccggccucaccuccgccgucaucgaggcccucccccgcaacaugguccucaccugccagggcuccgacgacaucaagcgccuccucgacucccagggccgcaaggacaucaagcucaucgacaucgcccucuccaaggccgacucccgccgcuucgagaacgccgucugggaccagugcaaggaccucugccacaugcacaccggcgucgucgucgagaagaagaagcgcggcggcaaggaggagaucaccccccacugcgcccucauggacugcaucauguacgacgccgccgucuccggcggccucaacauccccguccuccgcgccguccucccccgcgacauggucuuccgcaccuccucccccaaggucguccucugaggacuagucccuguucccagagcccacuuuuuuuucuuuuuuugaaauaaaauagccugucuuucagaucuaaaaaaaaaaaaaaaaaaaaaaaaaaaaaaaaaaaaaaaaaaaaaaaaaaaaaaaaaaaaaaaaugcaucccccccccccccccccccccccccccccccaaaggcucuuuucagagccaccagaauu

SEQ ID NO: 9885 - RNA, 1986 nt, Artificial Sequence
  mRNA product Design a-1 comprising derived and/or modified sequence from LASV(Lassa virus/H.sapiens-wt/NGA/2016/ISTH_0009;Clade II)__AVO03572__NP (opt2)
gggagagucccgcagucggcguccagcggcucugcuuguucgugugugugucguugcaggccuuauucaagcuuaccauguccgccuccaaggaggucaaguccuuccucuggacccagucccuccgccgcgagcucuccggcuacugcuccaacaucaagcuccaggucgucaaggacgcccaggcccuccuccacggccucgacuucuccgaggucuccaacguccagcgccucaugcgcaagcagaagcgcgacgacuccgaccucaagcgccuccgcgaccucaaccaggccgucaacaaccucgucgagcucaaguccacccagcagaaguccauccuccgcgucggcacccucaccuccgacgaccuccucacccucgccgccgaccucgagaagcucaaguccaaggucauccgcaccgagcgcccccucuccuccggcgucuacaugggcaaccucuccacccagcagcucgagcagcgccgcgcccuccucaacaugaucggcauggucggcggcgcccagggcacccagcccggccgcgacggcgucguccgcgucugggacgucaagaaccccgaccuccucaacaaccaguucggcaccaugcccucccucacccucgccugccucaccaagcagggccaggucgaccucaacgacgccguccucgcccucaccgaccucggccucaucuacaccgccaaguaccccaacuccuccgaccucgaccgccucucccagucccaccccauccucaacauggucgacaccaagaaguccucccucaacaucuccggcuacaacuucucccucggcgccgccgucaaggccggcgccugcaugcucgacggcggcaacaugcucgagaccaucaaggucaccccccagaccauggacggcauccucaaguccauccucaaggucaagaagucccucggcauguucgucuccgacacccccggcgagcgcaaccccuacgagaacauccucuacaagaucugccucuccggcgacggcuggcccuacaucgccucccgcaccuccaucgucggccgcgccugggagaacaccaccgucgaccucgaguccgacggcaagccccagaaggucggcuccgccggcuccaacaagucccuccaguccgccggcuuccccaccggccucaccuacucccagcucaugacccucaaggacuccaugaugcagcucgaccccuccgccaagaccuggaucgacaucgagggccgccccgaggaccccgucgagaucgcccucuaccagcccauguccggcugcuacauccacuucuuccgcgagcccaccgaccucaagcaguucaagcaggacgccaaguacucccacggcaucgacgucgccgaccucuuccccgcccagcccggccucaccuccgccgucaucgaggcccucccccgcaacaugguccucaccugccagggcuccgacgacaucaagcgccuccucgacucccagggccgccgcgacaucaagcucaucgacaucgcccucuccaaggccgacucccgccgcuucgagaacgccgucugggaccagugcaaggaccucugccacaugcacaccggcgucgucgucgagaagaagaagcgcggcggcaaggaggagaucaccccccacugcgcccucauggacugcaucauguacgacgccgccgucuccggcggccucaacauccccguccuccgcgccguccucccccgcgacauggucuuccgcaccuccucccccaaggucguccucugaggacuagucccuguucccagagcccacuuuuuuuucuuuuuuugaaauaaaauagccugucuuucagaucuaaaaaaaaaaaaaaaaaaaaaaaaaaaaaaaaaaaaaaaaaaaaaaaaaaaaaaaaaaaaaaaaugcaucccccccccccccccccccccccccccccccaaaggcucuuuucagagccaccagaauu

SEQ ID NO: 9886 - RNA, 1986 nt, Artificial Sequence
  mRNA product Design a-1 comprising derived and/or modified sequence from LASV(Lassa virus/H.sapiens-wt/NGA/2016/ISTH_0017;Clade II)__AVO03568__NP (opt2)
gggagagucccgcagucggcguccagcggcucugcuuguucgugugugugucguugcaggccuuauucaagcuuaccauguccgccuccaaggaggucaaguccuuccucuggacccagucccuccgccgcgagcucuccggcuacugcuccuccaucaagcuccaggucgucaaggacgcccaggcccuccuccacggccucgacuucuccgaggucuccaacguccagcgccucaugcgcaagcagaagcgcgacgacuccgaccucaagcgccuccgcgaccucaaccaggccgucaacaaccucgucgagcucaaguccacccagcagaaguccauccuccgcgucggcacccucaccuccgacgaccuccucacccucgccgccgaccucgagaagcucaaguccaaggucauccgcaccgagcgcccccucuccuccggcgucuacaugggcaaccucuccacccagcagcucgagcagcgccgcgcccuccucaacaugaucggcauggccggcggcgcccagggcacccagcccggccgcgacggcgucguccgcgucugggacgucaagaaccccgaccuccucaacaaccaguucggcaccaugcccucccucacccucgccugccucaccaagcagggccaggucgaccucaacgacgccguccucgcccucaccgaccucggccucaucuacaccgccaaguaccccaacuccuccgaccucgaccgccucucccagucccaccccauccucaacauggucgacaccaagaaguccucccucaacaucuccggcuacaacuucucccucggcgccgccgucaaggccggcgccugcaugcucgacggcggcaacaugcucgagaccaucaaggucaccccccagaccauggacggcauccucaaguccauccucaaggucaagcgcucccucggcauguucgucuccgacgcccccggcgagcgcaaccccuacgagaacauccucuacaagaucugccucuccggcgacggcuggcccuacaucgccucccgcaccuccaucgucggccgcgccugggagaacaccaccgucgaccucgaguccgacggcaagccccagaaggucggcgccaccggcuccaacaagucccuccaguccgccggcuuccccaccggccucaccuacucccagcucaugacccucaaggacuccaugaugcagcucgaccccuccgccaagaccuggaucgacaucgagggccgccccgaggaccccgucgaggucgcccucuaccagcccgucuccggcugcuacauccacuucuuccgcgagcccaccgaccucaagcaguucaagcaggacgccaaguacucccacggcaucgacgucgccgaccucuuccccgcccagcccggccucaccuccgccgucaucgaggcccucccccgcaacaugguccucaccugccagggcuccgacgacaucaagaagcuccucgacucccagggccgcaaggacaucaagcucaucgacaucgcccucuccaaggccgacucccgccgcuucgagaacgccgucugggaccagugcaaggaccucugccacaugcacaccggcgucgucgucgagaagaagaagcgcggcggcaaggaggagaucaccccccacugcgcccucauggacugcaucauguacgacgccgccgucuccggcggccucaacauccccguccuccgcgccguccucccccgcgacauggucuuccgcaccuccucccccaaggucguccucugaggacuagucccuguucccagagcccacuuuuuuuucuuuuuuugaaauaaaauagccugucuuucagaucuaaaaaaaaaaaaaaaaaaaaaaaaaaaaaaaaaaaaaaaaaaaaaaaaaaaaaaaaaaaaaaaaugcaucccccccccccccccccccccccccccccccaaaggcucuuuucagagccaccagaauu

SEQ ID NO: 9887 - RNA, 1986 nt, Artificial Sequence
  mRNA product Design a-1 comprising derived and/or modified sequence from LASV(Lassa virus/H.sapiens-wt/NGA/2018/ISTH_0959;Clade II)__AVV65100__NP (opt2)
gggagagucccgcagucggcguccagcggcucugcuuguucgugugugugucguugcaggccuuauucaagcuuaccauguccgccuccaaggaggucaaguccuuccucuggacccagucccuccgccgcgagcucuccggcuacugcuccaacaucaagcuccaggucgucaaggacgcccaggcccuccuccacggccucgacuucuccgaggucuccaacguccagcgccucaugcgcaagcagaagcgcgacgacuccgaccucaagcgccuccgcgaccucaaccaggccgucaacaaccucgucgagcucaaguccacccagcagaaguccauccuccgcgucggcacccucaccuccgacgaccuccucacccucgccgccgaccucgagaagcucaaguccaaggucauccgcaccgagcgcccccucuccuccggcgucuacaugggcaaccucuccacccagcagcucgagcagcgccgcgcccuccucaaccucaucggcauggucggcggcgcccagggcacccagcccggccgcgacggcgucguccgcgucugggacgucaagaaccccgaccuccucaacaaccaguucggcaccaugcccucccucacccucgccugccucaccaagcagggccaggucgaccucaacgacgucguccucgcccucaccgaccucggccucaucuacaccgccaaguaccccaacuccuccgaccucgaccgccucucccagucccaccccauccucaacauggucgacaccaagaaguccucccucaacaucuccggcuucaacuucucccucggcgccgccgucaaggccggcgccugcaugcucgacggcggcaacaugcucgagaccaucaaggucaccccccagaccauggacggcauccucaaguccauccucaaggucaagaagucccucggcauguucgucuccgacacccccggcgagcgcaaccccuacgagaacauccucuacaagaucugccucuccggcgacggcuggcccuacaucgccucccgcaccuccaucgucggccgcgccugggagaacaccaccgucgaccucgaguccgacggcaagccccacaaggucggcaccgccggcuccaacaagucccuccaguccgccggcuuccccaccggccucaccuacucccagcucaugacccucaaggacuccaugaugcagcucgaccccuccgccaagaccuggaucgacaucgagggccgccccgaggaccccgucgagaucgcccucuaccagcccauguccggcugcuacauccacuucuuccgcgagcccaccgaccucaagcaguucaagcaggacgccaaguacucccacggcaucgacgucgccgaccucuuccccgcccagcccggccucaccuccgccgucaucgaggcccucccccgcaacaugguccucaccugccagggcuccgacgacaucaagcgccuccucgacucccagggccgcaaggacaucaagcucaucgacaucgcccucuccaagaccgacucccgccgcuucgagaacgccgucugggaccagugcaaggaccucugccacaugcacaccggcgucgucgucgagaagaagaagcgcggcggcaaggaggagaucaccccccacugcgcccucauggacugcaucauguacgacgccgccgucuccggcggccucaacauccccguccuccgcgccguccucccccgcgacauggucuuccgcaccuccucccccaaggucguccucugaggacuagucccuguucccagagcccacuuuuuuuucuuuuuuugaaauaaaauagccugucuuucagaucuaaaaaaaaaaaaaaaaaaaaaaaaaaaaaaaaaaaaaaaaaaaaaaaaaaaaaaaaaaaaaaaaugcaucccccccccccccccccccccccccccccccaaaggcucuuuucagagccaccagaauu

SEQ ID NO: 9888 - RNA, 1986 nt, Artificial Sequence
  mRNA product Design a-1 comprising derived and/or modified sequence from LASV(LASV003-NIG-2008;Clade II)__AIT17581__NP (opt2)
gggagagucccgcagucggcguccagcggcucugcuuguucgugugugugucguugcaggccuuauucaagcuuaccauguccgccuccaaggaggucaaguccuuccucuggacccagucccuccgccgcgagcucuccggcuacugcuccuccaucaagcuccaggucgucaaggacgcccaggcccuccuccacggccucgacuucuccgaggucuccaacguccagcgccucaugcgcaagcagaagcgcgacgacuccgaccucaagcgccuccgcgaccucaaccaggccgucaacaaccucgucgagcucaaguccacccagcagaaguccguccuccgcgucggcacccucaccuccgacgaccuccucacccucgccgccgaccucgagaagcucaaguccaaggucauccgcaccgagcgcccccucuccuccggcgucuacaugggcaaccucuccgcccagcagcucgagcagcgccgcacccuccucaacaugaucggcauggucggcggcgcccagggcacccagcccggccgcgacggcgucguccgcgucugggacgucaagaaccccgaccuccucaacaaccaguucggcaccaugcccucccucacccucgccugccucaccaagcagggccaggucgaccucaacgacgucguccucgcccucaccgaccucggccucaucuacaccgccaaguaccccaacuccuccgaccucgaccgccucucccagucccaccccauccucuccauggucgacaccaagaaguccucccucaacaucuccggcuacaacuucucccucggcgccgccgucaaggccggcgccugcaugcucgacggcggcaacaugcucgagaccaucaaggucaccccccagaccauggacggcauccucaaguccauccucaaggucaagaagucccucggcauguucgucuccgacacccccggcgagcgcaaccccuacgagaacauccucuacaagaucugccucuccggcgacggcuggcccuacaucgccucccgcaccuccaucgucggccgcgccugggagaacaccaccgucgaccucgaguccgacggcaagccccagaaggucggcaccgccggcuccaacaagucccuccaguccgccggcuuccccaccggccucaccuacucccagcucaugacccucaaggacuccaugaugcagcucgaccccuccgccaagaccuggaucgacaucgagggccgccccgaggaccccgucgagaucgcccucuaccagcccauguccggcugcuacauccacuucuuccgcgagcccaccgaccucaagcaguucaagcaggacgccaaguacucccacggcaucgacgucaccgaccucuuccccgcccagcccggccucaccuccgccgucaucgaggcccucccccgcaacaugguccucaccugccagggcuccgacgacaucaagcgccuccucgacucccagggccgccgcgacaucaagcucaucgacaucgcccucuccaaggccgacucccgccgcuucgagaacgccgucugggaccagugcaaggaccucugccacaugcacaccggcgucgucgucgagaagaagaagcgcggcggcaaggaggagaucaccccccacugcgcccucauggacugcaucauguacgacgccgccgucuccggcggccucaacauccccguccuccgcgccguccucccccgcgacauggucuuccgcaccuccucccccaaggucguccucugaggacuagucccuguucccagagcccacuuuuuuuucuuuuuuugaaauaaaauagccugucuuucagaucuaaaaaaaaaaaaaaaaaaaaaaaaaaaaaaaaaaaaaaaaaaaaaaaaaaaaaaaaaaaaaaaaugcaucccccccccccccccccccccccccccccccaaaggcucuuuucagagccaccagaauu

SEQ ID NO: 9889 - RNA, 1986 nt, Artificial Sequence
  mRNA product Design a-1 comprising derived and/or modified sequence from LASV(LASV035-NIG-2009;Clade II)__AIT17589__NP (opt2)
gggagagucccgcagucggcguccagcggcucugcuuguucgugugugugucguugcaggccuuauucaagcuuaccauguccgccuccaaggaggucaaguccuuccucuggacccagucccuccgccgcgagcucuccggcuacugcuccuccaucaagcuccaggucgucaaggacgcccaggcccuccuccacggccucgacuucuccgaggucuccaacguccagcgccucaugcgcaagcagaagcgcgacgacuccgaccucaagcgccuccgcgaccucaaccaggccgucaacaaccucgucgagcucaaguccacccagcagaaguccauccuccgcgucggcacccucaccuccgacgaccuccucacccucgccgccgaccucgagaagcucaaguccaaggucauccgcaccgagcgcccccucuccuccggcgucuacaugggcaaccucuccgcccagcagcucgagcagcgccgcgcccuccucaacaugaucggcauggucggcggcgcccagggcacccagcccggccgcgacggcgucguccgcgucugggacgucaagaaccccgaccuccucaacaaccaguucggcaccaugcccucccucacccucgccugccucaccaagcagggccaggucgaccucaacgacgccguccucgcccucaccgaccucggccucaucuacaccgccaaguaccccaacuccuccgaccucgaccgccucucccagucccaccccauccucaacauggucgacaccaagaaguccucccucaacaucuccggcuacaacuucucccucggcgccgccgucaaggccggcgccugcaugcucgacggcggcaacaugcucgagaccaucaaggucaccccccagaccauggacggcauccucaaguccauccucaaggucaagcgcucccucggcauguucgucuccgacacccccggcgagcgcaaccccuacgagaacauccucuacaagaucugccucuccggcgacggcuggcccuacaucgccucccgcaccuccaucgucggccgcgccugggagaacaccaccgucgaccucgaguccgacggcaagccccagaaggucggcaccaccggcuccaacaagucccuccaguccgccggcuuccccaccggccucaccuacucccagcucaugacccucaaggacuccaugaugcagcucgaccccuccgccaagaccuggaucgacaucgagggccgccccgaggaccccgucgagaucgcccucuaccagcccauguccggcugcuacauccacuucuuccgcgagcccaccgaccucaagcaguucaagcaggacgccaaguacucccacggcaucgacgucgccgaccucuuccccgcccagcccggccucaccuccgccgucaucgaggcccucccccgcaacaugguccucaccugccagggcuccgacgacaucaagaagcuccucgacucccagggccgccgcgacaucaagcucaucgacaucgcccucuccaaggccgacucccgcaaguucgagaacgccgucugggaccagugcaaggaccucugccacaugcacaccggcgucgucgucgagaagaagaagcgcggcggcaaggaggagaucaccccccacugcgcccucauggacugcaucauguacgacgccgccgucuccggcggccucaacauccccguccuccgcgccguccucccccgcgacauggucuuccgcaccuccucccccaaggucguccucugaggacuagucccuguucccagagcccacuuuuuuuucuuuuuuugaaauaaaauagccugucuuucagaucuaaaaaaaaaaaaaaaaaaaaaaaaaaaaaaaaaaaaaaaaaaaaaaaaaaaaaaaaaaaaaaaaugcaucccccccccccccccccccccccccccccccaaaggcucuuuucagagccaccagaauu

SEQ ID NO: 9890 - RNA, 1986 nt, Artificial Sequence
  mRNA product Design a-1 comprising derived and/or modified sequence from LASV(LASV1000-NIG-2009;Clade II)__AIT17783__NP (opt2)
gggagagucccgcagucggcguccagcggcucugcuuguucgugugugugucguugcaggccuuauucaagcuuaccauguccgccuccaaggaggucaaguccuuccucuggacccagucccuccgccgcgagcucuccggcuacugcuccaacaucaagcuccaggucgucaaggacgcccaggcccuccuccacggccucgacuucuccgaggucuccaacguccagcgccucaugcgcaagcagaagcgcgacgacuccgaccucaagcgccuccgcgaccucaaccaggccgucaacaaccucgucgagcucaaguccacccagcagaaguccauccuccgcgucggcacccucaccuccgacgaccuccucacccucgccgccgaccucgagaagcucaaguccaaggucauccgcaccgagcgcccccucuccuccggcgucuacaugggcaaccucuccacccagcagcucgagcagcgccgcgcccuccucaacaugaucggcauggucggcggcgcccagggcacccagcccggccgcgacggcgucguccgcgucugggacgucaagaaccccgaccuccucaacaaccaguucggcaccaugcccucccucacccucgccugccucaccaagcagggccaggucgaccucaacgacgucguccucgcccucaccgaccucggccucaucuacaccgccaaguaccccaacuccuccgaccucgaccgccucucccagucccaccccauccucaacauggucgacaccaagaaguccucccucaacaucuccggcuacaacuucucccucggcgccgccgucaaggccggcgccugcaugcucgacggcggcaacaugcucgagaccaucaaggucaccccccagaccauggacggcauccucaaguccauccucaaggucaagaagucccucggcauguucgucuccgacacccccggcgagcgcaaccccuacgagaacauccucuacaagaucugccucuccggcgacggcuggcccuacaucgccucccgcaccuccaucgucggccgcgccugggagaacaccaccgucgaccucgaguccgacggcaagccccagaaggucggcaccgccggcuccaacaagucccuccaguccgccggcuuccccaccggccucaccuacucccagcucaugacccucaaggacuccaugaugcagcucgaccccuccgccaagaccuggaucgacaucgagggccgccccgaggaccccgucgagaucgcccucuaccagcccgucuccggcugcuacauccacuucuuccgcgagcccaccgaccucaagcaguucaagcaggacgccaaguacucccacggcaucgacgucgccgaccucuuccccgcccagcccggccucaccuccgccgucaucgaggcccucccccgcaacaugguccucaccugccagggcuccgacgacaucaagcgccuccucgacucccagggccgccgcgacaucaagcucaucgacaucgcccucuccaaggccgacucccgccgcuucgagaacgccgucugggaccagugcaaggaccucugccacaugcacaccggcgucgucgucgagaagaagaagcgcggcggcaaggaggagaucaccccccacugcgcccucauggacugcaucauguacgacgccgccgucuccggcggccucaacauccccguccuccgcgccguccucccccgcgacauggucuuccgcaccuccucccccaaggucguccucugaggacuagucccuguucccagagcccacuuuuuuuucuuuuuuugaaauaaaauagccugucuuucagaucuaaaaaaaaaaaaaaaaaaaaaaaaaaaaaaaaaaaaaaaaaaaaaaaaaaaaaaaaaaaaaaaaugcaucccccccccccccccccccccccccccccccaaaggcucuuuucagagccaccagaauu

SEQ ID NO: 9891 - RNA, 1986 nt, Artificial Sequence
  mRNA product Design a-1 comprising derived and/or modified sequence from LASV(LASV221-NIG-2010;Clade II)__AIT17625__NP (opt2)
gggagagucccgcagucggcguccagcggcucugcuuguucgugugugugucguugcaggccuuauucaagcuuaccauguccgccuccaaggaggucaaguccuuccucuggacccagucccuccgccgcgagcucuccggcuacugcuccuccaucaagcuccaggucgucaaggacgcccaggcccuccuccacggccucgacuucuccgaggucuccaacguccagcgccucaugcgcaagcagcgccgcgacgacuccgaccucaagcgccuccgcgaccucaaccaggccgucaacaaccucgucgagcucaaguccacccagcagaaguccauccuccgcgucggcacccucaccuccgacgaccuccucacccucgccgccgaccucgagaagcucaaguccaaggucauccgcaccgagcgcccccucuccuccggcgucuacaugggcaaccucuccacccagcagcucgagcagcgccgcgcccuccucaacaugaucggcauggucggcggcgcccagggcacccagcccggccgcgacggcgucguccgcgucugggacgucaagaaccccgaccuccucaacaaccaguucggcaccaugcccucccucacccucgccugccucaccaagcagggccaggucgaccucaacgacgccguccucgcccucaccgaccucggccucaucuacaccgccaaguaccccaacuccuccgaccucgaccgccucucccagucccaccccauccucaacauggucgacaccaagaaguccucccucaacaucuccggcuacaacuucucccucggcgccgccgucaaggccggcgccugcaugcucgacggcggcaacaugcucgagaccaucaaggucaccccccagaccgucgacggcauccucaaguccauccucaaggucaagcgcucccucggcauguucgucuccgacacccccggcgagcgcaaccccuacgagaacauccucuacaagaucugccucuccggcgacggcuggcccuacaucgccucccgcaccuccaucgucggccgcgccugggagaacaccaccgucgaccucgaguccgacggcaagccccagaaggucggcaccgccggcuccaacaagucccuccaguccgccggcuuccccaccggccucaccuacucccagcucaugacccucaaggacuccaugaugcagcucgaccccuccgccaagaccuggaucgacaucgagggccgccccgaggaccccgucgagaucgcccucuaccagcccauguccggcugcuacauccacuucuuccgcgagcccaccgaccucaagcaguucaagcaggacgccaaguacucccacggcaucgacgucgccgaccucuuccccgcccagcccggccucaccuccgccgucaucgaggcccucccccgcaacaugguccucaccugccagggcuccgacgacaucaagcgccuccucgacucccagggccgccgcgacaucaagcucaucgacaucgcccucuccaaggccgacucccgcaaguucgagaacgccgucugggaccagugcaaggaccucugccacaugcacaccggcgucgucgucgagaagaagaagcgcggcggcaaggaggagaucaccccccacugcgcccucauggacugcaucauguacgacgccgccgucuccggcggccucaacauccccguccuccgcgccguccucccccgcgacauggucuuccgcaccuccucccccaaggucguccucugaggacuagucccuguucccagagcccacuuuuuuuucuuuuuuugaaauaaaauagccugucuuucagaucuaaaaaaaaaaaaaaaaaaaaaaaaaaaaaaaaaaaaaaaaaaaaaaaaaaaaaaaaaaaaaaaaugcaucccccccccccccccccccccccccccccccaaaggcucuuuucagagccaccagaauu

SEQ ID NO: 9892 - RNA, 1986 nt, Artificial Sequence
  mRNA product Design a-1 comprising derived and/or modified sequence from LASV(LASV237-NIG-2010;Clade II)__AIT17639__NP (opt2)
gggagagucccgcagucggcguccagcggcucugcuuguucgugugugugucguugcaggccuuauucaagcuuaccauguccgccuccaaggaggucaaguccuuccucuggacccagucccuccgccgcgagcucuccggcuacugcuccaacaucaagcuccaggucgucaaggacgcccaggcccuccuccacggccucgacuucuccgaggucuccaacguccagcgccucaugcgcaagcagaagcgcgacgacuccgaccucaagcgccuccgcgaccucaaccaggccgucaacaaccucgucgagcucaaguccacccagcagaaguccauccuccgcgucggcacccucaccuccgacgaccuccucacccucgccgccgaccucgagaagcucaaguccaaggucauccgcaccgagcgcccccucuccuccggcgucuacaugggcaaccucuccacccagcagcucgagcagcgccgcgcccuccucaacaugaucggcauggucggcggcgcccagggcacccagcccggccgcgacggcgucguccgcgucugggacgucaagaaccccgaccuccucaacaaccaguucggcaccaugcccucccucacccucgccugccucaccaagcagggccaggucgaccucaacgacgccguccucgcccucaccgaccucggccucaucuacaccgccaaguaccccaacuccuccgaccucgaccgccucucccagucccaccccauccucaacauggucgacaucaagaaguccucccucaacaucuccggcuacaacuucucccucggcgccgccgucaaggccggcgccugcaugcucgacggcggcaacaugcucgagaccaucaaggucaccccccagaccauggacggcauccucaaguccauccucaaggucaagcgcucccucggcauguucgucuccgacacccccggcgagcgcaaccccuacgagaacauccucuacaagaucugccucuccggcgacggcuggcccuacaucgccucccgcaccuccaucgucggccgcgccugggagaacaccaccgucgaccucgaguccgacggcaagccccagaaggucggcuccgccggcuccaacaagucccuccaguccgccggcuuccccaccggccucaccuacucccagcucaugacccucaaggacuccaugaugcagcucgaccccuccgccaagaccuggaucgacaucgagggccgccccgaggaccccgucgagaucgcccucuaccagcccauguccggcugcuacauccacuucuuccgcgagcccaccgaccucaagcaguucaagcaggacgccaaguacucccacggcaucgacgucgccgaccucuuccccgcccagcccggccucaccuccgccgucaucgaggcccucccccgcaacaugguccucaccugccagggcuccgacgacaucaagcgccuccucgacucccagggccgccgcgacaucaagcucaucgacaucgcccucuccaaggccgacucccgccgcuucgagaacgccgucugggaccagugcaaggaccucugccacaugcacaccggcgucgucgucgagaagaagaagcgcggcggcaaggaggagaucaccccccacugcgcccucauggacugcaucauguacgacgccgccgucuccggcggccucaacauccccguccuccgcgccguccucccccgcgacauggucuuccgcaccuccucccccaaggucguccucugaggacuagucccuguucccagagcccacuuuuuuuucuuuuuuugaaauaaaauagccugucuuucagaucuaaaaaaaaaaaaaaaaaaaaaaaaaaaaaaaaaaaaaaaaaaaaaaaaaaaaaaaaaaaaaaaaugcaucccccccccccccccccccccccccccccccaaaggcucuuuucagagccaccagaauu

SEQ ID NO: 9893 - RNA, 1986 nt, Artificial Sequence
  mRNA product Design a-1 comprising derived and/or modified sequence from LASV(LASV253-NIG-2011;Clade II)__AIT17671__NP (opt2)
gggagagucccgcagucggcguccagcggcucugcuuguucgugugugugucguugcaggccuuauucaagcuuaccauguccgccuccaaggaggucaaguccuuccucuggacccagucccuccgccgcgagcucuccggcuacugcuccuccaucaagcuccaggucgucaaggacgcccaggcccuccuccacggccucgacuucuccgaggucuccaacguccagcgccucaugcgcaagcagaagcgcgacgacuccgaccucaagcgccuccgcgaccucaaccaggccgucaacaaccucgucgagcucaaguccacccagcagaaguccguccuccgcgucggcacccucaccuccgacgaccuccucacccucgccgccgaccucgagaagcucaaguccaaggucauccgcaccgagcgcccccucuccuccggcgucuacaugggcaaccucuccacccagcagcucgagcagcgccgcgcccuccucaacaugaucggcauggucggcggcgcccagggcacccagcccggccgcgacggcgucguccgcgucugggacgucaagaaccccgaccuccucaacaaccaguucggcaccaugcccucccucacccucgccugccucaccaagcagggccaggucgaccucaacgacgucguccucgcccucaccgaccucggccucaucuacaccgccaaguaccccaacuccuccgaccucgaccgccucucccagucccaccccauccucaacauggucgacaccaagaaguccucccucaacaucuccggcuacaacuucucccucggcgccgccgucaaggccggcgccugcaugcucgacggcggcaacaugcucgagaccaucaaggucaccccccagaccauggacggcauccucaaguccauccucaaggucaagaagucccucggcauguucgucuccgacacccccggcgagcgcaaccccuacgagaacauccucuacaagaucugccucuccggcgacggcuggcccuacaucgccucccgcaccuccaucgucggccgcgccugggagaacaccaccgucgaccucgaguccgacggcaagccccagaaggucggcaccgccggcuccaacaagucccuccaguccgccggcuuccccaccggccucaccuacucccagcucaugacccucaaggacuccaugaugcagcucgaccccuccgccaagaccuggaucgacaucgagggccgccccgaggaccccgucgagaucgcccucuaccagcccauguccggcugcuacauccacuucuuccgcgagcccaccgaccucaagcaguucaagcaggacgccaaguacucccacggcaucgacgucaccgaccucuuccccgcccagcccggccucaccuccgccgucaucgaggcccucccccgcaacaugguccucaccugccagggcuccgacgacaucaagcgccuccucgacucccagggccgccgcgacaucaagcucaucgacaucgcccucuccaaggccgacucccgccgcuucgagaacgccgucugggaccagugcaaggaccucugccacaugcacaccggcgucgucgucgagaagaagaagcgcggcggcaaggaggagaucaccccccacugcgcccucauggacugcaucauguacgacgccgccgucuccggcggccucaacauccccguccuccgcgccguccucccccgcgacauggucuuccgcaccuccucccccaaggucguccucugaggacuagucccuguucccagagcccacuuuuuuuucuuuuuuugaaauaaaauagccugucuuucagaucuaaaaaaaaaaaaaaaaaaaaaaaaaaaaaaaaaaaaaaaaaaaaaaaaaaaaaaaaaaaaaaaaugcaucccccccccccccccccccccccccccccccaaaggcucuuuucagagccaccagaauu

SEQ ID NO: 9894 - RNA, 1986 nt, Artificial Sequence
  mRNA product Design a-1 comprising derived and/or modified sequence from LASV(LASV254-NIG-2011;Clade II)__AIT17675__NP (opt2)
gggagagucccgcagucggcguccagcggcucugcuuguucgugugugugucguugcaggccuuauucaagcuuaccauguccgccuccaaggaggucaaguccuuccucuggacccagucccuccgccgcgagcucuccggcuacugcuccuccaucaagcuccaggucgucaaggacgcccaggcccuccuccacggccucgacuucuccgaggucuccaacguccagcgccucaugcgcaagcagaagcgcgacgacuccgaccucaagcgccuccgcgaccucaaccaggccgucaacaaccucgucgagcucaaguccacccagcagaaguccguccuccgcgucggcacccucaccuccgacgaccuccucacccucgccgccgaccucgagaagcucaaguccaaggucauccgcaccgagcgcccccucuccuccggcgucuacaugggcaaccucuccacccagcagcucgagcagcgccgcgcccuccucaacaugaucggcauggucggcggcgcccagggcacccagcccggccgcgacggcgucguccgcgucugggacgucaagaaccccgaccuccucaacaaccaguucggcaccaugcccucccucacccucgccugccucaccaagcagggccaggucgaccucaacgacgccguccucgcccucaccgaccucggccucaucuacaccgccaaguaccccaacuccuccgaccucgaccgccucucccagucccaccccauccucaacauggucgacaccaagaaguccucccucaacaucuccggcuacaacuucucccucggcgccgccgucaaggccggcgccugcaugcucgacggcggcaacaugcucgagaccaucaaggucaccccccagaccauggacggcauccucaaguccauccucaaggucaagaagucccucggcauguucgucuccgacacccccggcgagcgcaaccccuacgagaacauccucuacaagaucugccucuccggcgacggcuggcccuacaucgccucccgcaccuccaucgucggccgcgccugggagaacaccaucgucgaccucgaguccgacggcaagccccagaaggucggcaccgccggcuccaacaagucccuccaguccgccggcuuccccaccggccucaccuacucccagcucaugacccucaaggacuccaugaugcagcucgaccccuccgccaagaccuggaucgacaucgagggccgccccgaggaccccgucgagaucgcccucuaccagcccauguccggcugcuacauccacuucuuccgcgagcccaccgaccucaagcaguucaagcaggacgccaaguacucccacggcaucgacgucgccgaccucuuccccgcccagcccggccucaccuccgccgucaucgaggcccucccccgcaacaugguccucaccugccagggcuccgacgacaucaagcgccuccucgacucccagggccgccgcgacaucaagcucaucgacaucgcccucuccaaggccgacucccgccgcuucgagaacgccgucugggaccagugcaaggaccucugccacaugcacaccggcgucgucgucgagaagaagaagcgcggcggcaaggaggagaucaccccccacugcgcccucauggacugcaucauguacgacgccgccgucuccggcggccucaacauccccguccuccgcgccguccucccccgcgacauggucuuccgcaccuccucccccaaggucguccucugaggacuagucccuguucccagagcccacuuuuuuuucuuuuuuugaaauaaaauagccugucuuucagaucuaaaaaaaaaaaaaaaaaaaaaaaaaaaaaaaaaaaaaaaaaaaaaaaaaaaaaaaaaaaaaaaaugcaucccccccccccccccccccccccccccccccaaaggcucuuuucagagccaccagaauu

SEQ ID NO: 9895 - RNA, 1986 nt, Artificial Sequence
  mRNA product Design a-1 comprising derived and/or modified sequence from LASV(Nig08-04;Clade II)__ADU56611__NP (opt2)
gggagagucccgcagucggcguccagcggcucugcuuguucgugugugugucguugcaggccuuauucaagcuuaccauguccgccuccaaggaggucaaguccuuccucuggacccagucccuccgccgcgagcucuccggcuacugcuccaacaucaagcuccaggucgucaaggacgcccaggcccuccuccacggccucgacuucuccgaggucuccaacguccagcgccucaugcgcaagcagaagcgcgacgacggcgaccucaagcgccuccgcgaccucaaccaggccgucaacaaccucgucgagcucaaguccacccagcagaaguccguccuccgcgucggcacccucaccuccgacgaccuccucacccucgccgccgaccucgagaagcucaaguccaaggucauccgcaccgagcgcccccucuccuccggcgucuacaugggcaaccucuccacccagcagcucgagcagcgcaaggcccuccucuccaugaucggcauggucggcggcgcccagggcacccagcccggccgcgacggcgucguccgcgucugggacgucaagaaccccgaccuccucaacaaccaguucggcaccaugcccucccucacccucgccugccucaccaagcagggccaggucgaccucaacgacgccguccucgcccucaccgaccucggccucaucuacaccgccaaguaccccaacuccuccgaccucgaccgccucucccagucccaccccauccucaacauggucgacaccaagaaguccucccucaacaucuccggcuacaacuucucccucggcgccgccgucaaggccggcgccugcaugcucgacggcggcaacaugcucgagaccaucaaggucaccccccagaccauggacggcauccucaaguccauccucaaggucaagcgcucccucggcauguucgucuccgacacccccggcgagcgcaaccccuacgagaacauccucuacaagaucugccucuccggcgacggcuggcccuacaucgccucccgcaccuccaucgucggccgcgccugggagaacaccaccgucgaccucgaguccgacggcaagccccagaaggucggcaccgccggcuccaacaagucccuccaguccgccggcuuccccaccggccucaccuacucccagcucaugacccucaaggacuccaugaugcagcucgaccccuccgccaagaccuggaucgacaucgagggccgccccgaggaccccgucgagaucgcccucuaccagcccauguccggcugcuacauccacuucuuccgcgagcccaccgaccucaagcaguucaagcaggacgccaaguacucccacggcaucgacgucaccgaccucuucuccgcccagcccggccucaccuccgccgucaucgaggcccucccccgcaacaugguccucaccugccagggcuccgacgacaucaagaagcuccucgacucccagggccgccgcgacaucaagcucaucgacaucucccucaacaaggccgacucccgccgcuucgagaacgccgucugggaccagugcaaggaccucugccacaugcacaccggcgucgucgucgagaagaagaagcgcggcggcaaggaggagaucaccccccacugcgcccucauggacugcaucauguucgacgccgccgucuccggcggccucaacauccccauccuccgcgccguccucccccgcgacauggucuuccgcaccuccucccccaaggucguccucugaggacuagucccuguucccagagcccacuuuuuuuucuuuuuuugaaauaaaauagccugucuuucagaucuaaaaaaaaaaaaaaaaaaaaaaaaaaaaaaaaaaaaaaaaaaaaaaaaaaaaaaaaaaaaaaaaugcaucccccccccccccccccccccccccccccccaaaggcucuuuucagagccaccagaauu

SEQ ID NO: 9896 - RNA, 1989 nt, Artificial Sequence
  mRNA product Design a-1 comprising derived and/or modified sequence from LASV(GA391;Clade III)__AAA46284__NP (opt2)
gggagagucccgcagucggcguccagcggcucugcuuguucgugugugugucguugcaggccuuauucaagcuuaccauguccgccuccaaggagguccgcuccugccucuggacccagucccuccgccgcgagcucuccggcuacugcuccaacaucaagcuccaggucgucaaggacgcccaggcccuccuccacggccucgacuucuccgaggucuccaacguccagcgccucaugcgcaagcagaagcgcgacgacggcgaccucaagcgccuccgcgaccucaaccaggccgucaacaaccucgucgagcucaaguccacccagcagaaguccguccuccgcgucggcacccucuccuccgacgaccuccucauccucgccgccgaccucgagaagcucaaguccaaggucacccgcaccgagcgcccccucuccuccggcgucuacaugggcaaccucuccucccagcagcucgaccagcgccgcgcccuccucaacaugaucggcaugaccggcgucuccggcggcggcaagggcgccuccaacggcaucguccgcgucugggacgucaagaacgccgagcuccucaacaaccaguucggcaccaugcccucccucacccucgccugccucaccaagcagggccaggucgaccucaacgacgccguccaggcccucaccgaccucggccucaucuacaccgccaaguaccccaacuccuccgaccucgaccgccucucccagucccaccccauccucaacaugaucgacaccaagaaguccucccucaacaucuccggcuacaacuucucccucggcgccgccgucaaggccggcgccugcaugcucgacggcggcaacaugcucgagaccaucaaggucuccccccagaccauggacggcauccucaaguccauccucaaggucaagaagucccucggcauguucgucuccgacacccccggcgagcgcaaccccuacgagaacauccucuacaagaucugccucuccggcgacggcugguccuacaucgccucccgcaccuccaucgucggccgcgccugggagaacaccgucgucgaccucgagcaggacaacaagccccagaagaucggcaacggcggcuccaacaagucccuccaguccgccggcuucgccgccggccucaucuacucccagcucaugacccucaaggacuucaagugcuucaaccucauccccaacgccaagaccuggauggacaucgagggccgccccgaggaccccgucgagaucgcccucuaccagcccuccuccggcugcuacguccacuucuuccgcgagcccaccgaccucaagcaguucaagcaggacgccaaguacucccacggccgcgacgucaccgaccucuucgccgcccagcccggccucaccuccgccgucaucgaggcccucccccgcaacauggucaucaccugccagggcuccgaggacauccgcaagcuccucgagucccagggccgccgcgacaucaagcucaucgacaucacccucuccaaggccgacucccgcaaguucgagaacgccgucugggaccaguucaaggaccucugccacaugcacaccggcgucgucgucgagaagaagaagcgcggcggcaaggaggagaucaccccccacugcgcccucauggacugcaucauguucgacgccgccgucuccggcggccucgacgccaagguccuccgcgucguccucccccgcgacauggucuuccgcaccuccacccccaaggucguccucugaggacuagucccuguucccagagcccacuuuuuuuucuuuuuuugaaauaaaauagccugucuuucagaucuaaaaaaaaaaaaaaaaaaaaaaaaaaaaaaaaaaaaaaaaaaaaaaaaaaaaaaaaaaaaaaaaugcaucccccccccccccccccccccccccccccccaaaggcucuuuucagagccaccagaauu

SEQ ID NO: 9897 - RNA, 1986 nt, Artificial Sequence
  mRNA product Design a-1 comprising derived and/or modified sequence from LASV(Nig08-A19;Clade III)__ADU56619__NP (opt2)
gggagagucccgcagucggcguccagcggcucugcuuguucgugugugugucguugcaggccuuauucaagcuuaccauguccgccuccaaggaggucaaguccuuccucuggacccagucccuccgccgcgagcucuccggcuacugcuccaacaucaagcuccaggucgucaaggacgcccaggcccuccuccacggccucgacuucuccgaggucuccaacguccagcgccucaugcgcaagcagaagcgcgacgacggcgaccucaagcgccuccgcgaccucaaccaggccgucaacaaccucgucgagcucaaguccacccagcagaaguccguccuccgcgucggcacccucuccuccgacgaccuccucguccucgccgccgaccucgagaagcucaaguccaaggucguccgcaccgagcgcccccucuccuccggcaucuacaugggcaaccucuccucccagcagcucgaccagcgcaaggcccuccucaacaugaucggcaugaccggcggcaacggcggccgcaacaccaccuccgacggcaucguccgcgucugggacgucaagaacgccgagcuccucaacaaccaguucggcaccaugcccucccucacccucgccugccucaccaagcagggccaggucgaccucaacgacgccguccaggcccucaccgaccucggccucaucuacaccgccaaguaccccaacuccuccgaccucgaccgccucgcccagucccaccccauccucaacaugaucgacaccaagaaguccucccucaacaucuccggcuacaacuucucccucggcgccgccgucaaggccggcgccugcaugcucgacggcggcaacaugcucgagaccaucaaggucuccccccagaccauggacggcauccucaaguccauccucaaggucaagcgcucccucggcauguucaucuccgacacccccggcgagcgcaaccccuacgagaacauccucuacaagaucugccucuccggcgacggcuggcccuacaucgccucccgcaccuccaucgucggccgcgccugggagaacaccgucgucgaccucgaguccgacaacaagccccagaagaccggcaacggcggcuccaacaagucccuccaguccgccggcuucgccgccggccucaccuacucccagcucaugacccucaaggacuccaugcuccagcucgaccccaacgccaagaccuggauggacaucgagggccgccccgaggaccccgucgagaucgcccucuaccagcccuccuccggcugcuacauccacuucuuccgcgagcccaccgaccucaagcaguucaagcaggacgccaaguacucccacggcaucgacgucaccgaccucuucgccgcccagcccggccucaccuccgccgucaucgaggcccucccccgcaacauggucaucaccugccagggcuccgaggacauccgcaagcuccucgagucccagggccgccgcgacaucaagcucaucgacaucucccucuccaaggucgacucccgcaaguucgagaacgccgucugggaccaguucaaggaccucugccacaugcacaccggcaucgucgucgagaagaagaagcgcggcggcaaggaggagaucaccccccacugcgcccucauggacugcaucauguucgacgccgccgucuccggcggcgucgacgccaagguccuccgcgccguccucccccgcgacauggucuuccgcaccuccacccccaaggucguccucugaggacuagucccuguucccagagcccacuuuuuuuucuuuuuuugaaauaaaauagccugucuuucagaucuaaaaaaaaaaaaaaaaaaaaaaaaaaaaaaaaaaaaaaaaaaaaaaaaaaaaaaaaaaaaaaaaugcaucccccccccccccccccccccccccccccccaaaggcucuuuucagagccaccagaauu

SEQ ID NO: 9898 - RNA, 1986 nt, Artificial Sequence
  mRNA product Design a-1 comprising derived and/or modified sequence from LASV(G1180-SLE-2010;Clade IV)__AIT17169__NP (opt2)
gggagagucccgcagucggcguccagcggcucugcuuguucgugugugugucguugcaggccuuauucaagcuuaccauguccgccuccaaggagaucaaguccuuccucuggacccagucccuccgccgcgagcucuccggcuacugcuccaacaucaagcuccaggucgucaaggacgcccaggcccuccuccacggccucgacuucuccgaggucuccaacguccagcgccucaugcgcaaggagcgccgcgacgacaacgaccucaagcgccuccgcgaccucaaccaggccgucaacaaccucgucgagcucaaguccacccagcagaaguccauccuccgcgucggcacccucaccuccgacgaccuccucauccucgccgccgaccucgagaagcucaaguccaaggucauccgcaccgagcgcccccucuccgccggcgucuacaugggcaaccucuccucccagcagcucgaccagcgccgcgcccuccucuccaugaucggcauguccuccggcaaccagcgcgcccaggccggccgcgacggcgucguccgcgucugggacgucaagaacgucgagcuccucaacaaccaguucggcaccaugcccucccucacccucgccugccucaccaagcagggccaggucgaccucaacgacgccguccaggcccucaccgaccucggccucaucuacaccgccaaguaccccaacaccuccgaccucgaccgccucacccagucccaccccauccucaacaugaucgacaccaagaaguccucccucaacaucuccggcuacaacuucucccucggcgccgccgucaaggccggcgccugcaugcucgacggcggcaacaugcucgagaccaucaaggucuccccccagaccauggacggcauccucaaguccauccucaaggucaagaaggcccucggcauguucaucuccgacacccccggcgagcgcaaccccuacgagaacauccucuacaagaucugccucuccggcgacggcuggcccuacaucgccucccgcaccuccaucaccggccgcgccugggagaacaccgucgucgaccucgaguccgacggcaagccccagaaggccggcuccaacaacuccaacaagucccuccaguccgucggcuucaccgccggccucaccuacucccagcucaugacccucaaggacgccaugcuccagcucgaccccaacgccaagaccuggauggacaucgagggccgccccgaggaccccgucgagaucgcccucuaccagcccuccuccggcugcuacauccacuucuuccgcgagcccaccgaccucaagcaguucaagcaggacgccaaguacucccacggcaucgacgucaccgaccucuucgccgcccagcccggccucaccuccgccgucaucgacgcccucccccgcaacauggucaucaccugccagggcuccgacgacauccgcaagcuccucgagucccagggccgcaaggacaucaagcucaucgacaucgcccucuccaagaccgacucccgcaaguacgagaacgccgucugggaccaguacaaggaccucugccacaugcacaccggcgucgucgucgagaagaagaagcgcggcggcaaggaggagaucaccccccacugcgcccucauggacugcaucauguucgacgccgccgucuccggcggccucaacaccuccguccuccgcgccguccucccccgcgacauggucuuccgcaccuccaccccccgcgucguccucugaggacuagucccuguucccagagcccacuuuuuuuucuuuuuuugaaauaaaauagccugucuuucagaucuaaaaaaaaaaaaaaaaaaaaaaaaaaaaaaaaaaaaaaaaaaaaaaaaaaaaaaaaaaaaaaaaugcaucccccccccccccccccccccccccccccccaaaggcucuuuucagagccaccagaauu

SEQ ID NO: 9899 - RNA, 1986 nt, Artificial Sequence
  mRNA product Design a-1 comprising derived and/or modified sequence from LASV(G1442-SLE-2011;Clade IV)__AIT17181__NP (opt2)
gggagagucccgcagucggcguccagcggcucugcuuguucgugugugugucguugcaggccuuauucaagcuuaccauguccgccuccaaggaggucaaguccuuccucuggacccagucccuccgccgcgagcucuccggcuacugcuccaacaucaagcuccaggucgucaaggacgcccaggcccuccuccacggccucgacuucuccgaggucuccaacguccagcgccucaugcgcaagcagcgccgcgacgacaacgaccucaagcgccuccgcgaccucaaccaggccgucaacaaccucgucgagcucaaguccacccagcagaaguccguccuccgcgucggcacccucaccuccgacgaccuccucguccucgccgccgaccucgagaagcucaaguccaaggucauccgcaccgagcgcccccucuccgccggcgucuacaugggcaaccucuccucccagcagcucgaccagcgccgcgcccuccucaacaugaucggcauguccggcggcauccagggcacccgcaccggccgcgacggcgucguccgcgucugggacgucaagaacgccgaccuccucaacaaccaguucggcaccaugcccucccucacccucgccugccucaccaagcagggccaggucgaccucaacgacgucguccaggcccucaccgaccucggccucaucuacaccgccaaguaccccaacgccuccgaccucgaccgccucacccagucccaccccauccucaacaugaucgacaccaagaaguccucccucaacaucuccggcuacaacuucucccucggcgccgccgucaaggccggcgccugcaugcucgacggcggcaacaugcucgagaccaucaaggucuccccccagaccauggacggcauccucaaguccauccucaaggucaagaagacccucggcauguucaucuccgacacccccggcgagcgcaaccccuacgagaacauccucuacaagaucugccucuccggcgacggcuggcccuacaucgccucccgcaccuccaucaccggccgcgccugggagaacaccgucgucgaccucgaguccgacggcaagccccagaaggccggcuccaacaacuccaacaagucccuccaguccgccggcuucgccgccggccucaccuacucccagcucaugacccucaaggacgccaugcuccagcucgaccccaacgccaagaccuggauggacaucgagggccgccccgaggaccccgucgagaucgcccucuaccagcccuccuccggcugcuacauccacuucuuccgcgagcccaccgaccucaagcaguucaagcaggacgccaaguacucccacggcaucgacgucaccgaccucuucgccgcccagcccggccucaccuccgccgucaucgaggcccucccccgcaacauggucaucaccugccagggcuccgacgacaucaagaagcuccucgagucccagggccgcaaggacaucaagcucaucgacaucgcccucuccaagaccgacucccgcaaguacgagaacgccgucugggaccaguacaaggaccucugccacaugcacaccggcgucgucgucgagaagaagaagcgcggcggcaaggaggagaucaccccccacugcgcccucauggacugcaucauguucgacgccgccgucuccggcggccucaacacccucguccuccgcgccguccucccccgcgacauggucuuccgcaccuccaccccccgcgucguccucugaggacuagucccuguucccagagcccacuuuuuuuucuuuuuuugaaauaaaauagccugucuuucagaucuaaaaaaaaaaaaaaaaaaaaaaaaaaaaaaaaaaaaaaaaaaaaaaaaaaaaaaaaaaaaaaaaugcaucccccccccccccccccccccccccccccccaaaggcucuuuucagagccaccagaauu

SEQ ID NO: 9900 - RNA, 1986 nt, Artificial Sequence
  mRNA product Design a-1 comprising derived and/or modified sequence from LASV(G3010-SLE-2013;Clade IV)__AIT17345__NP (opt2)
gggagagucccgcagucggcguccagcggcucugcuuguucgugugugugucguugcaggccuuauucaagcuuaccauguccgccuccaaggagaucaaguccuuccucuggacccagucccuccgccgcgagcucuccggcuacugcuccaacaucaagcuccaggucgucaaggacgcccaggcccuccuccacggccucgacuucuccgaggucuccaacguccagcgccucaugcgcaaggagcgccgcgacgacaacgaccucaagcgccuccgcgaccucaaccaggccgucaacaaccucgucgagcucaaguccacccagcagaaguccauccuccgcgucggcacccucaccuccgacgaccuccucauccucgccgccgaccucgagaagcucaaguccaaggucacccgcaccgagcgcccccucuccgccggcgucuacaugggcaaccucuccucccagcagcucgaccagcgccgcgcccuccucuccaugaucggcauguccuccggcguccagggcgcccgcgccggccgcgacggcgucguccgcgucugggacgucaagaacgccgagcuccucaacaaccaguucggcaccaugcccucccucacccucgccugccucaccaagcagggccaggucgaccucaacgacgucguccaggcccucaccgaccucggccucaucuacaccgccaaguaccccaacaccuccgaccucgaccgccucacccagucccaccccauccucaacaugaucgacaccaagaaguccucccucaacaucuccggcuacaacuucucccucggcgccgccgucaaggccggcgccugcaugcucgacggcggcaacaugcucgagaccaucaaggucuccccccagaccauggacggcauccucaaguccauccucaaggucaagaaggcccucggcauguucaucuccgagacccccggcgagcgcaaccccuacgagaacauccucuacaagaucugccucuccggcgacggcuggcccuacaucgccucccgcaccuccaucaccggccgcgccugggagaacaccgucgucgaccucgaguccgacggcaagccccagaaggccggcuccaacaacuccaacaagucccuccaguccgccggcuucaccgccggccucaccuacucccagcucaugacccucaaggacgccaugcuccagcucgaccccaacgccaagaccuggauggacaucgagggccgccccgaggaccccgucgaggucgcccucuaccagcccuccuccggcugcuacauccacuucuuccgcgagcccaccgaccucaagcaguucaagcaggacgccaaguacucccacggcaucgacgucaccgaccucuucgccgcccagcccggccucaccuccgccgucaucgacgcccucccccgcaacauggucaucaccugccagggcuccgacgacaucaagaagcuccucgagucccagggccgcaaggacaucaagcucaucgacaucgcccucuccaagaccgacucccgcaaguacgagaacgccgucugggaccaguacaaggaccucugccacaugcacaccggcgucgucgucgagaagaagaagcgcggcggcaaggaggagaucaccccccacugcgcccucauggacugcaucauguucgacgccgccgucuccggcggccucaacaccuccguccuccgcgccguccucccccgcgacauggucuuccgcaccuccaccccccgcgucguccucugaggacuagucccuguucccagagcccacuuuuuuuucuuuuuuugaaauaaaauagccugucuuucagaucuaaaaaaaaaaaaaaaaaaaaaaaaaaaaaaaaaaaaaaaaaaaaaaaaaaaaaaaaaaaaaaaaugcaucccccccccccccccccccccccccccccccaaaggcucuuuucagagccaccagaauu

SEQ ID NO: 9901 - RNA, 1986 nt, Artificial Sequence
  mRNA product Design a-1 comprising derived and/or modified sequence from LASV(G502-SLE-2009;Clade IV)__AIT17127__NP (opt2)
gggagagucccgcagucggcguccagcggcucugcuuguucgugugugugucguugcaggccuuauucaagcuuaccauguccgccuccaaggagaucaaguccuuccucuggacccagucccuccgccgcgagcucuccggcuacugcuccaacaucaagcuccaggucgucaaggacgcccaggcccuccuccacggccucgacuucuccgaggucuccaacguccagcgccucaugcgcaaggagcgccgcgacgacaacgaccucaagcgccuccgcgaccucaaccaggccgucaacaaccucgucgagcucaaguccacccagcagaaguccauccuccgcgucggcacccucaccuccgacgaccuccucauccucgccgccgaccucgagaagcucaaguccaaggucauccgcaccgagcgcccccucuccgccggcgucuacaugggcaaccucuccucccagcagcucgaccagcgccgcgcccuccucuccaugaucggcauguccggcggcaaccagggcguccgcgccggcaaggacggcgucguccgcgucugggacgucaagaacgccgagcuccucaacaaccaguucggcaccaugcccucccucacccucgccugccucaccaagcagggccaggucgaccucaacgacgccguccaggcccucaccgaccucggccucaucuacaccgccaaguaccccaacaccuccgaccucgaccgccucacccagucccaccccauccucaacaugaucgacaccaagaaguccucccucaacaucuccggcuacaacuucucccucggcgccgccgucaaggccggcgccugcaugcucgacggcggcaacaugcucgagaccaucaaggucuccccccagaccauggacggcauccucaaguccauccucaaggucaagaaggcccucggcauguucaucuccgacacccccggcgagcgcaaccccuacgagaacauccucuacaagaucugccucuccggcgacggcuggcccuacaucgccucccgcaccuccaucaccggccgcgccugggagaacaccgucgucgaccucgaguccgacggcaagccccagaaggccggcuccaacaacuccaacaagucccuccaguccgccggcuucaccgccggccucaccuacucccagcucaugacccucaaggacgccaugcuccagcucgaccccaacaccaagaccuggauggacaucgagggccgccccgaggaccccgucgagaucgcccucuaccagcccuccuccggcugcuacauccacuucuuccgcgagcccaccgaccucaagcaguucaagcaggacgccaaguacucccacggcaucgacgucaccgaccucuucgccgcccagcccggccucaccuccgccgucaucgacgcccucccccgcaacauggucaucaccugccagggcuccgacgacauccgcaagcuccucgagucccagggccgcaaggacaucaagcucaucgacaucgcccucaacaagaccgacucccgcaaguacgagaacgccgucugggaccaguacaaggaccucugccacaugcacaccggcgucgucgucgagaagaagaagcgcggcggcaaggaggagaucaccccccacugcgcccucauggacugcaucauguucgacgccgccgucuccggcggccucaacaccuccguccuccgcgccguccucccccgcgacauggucuuccgcaccuccaccccccgcgucguccucugaggacuagucccuguucccagagcccacuuuuuuuucuuuuuuugaaauaaaauagccugucuuucagaucuaaaaaaaaaaaaaaaaaaaaaaaaaaaaaaaaaaaaaaaaaaaaaaaaaaaaaaaaaaaaaaaaugcaucccccccccccccccccccccccccccccccaaaggcucuuuucagagccaccagaauu

SEQ ID NO: 9902 - RNA, 1986 nt, Artificial Sequence
  mRNA product Design a-1 comprising derived and/or modified sequence from LASV(G733-SLE-2010;Clade IV)__AIT17155__NP (opt2)
gggagagucccgcagucggcguccagcggcucugcuuguucgugugugugucguugcaggccuuauucaagcuuaccauguccgccuccaaggagaucaaguccuuccucuggacccagucccuccgccgcgagcucuccggcuacugcuccaacaucaagcuccaggucgucaaggacgcccaggcccuccuccacggccucgacuucuccgaggucuccaacguccagcgccucaugcgcaaggagcgccgcgacgacaacgaccucaagcgccuccgcgaccucaaccaggccgucaacaaccucgucgagcucaaguccacccagcagaaguccguccuccgcgucggcacccucaccuccgacgagcuccucguccucgccgccgaccucgagaagcucaaguccaaggucauccgcaccgagcgcccccucuccgccggcgucuacaugggcaaccucuccucccagcagcucgaccagcgccgcgcccuccucuccaugaucggcauguccggcggcaaccagggcgcccgcaccggccgcgacggcgucguccgcgucugggacgucaagaacgccgagcuccucaacaaccaguucggcaccaugcccucccucacccucgccugccucaccaagcagggccaggucgaccucaacgacgccguccaggcccucaccgaccucggccucaucuacaccgccaaguaccccaacaccuccgaccucgaccgccucacccagucccaccccauccucaacaugaucgacaccaagaaguccucccucaacaucuccggcuacaacuucucccucggcgccgccgucaaggccggcgccugcaugcucgacggcggcaacaugcucgagaccaucaaggucuccccccagaccauggacggcauccucaaguccauccucaaggucaagaaggcccucggcauguucaucuccgacacccccggcgagcgcaaccccuacgagaacauccucuacaagaucugccucuccggcgacggcuggcccuacaucgccucccgcaccuccaucaccggccgcgccugggagaacaccgucgucgaccucgaguccgacggcaagccccagaaggccggcuccaacaacuccaacaagucccuccaguccgccggcuucaccgccggccucaccuacucccagcucaugacccucaaggacgccaugcuccagcucgaccccaacgccaagaccuggauggacaucgagggccgccccgaggaccccgucgagaucgcccucuaccagcccuccuccggcugcuacauccacuucuuccgcgagcccaccgaccucaagcaguucaagcaggacgccaaguacucccacggcaucgacgucaccgaccucuucgccgcccagcccggccucaccuccgccgucaucgacgcccucccccgcaacauggucaucaccugccagggcuccgacgacauccgcaagcuccucgagucccagggccgcaaggacaucaagcucaucgacaucgcccucuccaagaucgacucccgcaaguacgagaacgccgucugggaccaguacaaggaccucugccacaugcacaccggcgucgucgucgagaagaagaagcgcggcggcaaggaggagaucaccccccacugcgcccucauggacugcaucauguucgacgccgccgucuccggcggccucaacucccucguccuccgcgccguccucccccgcgacauggucuuccgcaccuccaccccccgcgucguccucugaggacuagucccuguucccagagcccacuuuuuuuucuuuuuuugaaauaaaauagccugucuuucagaucuaaaaaaaaaaaaaaaaaaaaaaaaaaaaaaaaaaaaaaaaaaaaaaaaaaaaaaaaaaaaaaaaugcaucccccccccccccccccccccccccccccccaaaggcucuuuucagagccaccagaauu

SEQ ID NO: 9903 - RNA, 1986 nt, Artificial Sequence
  mRNA product Design a-1 comprising derived and/or modified sequence from MOPV/LASV reassortant(IGS-1;Clade IV)__AFY05578__NP (opt2)
gggagagucccgcagucggcguccagcggcucugcuuguucgugugugugucguugcaggccuuauucaagcuuaccauguccgccuccaaggagaucaaguccuuccucuggacccagucccuccgccgcgagcucuccggcuacugcuccaacaucaagcuccaggucgucaaggacgcccaggcccuccuccacggccucgacuucuccgaggucuccaacguccagcgccucaugcgcaaggagcgccgcgacgacaacgaccucaagcgccuccgcgaccucaaccaggccgucaacaaccucgucgagcucaaguccacccagcagaaguccauccuccgcgucggcacccucaccuccgacgaccuccucauccucgccgccgaccucgagaagcuccgcuccaaggucauccgcaccgagcgcccccucuccgccggcgucuacaugggcaaccucuccucccagcagcucgaccagcgccgcgcccuccucaacaugaucggcauguccggcggcaaccagggcgcccgcgccggccgcgacggcgucguccgcgucugggacgucaagaacgccgagcuccucuccaaccaguucggcaccaugcccucccucacccucgccugccucaccaagcagggccaggucgaccucaacgacgccguccaggcccucaccgaccucggccucaucuacaccgccaaguaccccaacaccuccgaccucgaccgccucacccagucccaccccauccucaacaugaucgacaccaagaaguccucccucaacaucuccggcuacaacuucucccucggcgccgccgucaaggccggcgccugcaugcucgacggcggcaacaugcucgagaccaucaaggucuccccccagaccauggacggcauccucaaguccauccucaaggucaagaaggcccucggcauguucaucuccgacacccccggcgagcgcaaccccuacgagaacauccucuacaagaucugccucuccggcgacggcuggcccuacaucgccucccgcaccuccaucaccggccgcgccugggagaacaccgucgucgaccucgaguccgacggcaagccccagaaggccgacuccaacaacuccuccaagucccuccaguccgccggcuucaccgccggccucaccuacucccagcucaugacccucaaggacgccaugcuccagcucgaccccaacgccaagaccuggauggacaucgagggccgccccgaggaccccgucgagaucgcccucuaccagcccuccuccggcugcuacauccacuucuuccgcgagcccaccgaccucaagcaguucaagcaggacgccaaguacucccacggcaucgacgucaccgaccucuucgccacccagcccggccucaccuccgccgucaucgacgcccucccccgcaacauggucaucaccugccagggcuccgacgacauccgcaagcuccucgagucccagggccgcaaggacaucaagcucaucgacaucgaccucuccaagaccgacucccgcaaguacgagaacgccgucugggaccaguacaaggaccucugccacaugcacaccggcgucgucgucgagaagaagaagcgcggcggcaaggaggagaucaccccccacugcgcccucauggacugcaucauguucgacgccgccgucuccggcggccucaacaccuccguccuccgcgccguccucccccgcgacauggucuuccgcaccuccaccccccgcgucguccucugaggacuagucccuguucccagagcccacuuuuuuuucuuuuuuugaaauaaaauagccugucuuucagaucuaaaaaaaaaaaaaaaaaaaaaaaaaaaaaaaaaaaaaaaaaaaaaaaaaaaaaaaaaaaaaaaaugcaucccccccccccccccccccccccccccccccaaaggcucuuuucagagccaccagaauu

SEQ ID NO: 9904 - RNA, 1986 nt, Artificial Sequence
  mRNA product Design a-1 comprising derived and/or modified sequence from LASV(LM765-SLE-2012;Clade IV)__AIT17815__NP (opt2)
gggagagucccgcagucggcguccagcggcucugcuuguucgugugugugucguugcaggccuuauucaagcuuaccauguccgccuccaaggagaucaaguccuuccucuggacccagucccuccgccgcgagcucuccggcuacugcuccaacaucaagcuccaggucgucaaggacgcccaggcccuccuccacggccucgacuucuccgaggucuccaacguccagcgccucaugcgcaaggagcgccgcgacgacaacgaccucaagcgccuccgcgaccucaaccaggccgucaacaaccucgucgagcucaaguccacccagcagaaguccauccuccgcgucggcacccucaccuccgacgaccuccucauccucgccgccgaccucgagaagcucaaguccaaggucacccgcaccgagcgcccccucuccgccggcgucuacaugggcaaccucuccucccagcagcucgaccagcgccgcgcccuccucgacaugaucggcauguccggcuccaaccagggcgcccgcgccggccgcgacggcgucguccgcgucugggacgucaagaacgccgagcuccucaacaaccaguucggcaccaugcccucccucacccucgccugccucaccaagcagggccaggucgaccucaacgacgccguccaggcccucaccgaccucggccucaucuacaccgccaaguaccccaacaccuccgaccucgaccgccucacccagucccaccccauccucaacaugaucgacaccaagaaguccucccucaacaucuccggcuacaacuucucccucggcgccgccgucaaggccggcgccugcaugcucgacggcggcaacaugcucgagaccaucaaggucuccccccagaccauggacggcauccucaaguccauccucaaggucaagaaggcccucggcauguucaucuccgacgcccccggcgagcgcaaccccuacgagaacauccucuacaagaucugccucuccggcgacggcuggcccuacaucgccucccgcaccuccaucaccggccgcgccugggagaacaccgucgucgaccucgaguccgacggcaagccccagaaggccggcuccaacggcuccaacaagucccuccaguccgccggcuucaccgccggccucaccuacucccagcucaugacccucaaggacgccaugcuccagcucgaccccaacgccaagaccuggauggacaucgagggccgccccgaggaccccgucgagaucgcccucuaccagcccuccuccggcugcuacauccacuucuuccgcgagcccaccgaccucaagcaguucaagcaggacgccaaguacucccacggcaucgacgucaccgaccucuucgccgcccagcccggccucaccuccgccgucaucgacgcccucccccgcaacauggucaucaccugccagggcuccgacgacauccgcaagcucuucgagucccagggccgcaaggacaucaagcucaucgacaucgcccucuccaagaccgacucccgcaaguacgagaacgccgucugggaccaguacaaggaccucugccacaugcacaccggcaucgucgucgagaagaagaagcgcggcggcaaggaggagaucaccccccacugcgcccucauggacugcaucauguucgacgccgccgucuccggcggccucaacaccuccguccuccgcgccguccucccccgcgacauggucuuccgcaccuccaccccccgcgucguccucugaggacuagucccuguucccagagcccacuuuuuuuucuuuuuuugaaauaaaauagccugucuuucagaucuaaaaaaaaaaaaaaaaaaaaaaaaaaaaaaaaaaaaaaaaaaaaaaaaaaaaaaaaaaaaaaaaugcaucccccccccccccccccccccccccccccccaaaggcucuuuucagagccaccagaauu

SEQ ID NO: 9905 - RNA, 1986 nt, Artificial Sequence
  mRNA product Design a-1 comprising derived and/or modified sequence from LASV(LM776-SLE-2012;Clade IV)__AIT17825__NP (opt2)
gggagagucccgcagucggcguccagcggcucugcuuguucgugugugugucguugcaggccuuauucaagcuuaccauguccgccuccaaggagaucaaguccuuccucuggacccagucccuccgccgcgagcucuccuccuacugcuccaacaucaagcuccaggucgucaaggacgcccaggcccuccuccacggccucgacuucuccgaggucuccaacguccagcgccucaugcgcaaggagcgccgcgacgacaacgaccucaagcgccuccgcgaccucaaccaggccgucaacaaccucgucgagcucaaguccacccagcagaaguccauccuccgcgucggcacccucaccuccgacgaccuccucauccucgccgccgaccucgagaagcucaaguccaaggucacccgcaccgagcgcccccucuccgccggcgucuacaugggcaaccucuccucccagcagcucgaccagcgccgcgcccuccucuccaugaucggcauguccggcuccaaccagggcgcccgcgccggccgcgacggcgucguccgcgucugggacgucaagaacgccgagcuccucaacaaccaguucggcaccaugcccucccucacccucgccugccucaccaagcagggccaggucgaccucaacgacgccguccaggcccucaccgaccucggccucaucuacaccgccaaguaccccaacaccuccgaccucgaccgccucacccagucccaccccauccucaacaugaucgacaccaagaaguccucccucaacaucuccggcuacaacuucucccucggcgccgccgucaaggccggcgccugcaugcucgacggcggcaacaugcucgagaccaucaaggucuccccccagaccauggacggcauccucaaguccauccucaaggucaagaaggcccucggcauguucaucuccgacacccccggcgagcgcaaccccuacgagaacauccucuacaagaucugccucuccggcgacggcuggcccuacaucgccucccgcaccuccaucaccggccgcgccugggagaacaccgucgucgaccucgaguccgacggcaagccccagaaggccggcuccaacaacuccaacaagucccuccaguccgccggcuucaccgccggccucaccuacucccagcucaugacccucaaggacgccaugcuccagcucgaccccaacgccaagaccuggauggacaucgagggccgccccgaggaccccgucgaggucgcccucuaccagcccuccuccggcugcuacauccacuucuuccgcgagcccaccgaccucaagcaguucaagcaggacgccaaguacucccacggcaucgacgucaccgaccucuucgccgcccagcccggccucaccuccgccgucaucgacgcccucccccgcaacauggucaucaccugccagggcuccgacgacauccgcaagcuccucgagucccagggccgcaaggacaucaagcucaucgacaucgcccucuccaagaccgacucccgcaaguacgagaacgccgucugggaccaguacaaggaccucugccacaugcacaccggcgucgucgucgagaagaagaagcgcggcggcaaggaggagaucaccccccacugcgcccucauggacugcaucauguucgacgccgccgucuccggcggccucaacaccuccguccuccgcgccguccucccccgcgacauggucuuccgcaccuccaccccccgcgucguccucugaggacuagucccuguucccagagcccacuuuuuuuucuuuuuuugaaauaaaauagccugucuuucagaucuaaaaaaaaaaaaaaaaaaaaaaaaaaaaaaaaaaaaaaaaaaaaaaaaaaaaaaaaaaaaaaaaugcaucccccccccccccccccccccccccccccccaaaggcucuuuucagagccaccagaauu

SEQ ID NO: 9906 - RNA, 1986 nt, Artificial Sequence
  mRNA product Design a-1 comprising derived and/or modified sequence from LASV(Mad39;Clade IV)__ANH09723__NP (opt2)
gggagagucccgcagucggcguccagcggcucugcuuguucgugugugugucguugcaggccuuauucaagcuuaccauguccgccuccaaggagaucaaguccuuccucuggacccagucccuccgccgcgagcucuccggcuacugcuccaacaucaagcuccaggucgucaaggacgcccaggcccuccuccacggccucgacuucuccgaggucuccaacguccagcgccucaugcgcaagcagcgccgcgacgacaacgaccucaagcgccuccgcgaccucaaccaggccgucaacaaccucgucgagcucaaguccacccagcagaaguccguccuccgcgucggcacccucaccuccgacgaccuccucacccucgccgccgaccucgagaagcucaaguccaaggucacccgcaccgagcgcccccucaccgccggcgucuacaugggcaaccucuccucccagcagcucgaccagcgccgcgcccuccucaacaugaucggcauguccggcggcaaccagggcgcccgcaccggccgcgacggcgucguccgcgucugggacgucaagaacgccgagcuccucaacaaccaguucggcaccaugcccucccucacccucgccugccucaccaagcagggccaggucgaccucaacgacgucguccaggcccucaccgaccucggccucaucuacaccgccaaguaccccaacaccuccgaccucgaccgccucacccagucccaccccauccucaacaugaucgacaccaacaaguccucccucaacaucuccggcuacaacuucucccucggcgccgccgucaaggccggcgccugcaugcucgacggcggcaacaugcucgagaccaucaaggucuccccccagaccauggacggcauccucaaguccauccucaaggucaagaagucccucggcauguucaucuccgacacccccggcgagcgcaaccccuacgagaacauccucuacaagaucugccucuccggcgacggcuggcccuacaucgccucccgcaccuccaucaccggccgcgccugggagaacaccgucgucgaccucgaguccggcggcaagccccagaaggccggcuccaacaacuccaacaagucccuccaguccgccggcuucgccgccggccucaccuacucccagcucaugacccucaaggacgccaugcuccagcucgaccccaacgccaagaccuggauggacaucgagggccgccccgaggaccccgucgagaucgcccucuaccagcccaucuccggcugcuacauccacuucuuccgcgagcccaccgaccucaagcaguucaagcaggacgccaaguacucccacggcaucgacgucaccgaccucuucgccgcccagcccggccucaccuccgccgucaucgaggcccucccccgcaacauggucaucaccugccagggcuccgacgacauccgcaagcucuucgagucccagggccgcaaggacaucaagcucaucgacaucgcccucuccaagaccgacucccgcaaguacgagaacgccgucugggaccaguacaaggaccucugccacaugcacaccggcgucgucgucgagaagaagaagaagggcggcaaggaggagaucaccccccacugcgcccucauggacugcaucauguucgacgccgccgucuccggcggccucaacacccucguccuccgcgccguccucccccgcgacauggucuuccgcaccuccacccccaaggucguccucugaggacuagucccuguucccagagcccacuuuuuuuucuuuuuuugaaauaaaauagccugucuuucagaucuaaaaaaaaaaaaaaaaaaaaaaaaaaaaaaaaaaaaaaaaaaaaaaaaaaaaaaaaaaaaaaaaugcaucccccccccccccccccccccccccccccccaaaggcucuuuucagagccaccagaauu

SEQ ID NO: 9907 - RNA, 1986 nt, Artificial Sequence
  mRNA product Design a-1 comprising derived and/or modified sequence from LASV(Z0947-SLE-2011;Clade IV)__AIT17841__NP (opt2)
gggagagucccgcagucggcguccagcggcucugcuuguucgugugugugucguugcaggccuuauucaagcuuaccauguccgccuccaaggagaucaaguccuuccucuggacccagucccuccgccgcgagcucuccggcuacugcuccaacaucaagcuccaggucgucaaggacgcccaggcccuccuccacggccucgacuucuccgaggucuccaacguccagcgccucaugcgcaaggagcgccgcgacgacaacgaccucaagcgccuccgcgaccucaaccaggccgucaacaaccucgucgagcucaaguccacccagcagaaguccauccuccgcgucggcacccucaccuccgacgaccuccucauccucgccgccgaccucgagaagcucaaguccaaggucacccgcaccgagcgcccccucuccgccggcgucuacaugggcaaccucuccucccagcagcucgaccagcgccgcgcccuccucaacaugaucggcauguccggcuccaaccagggcgcccgcaccggccgcgacggcgucguccgcgucugggacgucaagaacgccgagcuccucaacaaccaguucggcaccaugcccucccucacccucgccugccucaccaagcagggccaggucgaccucaacgacgccguccaggcccucaccgaccucggccucaucuacaccgccaaguaccccaacaccuccgaccucgaccgccucacccagucccaccccauccucaacaugaucgacaccaagaaguccucccucaacaucuccggcuacaacuucucccucggcgccgccgucaaggccggcgccugcaugcucgacggcggcaacaugcucgagaccaucaaggucuccccccagaccauggacggcauccucaaguccauccucaaggucaagaaggcccucggcauguucaucuccgacgcccccggcgagcgcaaccccuacgagaacauccucuacaagaucugccucuccggcgacggcuggcccuacaucgccucccgcaccuccaucaccggccgcgccugggagaacaccgucgucgaccucgaguccgacggcaagccccagaaggccggcuccaacggcuccaacaagucccuccaguccgccggcuucaccgccggccucaccuacucccagcucaugacccucaaggacgccaugcuccagcucgaccccaacgccaagaccuggauggacaucgagggccgccccgaggaccccgucgagaucgcccucuaccagcccuccuccggcugcuacauccacuucuuccgcgagcccaccgaccucaagcaguucaagcaggacgccaaguacucccacggcaucgacgucaccgaccucuucgccgcccagcccggccucaccuccgccgucaucgacgcccucccccgcaacauggucaucaccugccagggcuccgacgacauccgcaagcucuucgagucccagggccgcaaggacaucaagcucaucgacaucgcccucuccaagaccgacucccgcaaguacgagaacgccgucugggaccaguacaaggaccucugccacaugcacaccggcaucgucgucgagaagaagaagcgcggcggcaaggaggagaucaccccccacugcgcccucauggacugcaucauguucgacgccgccgucuccggcggccucaacaccuccguccuccgcgccguccucccccgcgacauggucuuccgcaccuccaccccccgcgucguccucugaggacuagucccuguucccagagcccacuuuuuuuucuuuuuuugaaauaaaauagccugucuuucagaucuaaaaaaaaaaaaaaaaaaaaaaaaaaaaaaaaaaaaaaaaaaaaaaaaaaaaaaaaaaaaaaaaugcaucccccccccccccccccccccccccccccccaaaggcucuuuucagagccaccagaauu

SEQ ID NO: 9908 - RNA, 1986 nt, Artificial Sequence
  mRNA product Design a-1 comprising derived and/or modified sequence from LASV(Josiah;Clade IV)__NP_694869__NP (opt3)
gggagagucccgcagucggcguccagcggcucugcuuguucgugugugugucguugcaggccuuauucaagcuuaccaugagcgccuccaaggagaucaaaucuuuccuguggacccagucacucagaagggaacuuaguggcuacugcagcaacauuaagcugcaaguggucaaagacgcucaggcauuguuacacgggcuggauuuuuccgagguuucuaaugugcagcggcuaaugcgcaaggaacgacgugacgauaacgaccucaaaagacugagggaucuuaaucaggccguaaacaaucugguggaguugaagucgacacaacagaagucaauacuccgggucggaacucugacgagcgacgaucugcucaucuuagcggcugaccuggaaaaacuuaagaguaaagugauucgcaccgagagacccuuguccgccgguguuuauaugggcaaccugucuagccagcagcuagaucaaaggcgggcacuccugaauaugaucgggauguccggaggcaaccagggugcccgcgcugggcgagacggaguggucagagugugggauguaaagaaugcagagcuucugaacaaucaguucggcacaaugccuucauugacucucgccugucugaccaaacagggccaaguugacuuaaacgaugcugugcaggcccugacagaccucgggcuuauuuacaccgcgaaguauccaaauacaagugaccuggauagguugacucagagccauccgauccuaaacaugauagacaccaagaaaucuucccugaauaucucaggauacaacuuuagccucggugcagccgucaaggcuggcgccugcaugcuggaugggggaaacaugcuugaaacgauuaaagugaguccccaaacuauggacggcauccugaagucuauuuugaaagugaagaaagcacucgguauguucaucuccgauaccccuggggagcggaauccauaugaaaacauacuguacaagauuuguuuaagcggagacggcuggcccuauaucgcuucgcguacaucuauuacuggccgcgccugggagaauaccgucguugaucuggaguccgacgggaagccucagaaagcggauucaaacaauaguagcaagucccuacagucugccggauuuacagcaggucucaccuacagccagcugaugacgcuuaaagacgcuauguugcaacuggauccaaacgccaagacuuggauggacaucgaaggcagacccgaggacccuguggaaaucgcucucuaccagccaucaagugggugcuauauucacuucuuuagggagccgacagaucugaaacaguucaagcaggacgccaaguacucccauggaauagauguaaccgaccuuuuugcaacucaacccggccugacaagcgccgugaucgaugcuuugccucggaauauggucauuaccugucaggguucugacgauauccgaaaacuccuggaaucacaggggcgcaaggacauaaaauuaauugauaucgcgcugaguaagacggacagcagaaaauaugagaacgcagugugggaucaguacaaggaccuaugccacaugcauaccggcguuguggucgagaagaaaaagaggggaggcaaagaagagaucacaccacacugugcccucauggauugcauuauguucgacgcugccguguccgggggacugaauacuucuguacuucgggcaguuuugccccgcgacaugguguuuagaaccucgacaccuagggucgugcugugaggacuagucccuguucccagagcccacuuuuuuuucuuuuuuugaaauaaaauagccugucuuucagaucuaaaaaaaaaaaaaaaaaaaaaaaaaaaaaaaaaaaaaaaaaaaaaaaaaaaaaaaaaaaaaaaaugcaucccccccccccccccccccccccccccccccaaaggcucuuuucagagccaccagaauu

SEQ ID NO: 9909 - RNA, 1986 nt, Artificial Sequence
  mRNA product Design a-1 comprising derived and/or modified sequence from LASV(LP;Clade I)__AAF86702__NP (opt3)
gggagagucccgcagucggcguccagcggcucugcuuguucgugugugugucguugcaggccuuauucaagcuuaccaugagcaacuccaaggagaucaaaucuuuccuguggacccagucacucagaagggaacuuaguggcuacugcagcaauauuaagcugcaaguggucaaagacgcccaggcuuuguuacacgggcuggauuuuuccgagguuucuaacgugcagcggcuaaugcgcaagcagaaacgagacgaugcagaccucaagcgucugagagaucuuaaucaagccguaaacaaucugguggaauugaagucgacacagcagaaaaacguccucagggugggaacucugucaagcgacgaucugauaacgcucgcggcugacuuagagaagcugaaaaguaagguuauccggaccgaacgcccccuuuccucugguguguauaugggcaauuugagcucccagcaacuggaucagagaagggcccuacucucaaugauugggaugaguggaggcccucaggguaaccggacagggggagacggcgucgugcgcguaugggauguuaaaaaugcagagcugcuuaacaaucaguucggcacuaugccaagccugaccuuggccugucucacaaagcaaggacagguggaccugaacgaugcuguccaggcauuaaccgaccuggggcucaucuacacugccaaguaucccaauucuuccgaccuugauaugcugacacaaucacauccgauuuuggguaugguggacaccaaaaagagcagucuaaacaucucuggcuacaauuuuucccugggggcugccgugaaagcgggagcaugcaugcucgauggcgguaacaugcuggagacgauaaaggucagcccucagacuauggacgggauccuuaaaucgauucugaagguuaaacgaucuuugggaauguucaucuccgauaccccaggcgaaagaaaccccuaugagaauauucucuacaagaucugucugucaggcgaaggguggccuuauauagccaguaggacaagcauuacuggacgggcuugggagaacaccuuaguggaccuggaguccgauaauaagccacccaaacuaaacucugccgguagcaauaagucacuccaggcagcuggccugaacgccgggcuuacauacagucaguugaugacccugaaagacugcaugcuccaacuggauccuuccagcaagacguggaucgacauugaaggacguccagaggauccgguagaaaucgcgcuuuuucagcccucuucaggcuguuacauccacuucuuucgcgagccuacugaccugaaacaguucaagcaggacgccaaguauagucaugguauugaugugacagacuuguuuagcacccaaccagggcucacuuccgcagucauagaagcucugcccagaaauaugguguuaacaugccagggcucugaugacaucaaaaagcugcuagagucgcagggaaggcgggauauuaaacucaucgacauaagccuguccaaggccgauucacgaaaauucgagaacgcuguuugggaccaguacaaggaucuuugucacaugcauaccggcguggucguggaaaagaaaaagcgcgggggaaaagaggaaauuacgccucacugcgccuugcuggacuguaucauguuugaugcagccaccacagguagucucaauaucacuacccugagagcuguauuaccaagggacaugguuuuccggacaucuacucccaaggugguccugugaggacuagucccuguucccagagcccacuuuuuuuucuuuuuuugaaauaaaauagccugucuuucagaucuaaaaaaaaaaaaaaaaaaaaaaaaaaaaaaaaaaaaaaaaaaaaaaaaaaaaaaaaaaaaaaaaugcaucccccccccccccccccccccccccccccccaaaggcucuuuucagagccaccagaauu

SEQ ID NO: 9910 - RNA, 1986 nt, Artificial Sequence
  mRNA product Design a-1 comprising derived and/or modified sequence from LASV(803213;Clade II)__AAF86704__NP (opt3)
gggagagucccgcagucggcguccagcggcucugcuuguucgugugugugucguugcaggccuuauucaagcuuaccaugagcgccuccaaggaggugaaaucuuuccuguggacccagucacucagaagggaacuuaguggcuacugcagcaacaucaagcugcaagucguuaaagacgcucaggcauuguuacacgggcuggauuuuuccgaggugaauaacguacagcggcuaaugcgcaagcagaaacgagacgauggagaccucaagcgucugagagaucuuaaucaagccgugaacaaucuggucgaauugaagucuacacagcagaaaucgauucucaggguggguacucugacgucagacgaucugcucaccuuagcggcugaccuggagaaacuuaagagcaagguuauacggacagaacgccccuugaguuccggcguguauauggggaaccugucuacucagcaacuagagcagagaagggcccuccugaauaugaucggaauggucggcggugcacaggggacccagccuggacgggauggcgugguacgcguuugggacgugaaaaacccagaucuucugaauaaccaauucggcacaaugccgagcuugacccucgccugucugacuaagcaggggcaggucgacuuaaaugaugcugugcuggcacucacagaccuuggacugauuuacaccgccaaguaucccaacuccucagacuuggaucgacuaagucaaagccauccuauccugaauaugguggacacgaaaaagucuucccucaacauuucagguuacaauuuuagccugggcgcugccgucaaagcgggggcaugcaugcuugauggaggcaacaugcuggagacuaucaagguuaccccacagacaauggacgguauauugaaaaguauccucaaggugaaaagaucucuggggauguucguauccgauacucccggagaaaggaacccuuaugagaauauuuuauacaagaucugucugagcggcgacggcuggccauauauugccucgcggaccucuaucguggggcgugcuugggaaaacacaaccgucgaucuagaguccgacggaaagccccagaaaguggguacggccggcucaaauaagagucuccagagcgcaggguuuccuacuggacugacauacucccaacuuaugaccuugaaagauucuaugaugcagcuggacccaagcgcuaagacuuggauagauauugagggccgcccggaagaccccguugagaucgcccucuaccagccuaugucagguugcuauauucacuucuuuagagaaccaacagaccugaaacaguucaagcaagaugcgaaguacagucaugggaucgacguggccgaucuuuuucccgcacagccuggccugaccuccgcugucaucgaggccuugccaaggaacauggugcucacgugucagggaagcgacgauauuaaaaagcuguuagacucucagggccggcgagauauaaaacugaucgacauuucacuaaguaagguagauagccgcaaauucgaaaaugcuguuugggaccaaugcaaggaucucugucacaugcauaccgggguggucguggagaagaaaaagagaggagguaaagaggaaaucacaccccacugcgcccugauggacuguauaauguuugaugcagccgucuccggcgggcuuaacauuccgguguugagggcuguucugccucgggacaugguguuccgcacuucuucgcccaagguaguccucugaggacuagucccuguucccagagcccacuuuuuuuucuuuuuuugaaauaaaauagccugucuuucagaucuaaaaaaaaaaaaaaaaaaaaaaaaaaaaaaaaaaaaaaaaaaaaaaaaaaaaaaaaaaaaaaaaugcaucccccccccccccccccccccccccccccccaaaggcucuuuucagagccaccagaauu

SEQ ID NO: 9911 - RNA, 1989 nt, Artificial Sequence
  mRNA product Design a-1 comprising derived and/or modified sequence from LASV(GA391;Clade III)__CAA36646__NP (opt3)
gggagagucccgcagucggcguccagcggcucugcuuguucgugugugugucguugcaggccuuauucaagcuuaccaugagcgccuccaaggaggugagaucuuuccuguggacccagucacucaggcgggaacuuaguggcuacugcagcaacaucaaacugcaagucguuaaggacgcucaggcauuguuacacgggcuggauuuuuccgaggugucuaauguacagcgccuaaugcgaaaacagaagcgugacgauggagaccucaaaagacugagggaucuuaaccaagccgugaauaaccuggucgaauugaagucgacacagcagaagucagugcuccggguugguacucugagcagugacgaucugcucauuuuagcggcugaccuggagaaacuuaaguccaaagugacgcgcaccgaaagacccuugucuagcggcgucuauauggggaaucuguccucacagcaacuagaucagaggcgggcccuccugaacaugauaggaaugacaggcgugaguggugggggaaagggcgcaagcgacggcaucguacgcguuugggaugugaaaaaugccgagcuucugaacaaucaguucgggacuaugccuucuuugacccucgcuugucugacaaagcagggacaagucgacuuaaacgaugcagugcaggcccugaccgaccucggucuuauuuacacugcuaaguauccaaauuccucagaccuggaucgauugagccagagucauccgauccuaaacaugauugacacuaaaaagucuucccugaauaucagcggcuacaacuuuucgcucggggccgcggugaaagcaggagccugcaugcuggauggcgguaauaugcuugagaccauaaaggucucuccccaaacgauggacgggauccugaaauccauuuugaagguuaaaaagucacucggaauguucgugagugauacuccuggcgaaagaaacccauaugagaacauccuguacaagauuuguuuaagcggcgacggguggcccuauaucgcuuccaggaccucuauaguaggacgggccugggaaaauacaguggucgaucuggagcaggacaacaaaccucagaagauugguaauggcgggagcaacaaaucacuacagagugcaggauuugcugccggccucacuuacucccaacugaugacccuuaaggauuucaaaugcuuuaauuugaucccaaacgcgaagacauggauggacauugagggucgucccgaagauccuguggagaucgcccuguaccagccaagcucuggguguuauguucacuucuuucgcgaaccgaccgaccucaagcaguucaaacaggacgcaaaguacucacauggcaucgaugugacggaccuguuugcugcccaacccggacuuacaagugcugucauugaggcccugccuagaaauauggugauaacaugccagggcagcgaagauaucaggaaauugcucgagucccaggggcggcgagacauuaagcugaucgauauaaccuuaucuaaagcagacucgcgcaaguucgagaacgccguaugggaucaguuuaaggaccugugucacaugcauacuggaguuguggucgagaaaaagaaaagagguggcaaggaagaaauuacaccacacugcgcucuaauggauuguaucauguucgacgcggcagugagcgggggacucgaugccaaaguccugagggugguucuuccccgggacaugguguuccgcaccuccacgccuaagguagucuugugaggacuagucccuguucccagagcccacuuuuuuuucuuuuuuugaaauaaaauagccugucuuucagaucuaaaaaaaaaaaaaaaaaaaaaaaaaaaaaaaaaaaaaaaaaaaaaaaaaaaaaaaaaaaaaaaaugcaucccccccccccccccccccccccccccccccaaaggcucuuuucagagccaccagaauu

SEQ ID NO: 9912 - RNA, 1986 nt, Artificial Sequence
  mRNA product Design a-1 comprising derived and/or modified sequence from LASV(AV;Clade V)__CCA30315__NP (opt3)
gggagagucccgcagucggcguccagcggcucugcuuguucgugugugugucguugcaggccuuauucaagcuuaccaugagcgccuccaaggaggugaaaucuuuccuguggacccagucacucagaagggaacuuaguggcuacugcagcaacaucaagcugcaagucguuaaagacgcucaggcauuguuacacgggcuggauuuuuccgaggugucuaauguacagcggcuaaugcgcaagcagcgacgugacgauucggaccucaaaagacugagggaucuuaaccaagccgugaauaaccuggucgaauugaagucaacacagcaaaagagcgugcuccggguuggaacucugaguuccgacgaucugcucacguuagcggcugaccuggagaaacuuaagucuaaagugacccgcacagaaagacccuugagcuccggugucuauaugggcaaucugucaagucagcagcuagaucagaggcgggcccuccugaaccuuauugggaugacuaauggaagccagggcucucaggcaggucgcgacggggugguacgaguuugggaugugaagaacgccgagcuguugaauaaccaauucggaaccaugccuucccucacacuggcuuguuuaaccaaacagggccaggucgaccugaaugauguggugcaagcacucacugaccuuggccugauauacacagccaaguauccaaacaccucagacuuggauagacuaacgcagagccauccgauccugaauaugauugacacuaagaaaaguucucucaacaucuccggguacaauuuuagccugggagcugccgucaaggcgggugcaugcaugcuugauggcgggaacaugcuggagaccauuaaaguuucgccccagucuauggacggaaucuugaaguccauacucaaagugaagagggcccugggcauguucguaucagauacaccuggugaacggaacccauaugagaauaucuuauacaaaauuugucugaguggggacggauggcccuauaucgcuagccguacuuccauugugggccgcgccugggaaaacaccgucguggaucuagagacagacggcaagccucagaagaucgggucuggaaauagcaacaaaucacuccaaagugcagguuuuuccgcuggccugaccuacagccagcuuaugacguugaaggaugccaugcugcagcucgacccaaaugcgaaaacuuggauggauauagaggggagacccgaagacccuguugagguggcccuguaccagccaauuucuggaugcuauauccacuucuuuagggaaccgacagaccuuaagcaauucaaacaggaugcaaaguacucacauggcauugacaucgcugaucuguuugccgcucagcccgguuugaccagugccgucaucgaggcacucccucggaacauggugauuacuugucaggggagcgaagacauaaagaaacuguuagagucccaaggccgaaaggauaucaaacugauugacaucgcccuaucuaagauagauucgcgcaaauucgagaaugcuguaugggaccaguauaaggaucucugccacaugcauacaggaguuguggucgaaaagaaaaagagaggcgggaaagaggaaauuaccccacacugugcgcugauggacugcaucauguuugaugcagccgugagcggaggucuuaacacguugguccugagggcugugcucccccgggacaugguuuuccgcaccuccacaccuagagugguacugugaggacuagucccuguucccagagcccacuuuuuuuucuuuuuuugaaauaaaauagccugucuuucagaucuaaaaaaaaaaaaaaaaaaaaaaaaaaaaaaaaaaaaaaaaaaaaaaaaaaaaaaaaaaaaaaaaugcaucccccccccccccccccccccccccccccccaaaggcucuuuucagagccaccagaauu

SEQ ID NO: 9913 - RNA, 1986 nt, Artificial Sequence
  mRNA product Design a-1 comprising derived and/or modified sequence from LASV(Togo/2016/7082;Clade VI)__AMR44578__NP (opt3)
gggagagucccgcagucggcguccagcggcucugcuuguucgugugugugucguugcaggccuuauucaagcuuaccaugagcaacuccaaggaggugaaaucuuuccuguggacccagucacucagaagggaacuuaguggcuacugcagcaauaucaagcugcaagucguuaaagacgcccaggcuuuguuacacgggcuggauuuuuccgaggugucuaacguacagcggcuaaugcgcaagcagaaacgagacgauggagaccucaagcgucugagagaucuuaaucaagcagugaacaaucuggucgaauugaagucggugcagcagaaaucaauucucaggguugguacacugacuagcgacgaucugcucacguuagccgcggaccuggagaaacuuaaaaguaaggugacccggacagaacgccccuuguccucuggcgucuauauggggaaccugagcucccagcaacuagaucagagaagggcucuccugucaaugauaggaaugaguggcgguaaucagaacagccagccuaaaggggacggagugguacggguuugggaugugaagaaugccgaccuucugaacaaucaauucggcacuaugccaucuuugacccucgcaugucugacaaagcagggccaggucgauuuaaacgacgccgugcaagcucugaccgaccucgggcuuaucuacacugcaaaauaucccaauuccucagaucuggaccgcuugagccagagucauccgauucuaaacaugaucgauacaaagaaaucuucccugaauauuagcggauacaacuuuucgcucggugccgcuaucaagaccggcgccugcaugcuggacgggggaaacaugcuugagacgauaaaagugacuccucagaccauggauggcauccugaagucuauuuugaaagucaagcgaucccucgguauguucaucucagacacaccaggggagagaaaucccuaugaaaacauucuguacaagaucuguuuaaguggagauggcuggccuuauauagcgagcaggacugcaauuaucggccgggccugggagaauaccguuguggaccuggaauccgauucuaaaccacagaagauugggagcaacggaucaaauaaaagucuacaauccgcugguuuugcccccggccucacauacagccagcugaugacccuuaaggacucuauguugcagcuggauccuaacgcaaaaacguggaucgacaucgaggggcguccagaggacccgguagaaguggcucucuuccagcccauuucaggaugcuacauacacuuuuuccgcgagccuacugaucugaagcaauuuaagcaggacgccaaauauagucauggcaucgaugucacagaccuuuucgcggcccagccaggucugaccagcgcagugauugaggcuuugcccagaaauaugguucucacuugucagggguccgaugacaucaagaaacuguuagauucucaaggcaggcgggacauaaagcugauugaugugucgcuaaacaaaaucgacagccgaaaguuugaaaaugccgucugggaucaguacaaggaccucugccacaugcauacaggagugguaguugaaaagaagaaaaagggcgggaaagaggagaucaccccucacugugcucugcuugauugcauuauguucgacgccgcaguguccggagguuugaacgccacgguccugcgcgcugugcucccaagagacauggucuuuaggaccucaagucccaaggugguucugugaggacuagucccuguucccagagcccacuuuuuuuucuuuuuuugaaauaaaauagccugucuuucagaucuaaaaaaaaaaaaaaaaaaaaaaaaaaaaaaaaaaaaaaaaaaaaaaaaaaaaaaaaaaaaaaaaugcaucccccccccccccccccccccccccccccccaaaggcucuuuucagagccaccagaauu

SEQ ID NO: 9914 - RNA, 1986 nt, Artificial Sequence
  mRNA product Design a-1 comprising derived and/or modified sequence from LASV(KAK-428;Clade n.d. (VII))__ANH09741__NP (opt3)
gggagagucccgcagucggcguccagcggcucugcuuguucgugugugugucguugcaggccuuauucaagcuuaccaugagcaacuccaaggaggugaaaucuuuccuguggacccagucacucagaagggaacuuaguggcuacugcacaaauaucaagcugcaagucguuaaagacgcccaggcuuuguuacacgggcuggauuuuagcgagguguccaacguacagcggcuaaugcgcaagcagaaacgagacgauaaugaccucaagcgucugagagaucuuaaccaagcagugaauaaccuggucgaauugaagucugugcagcagaaaucgguucucaaggugggaacucucaauucagacgaucugcugacguuagccgcggaccuggagaaacuuaagagcaaagucgugaggaccgaacggcccuugaguuccgguguauauaugggcaaccugucuagccagcaacuagaucagcgcagagcucuccugaauaugauugggauggccggaggcucccaggguaaccagccuucaagggacgggguugugcgggucugggaugugaagaaugcagaccuucugaacaaucaauucggaacaaugccaaguuugacucucgccugucugaccaagcagggccagguggauuuaaacgacgucguucuggcucucacagaccuuggccugauauacaccgcaaaauauccgaauagcucugauuuggaccgccuaucccaaaaccaucccgugcugaacaugaucgauguaaauaagucaagccucaacauuaguggguacaauuuuucucugggagccgcugugaaagccggugcgugcaugcuugacggcgggaacaugcuggagacuaucaagauuuccccucagacagucgauggaaucuugaaaagcauacucaaggugaaacgagcacugggcauguucguuucggacaccccaggugagagaaaucccuaugaaaacaucuuauacaaggugugucugucugggaauggauggccuuauauugccuccaggacgucaaucgucggccgggcuugggagaacacugugguagaucuagaaaguaauaagaaccagccaaaaguuggcaauaacgggagcaauaagaugcuccaguccucuggauuugccaccggucugacauacagccaacuuaugacuuugcgugacucaaugcugcagcucgaucccaccgcaaaaacauggauugacaucgagggccgcccugaggauccaguggaacuggcucuuuuccagccgaguuccgggugcuacauacacuuuuucagagagcccaccgaccugaagcaguuuaaacaagacgccaaguauagccauggaauugaugucaacgacuuguucucugcgcagccuggccucacgucagccgugcuggaagcauuaccaaggaauaugguccugacuugucaggguagugaugacauccggaagcuacucgauagccaggaccgaaaagauauuaagcugaucgacaucucccuuucuaaagcugaugcccgcaaguuugagaacgacgugugggaucaauucaaagacuugugccacaugcauacagggauuguuguggaaaagaagaaaaagggcggaaaacaggagaugacuccccacugugcucugcucgauugcauaauguuugacgccgcaguaucgggcgggcugaacgucccuaccuuaagagccgugcugccaacagacaugguuuucaggaccaucacgaccaaggugguccuuugaggacuagucccuguucccagagcccacuuuuuuuucuuuuuuugaaauaaaauagccugucuuucagaucuaaaaaaaaaaaaaaaaaaaaaaaaaaaaaaaaaaaaaaaaaaaaaaaaaaaaaaaaaaaaaaaaugcaucccccccccccccccccccccccccccccccaaaggcucuuuucagagccaccagaauu

SEQ ID NO: 9915 - RNA, 1986 nt, Artificial Sequence; identical to SEQ ID NO: 9909
  mRNA product Design a-1 comprising derived and/or modified sequence from LASV(Pinneo-NIG-1969;Clade I)__AIT17837__NP (opt3)

SEQ ID NO: 9916 - RNA, 1986 nt, Artificial Sequence
  mRNA product Design a-1 comprising derived and/or modified sequence from LASV(ISTH0009-NIG-2011;Clade II)__AIT17405__NP (opt3)
gggagagucccgcagucggcguccagcggcucugcuuguucgugugugugucguugcaggccuuauucaagcuuaccaugagcguguccaaggaggucaaaucuuuccuguggacccagucacucagaagggaacuuaguggcuacugcagcaacaucaagcugcaaguugugaaagacgcccaggcuuuguuacacgggcuggauuuuuccgagguaucuaaugugcagcggcuaaugcgcaagcagaaacgagacgauucggaccucaagcgucugagagaucuuaaccaagcagucaauaaccugguggaauugaagucaacacagcagaaaagcauucucaggguuggaacucugacgagugacgaucugcucaccuuagccgcggaccuggagaaacuuaaguccaaggugauacggacagaacgccccuugucuagcggugucuauaugggcaaucuguccacucagcaacuagagcagagaagggcucuccugaacaugaucgggauggugggaggcgcccaggguacccagccugggcgggauggaguaguucgcgugugggacgucaaaaauccagaucuucugaacaaucaauucggcacaaugccgucauugacccucgcaugucugacuaagcagggccagguggacuuaaacgaugccgugcuggcucucacagaccuugggcugauuuacaccgcaaaguaucccaauaguagcgacuuggaucgacuaucucaaucccauccuauccugaacauggucgacauuaaaaagucaagccucaauaucaguggauacaacuuuucucugggugccgcuguuaaagccggcgcgugcaugcuugaugggggaaauaugcuggagacgauaaaggugacuccacagaccauggacggcaucuugaaauccauucucaagguaaaaagaagccuggguauguucgugucggauacacccggggaaaggaacccuuaugagaacaucuuauacaagauuugucugucuggagacggcuggccauauaucgcaucccggacuucaauagucggccgugccugggaaaauaccacaguggaucuagagagugacgggaagccccagaaaguuggaagcgcugguuccaacaagucucuccagagcgccggcuuuccuaccgggcugacguacucacaacuuaugacuuugaaagauaguaugaugcagcuggacccauccgcaaagacauggauugauaucgagggacgcccggaagaccccguggagauugcucucuaccagccuaugagcggcugcuauauccacuucuuuagagaaccaaccgaccugaaacaguucaagcaagaugccaaguacucucaugguaucgacgucgcggaucuuuuucccgcccagccugggcugacuucagcagugauugaggcuuugccaaggaauaugguacucacaugucagggcagugacgauauaaaacggcuguuagacagccagggacgacgcgauaucaagcugauugacaucgcccuauccaaagcugauucuagaagguucgaaaacgccguuugggaccaaugcaaggaucucugucacaugcauaccggcguggucguggagaaaaagaagcgcgggggaaaagaggaaauaacgccccacugcgcacugauggacuguauuauguaugaugccgcugucucggguggccuuaauaucccgguguugcgggcgguucugccuagagacaugguguuuaggaccagcucccccaagguaguccucugaggacuagucccuguucccagagcccacuuuuuuuucuuuuuuugaaauaaaauagccugucuuucagaucuaaaaaaaaaaaaaaaaaaaaaaaaaaaaaaaaaaaaaaaaaaaaaaaaaaaaaaaaaaaaaaaaugcaucccccccccccccccccccccccccccccccaaaggcucuuuucagagccaccagaauu

SEQ ID NO: 9917 - RNA, 1986 nt, Artificial Sequence
  mRNA product Design a-1 comprising derived and/or modified sequence from LASV(ISTH2010-NIG-2012;Clade II)__AIT17483__NP (opt3)
gggagagucccgcagucggcguccagcggcucugcuuguucgugugugugucguugcaggccuuauucaagcuuaccaugagcgccuccaaggaggugaaaucuuuccuguggacccagucacucagaagggaacuuaguggcuacugcagcaacaucaagcugcaagucguuaaagacgcucaggcauuguuacacgggcuggauuuuuccgaggugucuaauguacagcggcuaaugcgcaagcagaaacgagacgauucggaccucaagcgucugagagaucuuaaccaagccgugaauaaccuggucgaauugaagucaacacagcagaaaagcauucucagggugggaacucugacgagugacgaucugcucaccuuagcggcugaccuggagaaacuuaaguccaagguuauacggacagaacgccccuugucuagcgguguguauaugggcaaucuguccacucagcaacuagagcagagaagggcccuccugaaccuuaucgggauggucggaggcgcacaggguacccagccugggcgggauggagugguacgcguuugggacgugaaaaauccagaucuguugaacaaucaauucggcacaaugccgucacucacccuggccuguuuaacuaagcagggccaggucgaccugaacgaugcugugcucgcacuuacagaccugggguugauuuacaccgccaaguaucccaauaguagcgaccuagaucgacugucucaaucccauccuauccucaacaugguggacacgaaaaagucaagccugaauauuaguggauuuaacuucucucuuggugcugccgucaaagcgggcgcaugcaugcuggaugggggaaauauguuggagacuaucaagguuaccccacagacaauggacggcauacucaaauccauccugaaggugaaaaagagcuuagguauguuuguaucggauacucccggggaaagaaacccuuacgagaacauucuguauaagaucugucuaucuggagacggcuggccauacauugccuccaggaccucaaucgugggccgggcuugggaaaauacaaccgucgaucucgagagugacgggaaaccccacaaggugggaacggccgguagcaacaaaucccugcagucugcaggcuucccuacugggcuuacauauagccaguugaugacccugaaggauucaaugaugcaacucgacccaagugcuaaaacuuggauagauauugagggacguccggaagaccccguugagaucgcccuguaccagccuauguccggcugcuacauucacuuuuuccgcgaaccaacagaccuuaagcaguuuaagcaggaugcgaaauauagccaugguaucgacguggccgaucuguuccccgcacaaccuggguugaccucugcugucaucgaggcccucccaagaaauauggugcugacgugucagggcucagacgauauuaagagguuacuggacagucagggacggcgagauauaaaacuaaucgacauugcucucagcaaggccgauucccgcagauuugaaaacgcaguaugggaccagugcaaagaucugugucauaugcacaccggcguuguggucgagaagaagaaaaggggagggaaggaggaaaucacaccccacugcgcccuuauggacuguauaauguacgaugcugcggugucugguggcuugaauauuccgguccugcgggcagugcucccucgcgacaugguuuucagaacuucgagccccaaagugguacugugaggacuagucccuguucccagagcccacuuuuuuuucuuuuuuugaaauaaaauagccugucuuucagaucuaaaaaaaaaaaaaaaaaaaaaaaaaaaaaaaaaaaaaaaaaaaaaaaaaaaaaaaaaaaaaaaaugcaucccccccccccccccccccccccccccccccaaaggcucuuuucagagccaccagaauu

SEQ ID NO: 9918 - RNA, 1986 nt, Artificial Sequence
  mRNA product Design a-1 comprising derived and/or modified sequence from LASV(Lassa virus/H.sapiens-wt/NGA/2015/ISTH_0543;Clade II)__AVO03640__NP (opt3)
gggagagucccgcagucggcguccagcggcucugcuuguucgugugugugucguugcaggccuuauucaagcuuaccaugagcgccuccaaggaggugaaaucuuuccuguggacccagucacucagaagggaacuuaguggcuacugcagcaacaucaagcugcaagucguuaaagacgcucaggcauuguuacacgggcuggauuuuuccgaggugucuaauguacagcggcuaaugcgcaagcagaaacgagacgauucggaccucaagcgucugagagaucuuaaccaagccgugaauaaccuggucgaauugaagucaacacagcagaaaagcauucucagggugggaacucugacgagugacgaucugcucaccuuagcggcugaccuggagaaacuuaaguccaagguuauacggacagaacgccccuugucuagcgguguguauaugggcaaucuguccacucagcaacuagagcagagaagggcccuccugaacaugaucgggauggucggaggcgcacaggguacccagccugggcgggauggagugguacgcguuugggacgugaaaaauccagaucuucugaacaaucaauucggcacaaugccgucauugacccucgccugucugacuaagcagggccaggucgacuuaaacgaugcugugcuggcacucacagaccuugggcugauuuacaccgccaaguaucccaauaguagcgacuuggaucgacuaucucaaucccauccuauccugaacaugguggacacgaaaaagucaagccucaauauuaguggauacaacuuuucucugggugcugccgucaaagcgggcgcaugcaugcuugaugggggaaauaugcuggagacuaucaagguuaccccacagacaauggacggcauauugaaauccauccucaaggugaaaaagagccuggguauguucguaucggauacucccggggaaagaaacccuuaugagaacauuuuauacaagaucugucugucuggagacggcuggccauauauugccuccaggaccucaaucgugggccgggcuugggaaaauacaaccgucgaucuagagagugacgggaaaccccagaaggugggaagcgccgguuccaacaaaucucuccagagcgcaggcuuuccuacggggcugacuuacucacaacuuaugacauugaaggauaguaugaugcagcuggacccauccgcuaaaaccuggauagauauugagggacguccggaagaccccguugagaucgcccucuaccagccuaugagcggcugcuauauucacuucuuucgcgaaccaacugaccugaagcaguucaagcaagaugcgaaauacucucaugguaucgacguggccgaucuuuuucccgcacagccugggcugacaucagcugucaucgaggccuugccaagaaauauggugcucaccugucagggcagugacgauauuaagaggcuguuagacagccagggacggaaagauauaaagcugaucgacauugcucuauccaaagccgauucucgacgcuucgaaaacgcaguaugggaccaaugcaaggaucucugucacaugcauacgggcguuguggucgagaagaaaaagagagggggaaaagaggaaaucacaccccacugcgcccugauggacuguauaauguaugaugcugcggugucggguggccuuaauauuccggucuugagggcagugcugccucgggacaugguuuuucgcaccagcucccccaaggugguacucugaggacuagucccuguucccagagcccacuuuuuuuucuuuuuuugaaauaaaauagccugucuuucagaucuaaaaaaaaaaaaaaaaaaaaaaaaaaaaaaaaaaaaaaaaaaaaaaaaaaaaaaaaaaaaaaaaugcaucccccccccccccccccccccccccccccccaaaggcucuuuucagagccaccagaauu

SEQ ID NO: 9919 - RNA, 1986 nt, Artificial Sequence
  mRNA product Design a-1 comprising derived and/or modified sequence from LASV(Lassa virus/H.sapiens-wt/NGA/2016/ISTH_0009;Clade II)__AVO03572__NP (opt3)
gggagagucccgcagucggcguccagcggcucugcuuguucgugugugugucguugcaggccuuauucaagcuuaccaugagcgccuccaaggaggugaaaucuuuccuguggacccagucacucagaagggaacuuaguggcuacugcagcaacaucaagcugcaagucguuaaagacgcucaggcauuguuacacgggcuggauuuuuccgaggugucuaauguacagcggcuaaugcgcaagcagaaacgagacgauucggaccucaagcgucugagagaucuuaaccaagccgugaauaaccuggucgaauugaagucaacacagcagaaaagcauucucagggugggaacucugacgagugacgaucugcucaccuuagcggcugaccuggagaaacuuaaguccaagguuauacggacagaacgccccuugucuagcgguguguauaugggcaaucuguccacucagcaacuagagcagagaagggcccuccugaacaugaucgggauggucggaggcgcacaggguacccagccugggcgggauggagugguacgcguuugggacgugaaaaauccagaucuucugaacaaucaauucggcacaaugccgucauugacccucgccugucugacuaagcagggccaggucgacuuaaacgaugcugugcuggcacucacagaccuugggcugauuuacaccgccaaguaucccaauaguagcgacuuggaucgacuaucucaaucccauccuauccugaacaugguggacacgaaaaagucaagccucaauauuaguggauacaacuuuucucugggugcugccgucaaagcgggcgcaugcaugcuugaugggggaaauaugcuggagacuaucaagguuaccccacagacaauggacggcauauugaaauccauccucaaggugaaaaagagccuggguauguucguaucggauacucccggggaaagaaacccuuaugagaacauuuuauacaagaucugucugucuggagacggcuggccauauauugccuccaggaccucaaucgugggccgggcuugggaaaauacaaccgucgaucuagagagugacgggaaaccccagaaggugggaagcgccgguuccaacaaaucucuccagagcgcaggcuuuccuacggggcugacuuacucacaacuuaugacauugaaggauaguaugaugcagcuggacccauccgcuaaaaccuggauagauauugagggacguccggaagaccccguugagaucgcccucuaccagccuaugagcggcugcuauauucacuucuuucgcgaaccaacugaccugaagcaguucaagcaagaugcgaaauacucucaugguaucgacguggccgaucuuuuucccgcacagccugggcugacaucagcugucaucgaggccuugccaagaaauauggugcucaccugucagggcagugacgauauuaagaggcuguuagacagccagggacggcgagauauaaaacugaucgacauugcucuauccaaggccgauucucgcagauucgaaaacgcaguaugggaccaaugcaaagaucucugucacaugcauacgggcguuguggucgagaagaagaaaaggggagggaaggaggaaaucacaccccacugcgcccugauggacuguauaauguaugaugcugcggugucggguggccuuaauauuccggucuugcgggcagugcugccucgcgacaugguuuuuagaaccagcucccccaaagugguacucugaggacuagucccuguucccagagcccacuuuuuuuucuuuuuuugaaauaaaauagccugucuuucagaucuaaaaaaaaaaaaaaaaaaaaaaaaaaaaaaaaaaaaaaaaaaaaaaaaaaaaaaaaaaaaaaaaugcaucccccccccccccccccccccccccccccccaaaggcucuuuucagagccaccagaauu

SEQ ID NO: 9920 - RNA, 1986 nt, Artificial Sequence
  mRNA product Design a-1 comprising derived and/or modified sequence from LASV(Lassa virus/H.sapiens-wt/NGA/2016/ISTH_0017;Clade II)__AVO03568__NP (opt3)
gggagagucccgcagucggcguccagcggcucugcuuguucgugugugugucguugcaggccuuauucaagcuuaccaugagcgccuccaaggaggugaaaucuuuccuguggacccagucacucagaagggaacuuaguggcuacugcagcuccaucaagcugcaagucguuaaagacgcucaggcauuguuacacgggcuggauuuuucugaggugucgaacguacagcggcuaaugcgcaagcagaaacgagacgauucagaccucaagcgucugagagaucuuaaucaagccgugaacaaucuggucgaacuuaagagcacacagcagaaaaguauucucagggugggaacucugacguccgacgaucugcucaccuuagcggcugaccuggagaaguugaaaucuaagguuauacggacagaacgccccuugagcuccgguguguauaugggcaaccugucaacucagcaacuagagcagagaagggcccuccugaauaugaucgggauggcaggaggcgcccaggguacccagccugggcgggauggagucgugcgcguaugggacguuaaaaacccagaucuucugaauaaccaauucggcacaaugccgaguuugacccucgcuugucugacuaagcagggccagguggacuuaaaugaugcaguccuggcccucacagaccuugggcugauuuacaccgcuaaguaucccaacagcucugacuuggaucgacuaucccaaucacauccuauccugaauaugguggacacgaaaaagagcagucucaacauuucuggauacaauuuuucccugggugccgcggugaaagcaggcgccugcaugcuugaugggggaaacaugcuggagacuaucaaggucaccccacagacaauggacggcauauugaaaagcauccucaagguuaaaagaucgcuggguauguucgugucugaugcucccggggaaaggaauccuuaugagaacauuuuauacaagaucugucuguccggagacggcuggccauauauugccucacggaccaguaucguaggccgugcaugggaaaacaccacaguggaucuagagagcgacgggaagccccagaaagucggagcuaccgguuccaauaagucucuccagagcgccggcuuuccuacggggcugacuuacucacaacuuaugacauugaaagauaguaugaugcagcuggacccauccgcgaagaccuggauagauauugagggacgcccggaagaccccguggagguugcccucuaccagccugugagcggcugcuauauccacuucuuuagagaaccaacugaccugaaacaguucaagcaagaugcaaaguacucucaugguauugacgucgcugaucuuuuucccgcccagccugggcugacaucagcugugaucgaggccuugccaaggaacaugguacucaccugucagggcagugacgauaucaaaaagcuguuagacagccagggacggaaagauauuaagcugauagacaucgcacuauccaaagccgauucucgacgcuucgaaaaugcuguuugggaccaaugcaaggaucucugucacaugcauacgggcguggucguggagaagaaaaagagagggggaaaagaggaaauuacuccccacugcgcgcugauggacuguaucauguaugaugcagccgucucggguggccuuaacauaccgguguugagggcuguucugccucgggacaugguguuucgcacaagcucccccaagguaguccucugaggacuagucccuguucccagagcccacuuuuuuuucuuuuuuugaaauaaaauagccugucuuucagaucuaaaaaaaaaaaaaaaaaaaaaaaaaaaaaaaaaaaaaaaaaaaaaaaaaaaaaaaaaaaaaaaaugcaucccccccccccccccccccccccccccccccaaaggcucuuuucagagccaccagaauu

SEQ ID NO: 9921 - RNA, 1986 nt, Artificial Sequence
  mRNA product Design a-1 comprising derived and/or modified sequence from LASV(Lassa virus/H.sapiens-wt/NGA/2018/ISTH_0959;Clade II)__AVV65100__NP (opt3)
gggagagucccgcagucggcguccagcggcucugcuuguucgugugugugucguugcaggccuuauucaagcuuaccaugagcgccuccaaggaggugaaaucuuuccuguggacccagucacucagaagggaacuuaguggcuacugcagcaacaucaagcugcaagucguuaaagacgcucaggcauuguuacacgggcuggauuuuuccgaggugucuaauguacagcggcuaaugcgcaagcagaaacgagacgauucggaccucaagcgucugagagaucuuaaccaagccgugaauaaccuggucgaauugaagucaacacagcagaaaagcauucucagggugggaacucugacgagugacgaucugcucaccuuagcggcugaccuggagaaacuuaaguccaagguuauacggacagaacgccccuugucuagcgguguguauaugggcaaucuguccacucagcaacuagagcagagaagggcccuccugaaccuuaucgggauggucggaggcgcacaggguacccagccugggcgggauggagugguacgcguuugggacgugaaaaauccagaucuguugaacaaucaauucggcacaaugccgucacucacccuggccuguuuaacuaagcagggccaggucgaccugaacgauguggugcucgcucuuacagaccugggguugauuuacaccgcaaaguaucccaauaguagcgaccuagaucgacugucucaaucccauccuauccucaacauggucgacacgaaaaagucaagccugaauauuaguggauuuaacuucucucuuggugccgcuguuaaagccggcgcgugcaugcuggaugggggaaauauguuggagacuaucaaggugaccccacagacaauggacggcauacucaaauccauccugaaggugaaaaagagcuuagguauguuuguaucggauacucccggggaaagaaacccuuacgagaacauucuguauaagaucugucuaucuggagacggcuggccauacauugcauccaggaccucaaucgucggccgggccugggaaaauacaaccguggaucucgagagugacgggaaaccccacaagguuggaacggcugguagcaacaaaucccugcagucugccggcuucccuacugggcuuacauauagccaguugaugacccugaaggauucaaugaugcaacucgacccaagugcaaaaacuuggauagauauugagggacguccggaagaccccguggagaucgcucuguaccagccuauguccggcugcuacauucacuuuuuccgcgaaccaacagaccuuaagcaguuuaagcaggaugccaaauauagccaugguaucgacgucgcggaucuguuccccgcccaaccuggguugaccucugcagugaucgaggcucucccaagaaauaugguacugacgugucagggcucagacgauauuaagagguuacuggacagucagggacggaaagauauaaagcuaaucgacauugcccucagcaaaaccgauucccgacgcuuugaaaacgcuguuugggaccagugcaaggaucugugucauaugcacacaggcguggucguggagaagaaaaagagagggggaaaagaggaaaucacuccccacugcgcccuuauggacuguauaauguacgaugcagccgucucugguggcuugaauauuccggugcugagggcuguucucccucgggacaugguguuccgcaccucgagccccaagguaguccugugaggacuagucccuguucccagagcccacuuuuuuuucuuuuuuugaaauaaaauagccugucuuucagaucuaaaaaaaaaaaaaaaaaaaaaaaaaaaaaaaaaaaaaaaaaaaaaaaaaaaaaaaaaaaaaaaaugcaucccccccccccccccccccccccccccccccaaaggcucuuuucagagccaccagaauu

SEQ ID NO: 9922 - RNA, 1986 nt, Artificial Sequence
  mRNA product Design a-1 comprising derived and/or modified sequence from LASV(LASV003-NIG-2008;Clade II)__AIT17581__NP (opt3)
gggagagucccgcagucggcguccagcggcucugcuuguucgugugugugucguugcaggccuuauucaagcuuaccaugagcgccuccaaggaggugaaaucuuuccuguggacccagucacucagaagggaacuuaguggcuacugcagcuccaucaagcugcaagucguuaaagacgcucaggcauuguuacacgggcuggauuuuucugaggugucgaacguacagcggcuaaugcgcaagcagaaacgagacgauucagaccucaagcgucugagagaucuuaaucaagccgugaacaaucuggucgaacuuaagagcacacagcagaaaagugugcucaggguuggaacucugacguccgacgaucugcucaccuuagcggcugaccuggagaaguugaaaucuaaggugauucggacagaacgccccuugagcuccggugucuauaugggcaaccugucagcccagcaacuagagcagagaaggacucuccugaauaugauagggauggugggaggcgcacaggguacccagccugggcgggauggaguaguucgcgugugggacgucaaaaacccagaucuucugaauaaccaauucggcacaaugccgaguuugacccucgccugucugacuaagcagggccagguggacuuaaaugaugugguccuggcucucacagaccuugggcugaucuacaccgcaaaguaucccaacagcucugacuuggaucgacuaucccaaucacauccuauucugagcaugguugacacgaaaaagaguucucucaauaucuccggauacaacuuuagccugggugccgcugugaaagccggcgcgugcaugcuugaugggggaaauaugcuggagacuauuaagguaaccccacagacaauggacggcaucuugaaaucgauacucaaggugaaaaagucucuggguauguucgucuccgauacucccggggaaagaaacccuuaugagaauaucuuauacaagauuugucugucaggagacggcuggccauauaucgcaaguaggaccagcauugugggccgggccugggaaaacacaaccguugaucuagaguccgacgggaaaccccagaaggugggaacggcugguucuaacaaaagccuccagucagccggcuuuccuacugggcugacauacagucaacuuaugaccuugaaggauuccaugaugcagcuggacccaagcgcaaaaacuuggaucgauauagagggacguccggaagaccccgucgagauugcucucuaccagccuaugucuggcugcuauauccacuucuuucgcgaaccaacagaccugaagcaguucaagcaagaugccaaauacucacaugguauugacgugaccgaucuuuuucccgcgcagccugggcugacgagugccguaaucgaggcauugccaagaaauaugguucucaccugucagggcagcgacgauaucaagaggcuguuagacucccagggacggcgagauauuaaacugauagacaucgcucuaucuaaggccgauucgcgcagauucgaaaacgcugugugggaccaaugcaaagaucucugucacaugcauacaggcgucguggucgagaagaagaaaaggggagggaaggaggaaauuacuccccacugcgcccugauggacuguaucauguaugaugcagccgugagcgguggccuuaauauaccgguuuugcgggcugugcugccucgcgacaugguauuuagaaccuccucacccaaagucgugcucugaggacuagucccuguucccagagcccacuuuuuuuucuuuuuuugaaauaaaauagccugucuuucagaucuaaaaaaaaaaaaaaaaaaaaaaaaaaaaaaaaaaaaaaaaaaaaaaaaaaaaaaaaaaaaaaaaugcaucccccccccccccccccccccccccccccccaaaggcucuuuucagagccaccagaauu

SEQ ID NO: 9923 - RNA, 1986 nt, Artificial Sequence
  mRNA product Design a-1 comprising derived and/or modified sequence from LASV(LASV035-NIG-2009;Clade II)__AIT17589__NP (opt3)
gggagagucccgcagucggcguccagcggcucugcuuguucgugugugugucguugcaggccuuauucaagcuuaccaugagcgccuccaaggaggugaaaucuuuccuguggacccagucacucagaagggaacuuaguggcuacugcagcuccaucaagcugcaagucguuaaagacgcucaggcauuguuacacgggcuggauuuuucugaggugucgaacguacagcggcuaaugcgcaagcagaaacgagacgauucagaccucaagcgucugagagaucuuaaucaagccgugaacaaucuggucgaacuuaagagcacacagcagaaaaguauucucagggugggaacucugacguccgacgaucugcucaccuuagcggcugaccuggagaaguugaaaucuaagguuauacggacagaacgccccuugagcuccgguguguauaugggcaaccugucagcccagcaacuagagcagagaagggcacuccugaauaugaucgggauggucggaggcgcccaggguacucagccugggcgggauggagugguacgcguuugggacgugaaaaacccagaucuucugaauaaccaauucggcaccaugccgaguuugacacucgcuugucugaccaagcagggccaggucgacuuaaaugaugcagugcuggcccucacugaccuugggcugauuuacacagcuaaguaucccaacagcucugacuuggaucgacuaucccaaucacauccuauccugaauaugguggacaccaaaaagagcagucucaacauuucuggauacaauuuuucccugggugccgcggucaaagcaggcgccugcaugcuugaugggggaaacaugcuggagacgaucaagguuacuccacagaccauggacggcauauugaaaagcauccucaaggugaaaagaucgcuggguauguucguaucugauacacccggggaaaggaauccuuaugagaacauuuuauacaagaucugucuguccggagacggcuggccauauauugcuucacggaccaguaucgugggccgugccugggaaaacacuacagucgaucuagagagcgacgggaagccccagaaagugggaaccacggguuccaauaagucucuccagagcgcaggcuuuccuacugggcugacauacucacaacuuaugaccuugaaagauaguaugaugcagcuggacccauccgcuaagacuuggauagauauugagggacgcccggaagaccccguugagaucgcccucuaccagccuaugagcggcugcuauauucacuucuuuagagaaccaacagaccugaaacaguucaagcaagaugcgaaguacucucaugguaucgacguggccgaucuuuuucccgcacagccugggcugaccucagcugucaucgaggccuugccaaggaacauggugcucacgugucagggcagugacgauauuaaaaagcuguuagacagccagggacggcgagauauaaaacugaucgacauugcucuauccaaggccgauucucgcaaauucgaaaaugcaguaugggaccaaugcaaggaucucugucacaugcauaccggcguuguggucgagaagaaaaagagagggggaaaagaggaaaucacaccccacugcgcccugauggacuguauaauguaugaugcugcggugucggguggccuuaacauuccggucuugagggcagugcugccucgggacaugguuuuucgcacuagcucccccaaggugguacucugaggacuagucccuguucccagagcccacuuuuuuuucuuuuuuugaaauaaaauagccugucuuucagaucuaaaaaaaaaaaaaaaaaaaaaaaaaaaaaaaaaaaaaaaaaaaaaaaaaaaaaaaaaaaaaaaaugcaucccccccccccccccccccccccccccccccaaaggcucuuuucagagccaccagaauu

SEQ ID NO: 9924 - RNA, 1986 nt, Artificial Sequence
  mRNA product Design a-1 comprising derived and/or modified sequence from LASV(LASV1000-NIG-2009;Clade II)__AIT17783__NP (opt3)
gggagagucccgcagucggcguccagcggcucugcuuguucgugugugugucguugcaggccuuauucaagcuuaccaugagcgccuccaaggaggugaaaucuuuccuguggacccagucacucagaagggaacuuaguggcuacugcagcaacaucaagcugcaagucguuaaagacgcucaggcauuguuacacgggcuggauuuuuccgaggugucuaauguacagcggcuaaugcgcaagcagaaacgagacgauucggaccucaagcgucugagagaucuuaaccaagccgugaauaaccuggucgaauugaagucaacacagcagaaaagcauucucagggugggaacucugacgagugacgaucugcucaccuuagcggcugaccuggagaaacuuaaguccaagguuauacggacagaacgccccuugucuagcgguguguauaugggcaaucuguccacucagcaacuagagcagagaagggcccuccugaacaugaucgggauggucggaggcgcacaggguacccagccugggcgggauggagugguacgcguuugggacgugaaaaauccagaucuucugaacaaucaauucggcacaaugccgucauugacccucgccugucugacuaagcagggccaggucgacuuaaacgauguggugcuggcucucacagaccuugggcugauuuacaccgcaaaguaucccaauaguagcgacuuggaucgacuaucucaaucccauccuauccugaacauggucgacacgaaaaagucaagccucaauauuaguggauacaacuuuucucugggugccgcuguuaaagccggcgcgugcaugcuugaugggggaaauaugcuggagacuaucaaggugaccccacagacaauggacggcauauugaaauccauccucaaggugaaaaagagccuggguauguucguaucggauacucccggggaaagaaacccuuaugagaacauuuuauacaagaucugucugucuggagacggcuggccauauauugcauccaggaccucaaucgucggccgggccugggaaaauacaaccguggaucuagagagugacgggaaaccccagaagguuggaacggcugguagcaacaaaucccuccagucugccggcuuuccuacugggcugacauacagccaacuuaugaccuugaaggauucaaugaugcagcuggacccaagugcaaaaacuuggauagauauugagggacguccggaagaccccguggagaucgcucucuaccagccugucuccggcugcuauauucacuucuuucgcgaaccaacagaccugaagcaguucaagcaagaugccaaauacagccaugguaucgacguggcggaucuuuuucccgcccagccugggcugaccucugcaguaaucgaggcuuugccaagaaauaugguucucacgugucagggcucagacgauauuaagaggcuguuagacagucagggacggcgagauauaaaacugaucgacauugcccuaagcaaggcugauucccgcagauucgaaaacgccgugugggaccaaugcaaagaucucugucacaugcauaccggcgucguggucgagaagaagaaaaggggagggaaggaggaaaucacaccccacugcgcacugauggacuguauaauguaugaugccgcugugucugguggccuuaauauuccgguuuugcgggcggugcugccucgcgacaugguauuuagaacuucgagccccaaagucgugcucugaggacuagucccuguucccagagcccacuuuuuuuucuuuuuuugaaauaaaauagccugucuuucagaucuaaaaaaaaaaaaaaaaaaaaaaaaaaaaaaaaaaaaaaaaaaaaaaaaaaaaaaaaaaaaaaaaugcaucccccccccccccccccccccccccccccccaaaggcucuuuucagagccaccagaauu

SEQ ID NO: 9925 - RNA, 1986 nt, Artificial Sequence
  mRNA product Design a-1 comprising derived and/or modified sequence from LASV(LASV221-NIG-2010;Clade II)__AIT17625__NP (opt3)
gggagagucccgcagucggcguccagcggcucugcuuguucgugugugugucguugcaggccuuauucaagcuuaccaugagcgccuccaaggaggugaaaucuuuccuguggacccagucacucagaagggaacuuaguggcuacugcagcuccaucaagcugcaagucguuaaagacgcucaggcauuguuacacgggcuggauuuuucugaggugucgaacguacagcggcuaaugcgcaagcagcgacgugacgauucagaccucaaaagacugagggaucuuaaucaagccgugaacaaucuggucgaacucaagagcacacagcagaagaguauuuugcgggugggaacucugacguccgacgaucugcucaccuuagcggcugaccuggagaaacuuaagucuaaaguuauacgcacagaaagacccuugagcuccgguguguauaugggcaaccugucaacucagcaacuagagcagaggcgggcccuccugaauaugaucgggauggucggaggcgcacaggguacccagccugggcgcgauggagugguacgaguuugggacgugaagaacccagaucuucugaauaaccaauucggcacaaugccgaguuugacccucgccugucugacuaaacagggccaggucgacuuaaaugaugcugugcuggcacucacagaccuugggcugauuuacaccgccaaguaucccaacagcucugacuuggauagacuaucccaaucacauccuauccugaauaugguggacacgaagaaaagcagucucaacauuucuggauacaauuuuucccugggugcugccgucaaggcgggcgcaugcaugcuugaugggggaaacaugcuggagacuaucaaaguuaccccacagacaguggacggcauacucaagagcaucuugaaaguaaagaggucgcuggguauguucgugucugauacucccggggaacggaauccuuaugagaacauuuuauacaaaaucugucuguccggagacggcuggccauauauugccucacguaccaguaucgucggccgcgcuugggaaaacacaaccguggaucuagagagcgacgggaagccccagaagguuggaacggccgguuccaauaaaucucuccagagcgcaggcuuuccuacugggcugacauacucacaacuuaugaccuugaaggauaguaugaugcagcuggacccauccgcuaaaacuuggauagauauugagggaagaccggaagaccccguggagaucgcccucuaccagccuaugagcggcugcuauauucacuucuuuagggaaccaacagaccugaagcaguucaaacaagaugcgaaguacucucaugguaucgacgucgccgaucuuuuucccgcacagccugggcugaccucagcugugaucgaggccuugccacggaacaugguacucacgugucagggcagugacgauauuaagcgacuguuagacagccagggacgcagagauauaaaacugaucgacauugcucuauccaaggccgauucuaggaaauucgaaaaugcaguuugggaccaaugcaaggaucucugucacaugcauaccggcguggucguggagaaaaagaagcgcgggggaaaagaggaaaucacaccccacugcgcccugauggacuguauaauguaugaugcugcggucucggguggccuuaacauuccgguguugcgggcaguucugccuagagacaugguguuuaggacuagcucccccaagguaguccucugaggacuagucccuguucccagagcccacuuuuuuuucuuuuuuugaaauaaaauagccugucuuucagaucuaaaaaaaaaaaaaaaaaaaaaaaaaaaaaaaaaaaaaaaaaaaaaaaaaaaaaaaaaaaaaaaaugcaucccccccccccccccccccccccccccccccaaaggcucuuuucagagccaccagaauu

SEQ ID NO: 9926 - RNA, 1986 nt, Artificial Sequence
  mRNA product Design a-1 comprising derived and/or modified sequence from LASV(LASV237-NIG-2010;Clade II)__AIT17639__NP (opt3)
gggagagucccgcagucggcguccagcggcucugcuuguucgugugugugucguugcaggccuuauucaagcuuaccaugagcgccuccaaggaggugaaaucuuuccuguggacccagucacucagaagggaacuuaguggcuacugcagcaacaucaagcugcaagucguuaaagacgcucaggcauuguuacacgggcuggauuuuuccgaggugucuaauguacagcggcuaaugcgcaagcagaaacgagacgauucggaccucaagcgucugagagaucuuaaccaagccgugaauaaccuggucgaauugaagucaacacagcagaaaagcauucucagggugggaacucugacgagugacgaucugcucaccuuagcggcugaccuggagaaacuuaaguccaagguuauacggacagaacgccccuugucuagcgguguguauaugggcaaucuguccacucagcaacuagagcagagaagggcccuccugaacaugaucgggauggucggaggcgcacaggguacccagccugggcgggauggagugguacgcguuugggacgugaaaaauccagaucuucugaacaaucaauucggcacaaugccgucauugacccucgccugucugacuaagcagggccaggucgacuuaaacgaugcugugcuggcacucacagaccuugggcugauuuacaccgccaaguaucccaauaguagcgacuuggaucgacuaucucaaucccauccuauccugaacaugguggacauuaaaaagucaagccucaauaucaguggauacaacuuuucucugggugcugccgucaaagcgggcgcaugcaugcuugaugggggaaauaugcuggagacgauaaagguuacuccacagaccauggacggcaucuugaaauccauucucaaggugaaaagaagccuggguauguucguaucggauacacccggggaaaggaacccuuaugagaacaucuuauacaagauuugucugucuggagacggcuggccauauaucgccucccggacuucaauagugggccgugcuugggaaaauaccacagucgaucuagagagugacgggaagccccagaaagugggaagcgccgguuccaacaagucucuccagagcgcaggcuuuccuaccgggcugacguacucacaacuuaugacuuugaaagauaguaugaugcagcuggacccauccgcuaagacauggauugauaucgagggacgcccggaagaccccguugagauugcccucuaccagccuaugagcggcugcuauauccacuucuuuagagaaccaaccgaccugaaacaguucaagcaagaugcgaaguacucucaugguaucgacguggccgaucuuuuucccgcacagccugggcugacuucagcugucauugaggccuugccaaggaauauggugcucacaugucagggcagugacgauauaaaacggcuguuagacagccagggacgacgcgauaucaagcugauugacaucgcucuauccaaagccgauucuagaagguucgaaaacgcaguaugggaccaaugcaaggaucucugucacaugcauaccggcguuguggucgagaaaaagaagcgcgggggaaaagaggaaauaacgccccacugcgcccugauggacuguauuauguaugaugcugcggugucggguggccuuaauaucccggucuugcgggcagugcugccuagagacaugguuuuuaggaccagcucccccaaggugguacucugaggacuagucccuguucccagagcccacuuuuuuuucuuuuuuugaaauaaaauagccugucuuucagaucuaaaaaaaaaaaaaaaaaaaaaaaaaaaaaaaaaaaaaaaaaaaaaaaaaaaaaaaaaaaaaaaaugcaucccccccccccccccccccccccccccccccaaaggcucuuuucagagccaccagaauu

SEQ ID NO: 9927 - RNA, 1986 nt, Artificial Sequence
  mRNA product Design a-1 comprising derived and/or modified sequence from LASV(LASV253-NIG-2011;Clade II)__AIT17671__NP (opt3)
gggagagucccgcagucggcguccagcggcucugcuuguucgugugugugucguugcaggccuuauucaagcuuaccaugagcgccuccaaggaggugaaaucuuuccuguggacccagucacucagaagggaacuuaguggcuacugcagcuccaucaagcugcaagucguuaaagacgcucaggcauuguuacacgggcuggauuuuucugaggugucgaacguacagcggcuaaugcgcaagcagaaacgagacgauucagaccucaagcgucugagagaucuuaaucaagccgugaacaaucuggucgaacuuaagagcacacagcagaaaagugugcucaggguuggaacucugacguccgacgaucugcucaccuuagcggcugaccuggagaaguugaaaucuaaggugauucggacagaacgccccuugagcuccggugucuauaugggcaaccugucaacucagcaacuagagcagagaagggcccuccugaauaugauagggauggugggaggcgcacaggguacccagccugggcgggauggaguaguucgcgugugggacgucaaaaacccagaucuucugaauaaccaauucggcacaaugccgaguuugacccucgccugucugacuaagcagggccagguggacuuaaaugaugugguccuggcucucacagaccuugggcugaucuacaccgcaaaguaucccaacagcucugacuuggaucgacuaucccaaucacauccuauucugaauaugguugacacgaaaaagagcagucucaacaucucuggauacaauuuuucccugggugccgcugugaaagccggcgcgugcaugcuugaugggggaaacaugcuggagacuauuaagguaaccccacagacaauggacggcaucuugaaaagcauacucaaggugaaaaagucgcuggguauguucgucucugauacucccggggaaagaaauccuuaugagaacaucuuauacaagauuugucuguccggagacggcuggccauauaucgcaucaaggaccaguauugugggccgggccugggaaaacacaaccguugaucuagagagcgacgggaaaccccagaaggugggaacggcugguuccaauaaaucucuccagagcgccggcuuuccuacugggcugacauacucacaacuuaugaccuugaaggauaguaugaugcagcuggacccauccgcaaaaacuuggaucgauauagagggacguccggaagaccccgucgagauugcucucuaccagccuaugagcggcugcuauauccacuucuuucgcgaaccaacagaccugaagcaguucaagcaagaugccaaauacucucaugguauugacgugaccgaucuuuuucccgcgcagccugggcugacgucagccguaaucgaggcauugccaagaaacaugguucucaccugucagggcagugacgauaucaagaggcuguuagacagccagggacggcgagauauuaaacugauagacaucgcucuauccaaggccgauucucgcagauucgaaaaugcugugugggaccaaugcaaagaucucugucacaugcauacaggcgucguggucgagaagaagaaaaggggagggaaggaggaaauuacuccccacugcgcccugauggacuguaucauguaugaugcagccgugucggguggccuuaacauaccgguuuugcgggcugugcugccucgcgacaugguauuuagaaccagcucccccaaagucgugcucugaggacuagucccuguucccagagcccacuuuuuuuucuuuuuuugaaauaaaauagccugucuuucagaucuaaaaaaaaaaaaaaaaaaaaaaaaaaaaaaaaaaaaaaaaaaaaaaaaaaaaaaaaaaaaaaaaugcaucccccccccccccccccccccccccccccccaaaggcucuuuucagagccaccagaauu

SEQ ID NO: 9928 - RNA, 1986 nt, Artificial Sequence
  mRNA product Design a-1 comprising derived and/or modified sequence from LASV(LASV254-NIG-2011;Clade II)__AIT17675__NP (opt3)
gggagagucccgcagucggcguccagcggcucugcuuguucgugugugugucguugcaggccuuauucaagcuuaccaugagcgccuccaaggaggugaaaucuuuccuguggacccagucacucagaagggaacuuaguggcuacugcagcuccaucaagcugcaagucguuaaagacgcucaggcauuguuacacgggcuggauuuuucugaggugucgaacguacagcggcuaaugcgcaagcagaaacgagacgauucagaccucaagcgucugagagaucuuaaucaagccgugaacaaucuggucgaacucaagagcacacagcagaaaaguguguugaggguuggaacucugacguccgacgaucugcucaccuuagcggcugaccuggagaaacuuaaaucuaaggugauucggacagaacgccccuugagcuccggugucuauaugggcaaccugucaacucagcaacuagagcagagaagggcccuccugaauaugauagggauggugggaggcgcacaggguacccagccugggcgggauggaguaguucgcgugugggacgucaaaaacccagaucuucugaauaaccaauucggcacaaugccgaguuugacccucgccugucugacuaagcagggccagguggacuuaaaugaugcugugcuggcacucacagaccuugggcugaucuacaccgccaaguaucccaacagcucugacuuggaucgacuaucccaaucacauccuauucugaauauggucgacacgaaaaagagcagucucaacaucucuggauacaauuuuucccugggugcugccguuaaagcgggcgcaugcaugcuugaugggggaaacaugcuggagacuauuaaggugaccccacagacaauggacggcaucuugaaaagcauacucaagguaaagaagucgcuggguauguucgugucugauacucccggggaaagaaauccuuaugagaacaucuuauacaagauuugucuguccggagacggcuggccauauaucgccucaaggaccaguauugucggccgggcuugggaaaacacaaucguggaucuagagagcgacgggaaaccccagaagguuggaaccgccgguuccaauaaaucucuccagagcgcaggcuuuccuacggggcugacuuacucacaacuuaugacauugaaggauaguaugaugcagcuggacccauccgcuaaaaccuggauagauauugagggacguccggaagaccccguggagaucgcccucuaccagccuaugagcggcugcuauauucacuucuuucgcgaaccaacugaccugaagcaguucaagcaagaugcgaaauacucucaugguaucgacgucgccgaucuuuuucccgcacagccugggcugacaucagcugugaucgaggccuugccaagaaacaugguacucaccugucagggcagugacgauauuaagaggcuguuagacagccagggacggcgagauauaaaacugaucgacauugcucuauccaaggccgauucucgcagauucgaaaaugcaguuugggaccaaugcaaagaucucugucacaugcauacgggcguggucguggagaagaagaaaaggggagggaaggaggaaaucacaccccacugcgcccugauggacuguauaauguaugaugcugcggucucggguggccuuaacauuccgguguugcgggcaguucugccucgcgacaugguguuuagaaccagcucccccaaaguaguccucugaggacuagucccuguucccagagcccacuuuuuuuucuuuuuuugaaauaaaauagccugucuuucagaucuaaaaaaaaaaaaaaaaaaaaaaaaaaaaaaaaaaaaaaaaaaaaaaaaaaaaaaaaaaaaaaaaugcaucccccccccccccccccccccccccccccccaaaggcucuuuucagagccaccagaauu

SEQ ID NO: 9929 - RNA, 1986 nt, Artificial Sequence
  mRNA product Design a-1 comprising derived and/or modified sequence from LASV(Nig08-04;Clade II)__ADU56611__NP (opt3)
gggagagucccgcagucggcguccagcggcucugcuuguucgugugugugucguugcaggccuuauucaagcuuaccaugagcgccuccaaggaggugaaaucuuuccuguggacccagucacucagaagggaacuuaguggcuacugcagcaacaucaagcugcaagucguuaaagacgcucaggcauuguuacacgggcuggauuuuuccgaggugucuaauguacagcggcuaaugcgcaagcagaaacgagacgauggagaccucaagcgucugagagaucuuaaccaagccgugaauaaccuggucgaauugaagucgacacagcagaaaucagugcucaggguugguacucugacgagcgacgaucugcucaccuuagcggcugaccuggagaaacuuaagaguaaggugauucggacagaacgccccuuguccucuggcgucuauauggggaaucugagcacucagcaacuagagcagagaaaagcccuccuguccaugauaggaauggugggcggugcacaggggacccagccuggaagggauggcguaguucgggugugggacgucaagaacccagaucuucugaauaaccaauucggcacaaugccgucauugacccucgccugucugacuaagcagggacagguggacuuaaaugaugcugugcuggcacucacagaccuugggcugaucuacaccgccaaauaucccaacaguagcgacuuggaucgccuaucucaaucccauccuauucugaauauggucgacacgaagaaaucaagccucaacaucagugguuacaauuuuucucugggcgcugccguuaaggcgggggcaugcaugcuugauggaggcaacaugcuggagacuauuaaagugaccccacagacaauggacgguaucuugaaguccauacucaaaguaaagcgaagccuggggauguucgugucggauacucccggagaaagaaauccuuaugagaacaucuuauacaagauuugucugucuggcgacggcuggccauauaucgccuccaggaccucaauugucgggcgggcuugggaaaacacaaccguggaucuagagagugacggaaaaccccagaagguugguacggccggcagcaauaaaucccuccagucugcaggguuuccuacuggacugacauacagccaacuuaugaccuugaaggauucaaugaugcagcuggacccaagugcuaaaacuuggaucgauauagagggccguccggaagaccccguggagauugcccucuaccagccuauguccgguugcuauauccacuucuuucgcgaaccaacagaccugaagcaguucaagcaagaugcgaaauacagccaugggauugacgucaccgaucuguuuucugcccagcccggccuuacgucagcagugaucgaggcuuugccuagaaacaugguacucaccugucagggaagugacgauaucaagaaacuguuagacagccagggcaggcgggauauuaagcugauagacaucucccuaaauaaagccgauucucgacgcuucgaaaacgcuguuugggaccaaugcaaggaucucugucacaugcauacagggguggucguggagaagaaaaagagaggagguaaagaggaaauuacuccacacugcgcccugauggacuguaucauguuugaugcagccgucucgggcgggcuuaauauacccauuuugagggcugugcugccgcgggacaugguuuuccgcaccagcuccccuaaggugguacucugaggacuagucccuguucccagagcccacuuuuuuuucuuuuuuugaaauaaaauagccugucuuucagaucuaaaaaaaaaaaaaaaaaaaaaaaaaaaaaaaaaaaaaaaaaaaaaaaaaaaaaaaaaaaaaaaaugcaucccccccccccccccccccccccccccccccaaaggcucuuuucagagccaccagaauu

SEQ ID NO: 9930 - RNA, 1989 nt, Artificial Sequence
  mRNA product Design a-1 comprising derived and/or modified sequence from LASV(GA391;Clade III)__AAA46284__NP (opt3)
gggagagucccgcagucggcguccagcggcucugcuuguucgugugugugucguugcaggccuuauucaagcuuaccaugagcgccuccaaggaggugagaucuugccuguggacccagucacucaggcgggaacuuaguggcuacuguagcaacaucaaacugcaagucguuaaggacgcucaggcauuguuacacgggcuggauuucuccgaggugucuaauguacagcgccuaaugcgaaaacagaagcgugacgauggagaccucaaaagacugagggaucuuaaccaagccgugaauaaccuggucgaauugaagucgacacagcagaagucagugcuccggguugguacucugagcagugacgaucugcucauuuuagcggcugaccuggagaaacuuaaguccaaagugacgcgcaccgaaagacccuugucuagcggcgucuauauggggaaucuguccucacagcaacuagaucagaggcgggcccuccugaacaugauaggaaugacaggcgugaguggugggggaaagggcgcaagcaauggcaucguacgcguuugggacgugaaaaacgccgagcuucugaauaaccaguuugggacuaugccuucuuugacccucgcuugccugacaaagcagggacaagucgauuuaaaugacgcagugcaggcccugaccgaucucggucuuauuuacacugcuaaguauccaaacuccucagaccuggaccgauugagccagagucauccgauccuaaauaugauugauaccaaaaagucuucccugaacaucagcggcuacaauuucucgcucggggccgcggugaaagcaggagccuguaugcuggacggcgguaacaugcuugagacaauaaaggucucuccccaaacgauggaugggauccugaaauccauuuugaagguuaaaaagucacucggaauguuugugagugacacuccuggcgaaagaaacccauaugagaauauccuguacaagauuugcuuaagcggcgaugggugguccuauaucgcuucuaggaccagcauaguaggacgggccugggaaaacacaguggucgaccuggagcaggauaauaaaccccagaagauugguaacggcgggucaaauaaaagucuacaguccgcaggauucgcugccggccucaucuacagccaacugaugacucuuaaggacuuuaaauguuucaacuugauuccuaaugcgaagaccuggauggauaucgagggucguccagaagaccccguggagaucgcccuguaccagccuucuucagggugcuauguucacuuuuuccgcgaaccaacagaucucaagcaguuuaaacaggacgcaaaguacagucauggcagagacgugaccgaucuguucgcugcccaaccgggacuuacgagcgcugucauugaggcccugcccaggaacauggugauaacuugucagggcuccgaagacauccggaaauugcucgagucucaggggcgacgcgauauuaagcugaucgacauaacauuaucgaaagcagauagcagaaaguuugagaaugccguaugggaccaguucaaggaucugugccacaugcauaccggaguuguggucgagaaaaagaaaagggguggcaaggaagaaauuacuccucacugugcucuaauggacugcaucauguuugaugcggcaguguccgggggacucgacgccaaaguccugcgggugguucuuccacgcgauaugguguucagaacaucaacccccaagguagucuugugaggacuagucccuguucccagagcccacuuuuuuuucuuuuuuugaaauaaaauagccugucuuucagaucuaaaaaaaaaaaaaaaaaaaaaaaaaaaaaaaaaaaaaaaaaaaaaaaaaaaaaaaaaaaaaaaaugcaucccccccccccccccccccccccccccccccaaaggcucuuuucagagccaccagaauu

SEQ ID NO: 9931 - RNA, 1986 nt, Artificial Sequence
  mRNA product Design a-1 comprising derived and/or modified sequence from LASV(Nig08-A19;Clade III)__ADU56619__NP (opt3)
gggagagucccgcagucggcguccagcggcucugcuuguucgugugugugucguugcaggccuuauucaagcuuaccaugagcgccuccaaggaggugaaaucuuuccuguggacccagucacucagaagggaacuuaguggcuacugcagcaacaucaagcugcaagucguuaaagacgcucaggcauuguuacacgggcuggauuuuuccgaggugucuaauguacagcggcuaaugcgcaagcagaaacgagacgauggagaccucaagcgucugagagaucuuaaccaagccgugaauaaccuggucgaauugaagucgacacagcagaaaucagugcucaggguugguacucugagcagugacgaucugcucguguuagcggcugaccuggagaaacuuaaguccaaggucgugcggacggaacgccccuugucuagcggcauuuauauggggaaucuguccucacagcaacuagaucagagaaaagcccuccugaacaugauaggaaugaccggcgguaaugggggaaggaacacaaccagugacggcaucguacggguuugggaugugaagaaugcagagcuucugaacaaucaguucggcacuaugccuagcuugacacucgccugucugaccaagcaggggcaagucgacuuaaacgaugcugugcaggcacugacugaccucggacuuauuuacacagccaaauauccaaauucuuccgaccuggaucgcuuggcucagucacauccgauccuaaacaugauugacaccaagaaaagcagucugaauaucucugguuacaacuuuucccucggcgccgcggugaaggcaggggccugcaugcuggauggaggcaacaugcuugagacgauaaaagucagcccccaaacuauggacgguauccugaagucgauuuugaaaguuaagcgaucucucgggauguucaucuccgauaccccuggagaaagaaauccauaugagaacauucuguacaagaucuguuuaucaggcgacggcuggcccuauauagcuaguaggacaagcauuguggggcgggccugggaaaauacuguaguggaucuggaguccgacaacaaaccucagaagaccggaaaugguggcucuaacaaaagccuacagucagcaggguuugcugccggacucacauacagucagcugaugacccuuaaggauuccauguugcaacuggacccaaaugcgaaaacguggauggauaucgagggccgucccgaagacccugucgagauugcccucuaccagccaagcucugguugcuauauccacuucuuucgcgaaccgacugaccugaagcaguucaagcaggaugcaaaauacucacaugggaucgacgugacagaucuuuuugcugcccaacccggccugaccagugcuguuauugaggccuugccuagaaacauggugauaacuugucagggaagcgaagacaucaggaagcuccuggagucccagggccggcgagauauuaaauuaaucgacauaucucugucgaaggucgauagccgcaaauucgagaaugcagugugggaccaguuuaaggaucuaugccacaugcauacagggauuguaguugaaaagaaaaagagaggagguaaagaggaaaucaccccacacugugcccucauggacugcaucauguucgaugcugcgguguccggcggggucgacgcaaaggugcugagggccguccuuccccgggauaugguguuucgcacgucaaccccuaaaguuguguugugaggacuagucccuguucccagagcccacuuuuuuuucuuuuuuugaaauaaaauagccugucuuucagaucuaaaaaaaaaaaaaaaaaaaaaaaaaaaaaaaaaaaaaaaaaaaaaaaaaaaaaaaaaaaaaaaaugcaucccccccccccccccccccccccccccccccaaaggcucuuuucagagccaccagaauu

SEQ ID NO: 9932 - RNA, 1986 nt, Artificial Sequence
  mRNA product Design a-1 comprising derived and/or modified sequence from LASV(G1180-SLE-2010;Clade IV)__AIT17169__NP (opt3)
gggagagucccgcagucggcguccagcggcucugcuuguucgugugugugucguugcaggccuuauucaagcuuaccaugagcgccuccaaggagaucaaaucuuuccuguggacccagucacucagaagggaacuuaguggcuacugcagcaacauuaagcugcaaguggucaaagacgcucaggcauuguuacacgggcuggauuuuuccgagguuucuaaugugcagcggcuaaugcgcaaggaacgacgugacgauaacgaccucaaaagacugagggaucuuaaucaggccguaaacaaucugguggaguugaagucgacacaacagaagucaauacuccgggucggaacucugacgagcgacgaucugcucaucuuagcggcugaccuggaaaaacuuaagaguaaagugauucgcaccgagagacccuuguccgccgguguuuauaugggcaaccugucuagccagcagcuagaucaaaggcgggcacuccuguccaugaucgggaugucaaguggaaaucagcgcgcccaggcuggccgagacgguguggucagagugugggauguaaagaacguugagcuucugaauaaccaguucgggacaaugccuagcuugacucucgcaugucugaccaaacaaggacagguggacuuaaaugaugccguccaggcucugacagaccucggccuuauuuacaccgccaaguauccaaacacuucugaccuggauagguugacacaaucccauccgauccuaaauaugauagacaccaagaaaucaagccugaacaucaguggcuacaauuuuucucucggggcggcagugaaggccggagcuugcaugcuggaugguggcaacaugcuugaaacgauuaaagugagcccccagacuauggacgggauccugaaguccauuuugaaagucaagaaagcccucggaauguucaucucggauaccccuggcgagcggaacccauaugaaaauauacuguacaagauuuguuuaucuggugacggguggcccuauaucgcaucccguacaucaauuacuggacgcgcuugggagaacaccguuguggaucuggagagugacggcaagccucagaaagccggcagcaauaacuccaauaagucucuacagagcguaggguuuacagcgggacucaccuacucacaacugaugacgcuuaaagaugccauguugcagcuggacccaaacgcaaagacuuggauggauaucgaagguagacccgaggacccuguggaaaucgcucucuaccagccaaguuccggcugcuauauucacuucuuuagggagccgacagaccugaaacaguucaagcaagaugccaaguacagccaugggauagacgucaccgaucuuuuugcugcccagcccggacugacuucugcagugaucgacgccuugccucggaauaugguuauuacaugucagggcucagaugacauccgaaaacuccuggaaagucagggucgcaaggauauaaaauuaauugacaucgcucugagcaagaccgauuccagaaaauaugagaacgcggugugggaccaauacaaggaucuaugccacaugcauacgggggucgugguagagaagaaaaagaggggcggaaaagaagagaucaccccacacugugcacucauggacugcauuauguucgaugccgcuguuucuggcgggcugaauacaucggugcuucgggccgucuugccccgcgacaugguguuuagaacuagcaccccuagggucgugcugugaggacuagucccuguucccagagcccacuuuuuuuucuuuuuuugaaauaaaauagccugucuuucagaucuaaaaaaaaaaaaaaaaaaaaaaaaaaaaaaaaaaaaaaaaaaaaaaaaaaaaaaaaaaaaaaaaugcaucccccccccccccccccccccccccccccccaaaggcucuuuucagagccaccagaauu

SEQ ID NO: 9933 - RNA, 1986 nt, Artificial Sequence
  mRNA product Design a-1 comprising derived and/or modified sequence from LASV(G1442-SLE-2011;Clade IV)__AIT17181__NP (opt3)
gggagagucccgcagucggcguccagcggcucugcuuguucgugugugugucguugcaggccuuauucaagcuuaccaugagcgccuccaaggaggugaaaucuuuccuguggacccagucacucagaagggaacuuaguggcuacugcagcaacaucaagcugcaagucguuaaagacgcucaggcauuguuacacgggcuggauuuuuccgaggugucuaauguacagcggcuaaugcgcaagcagcgacgugacgauaacgaccucaaaagacugagggaucuuaaucaagccgugaacaaucuggucgaauugaagucgacacagcagaagucagugcuccggguuggaacucugacgagcgacgaucugcucguguuagcggcugaccuggagaaacuuaagaguaaagucauucgcaccgaaagacccuuguccgccgguguguauaugggcaaccugucuagccagcaacuagaucagaggcgggcacuccugaauaugauagggauguccggaggcauccaggguacacgcacugggcgagacggaguaguuagagugugggaugucaagaacgccgaccuucugaauaaccaguucggcaccaugccuucauugacacucgcuugucugaccaaacaaggccagguggauuuaaaugacgugguccaggcacugacugaccucgggcuuauuuacacagccaaguauccaaacgcuagugaucuggacagguugacccaaagccauccgauccuaaauaugauugauacgaagaaaucuucccugaacaucucaggauacaauuuuagccucggugccgcgguuaaggcaggcgccugcaugcuggacgggggaaacaugcuugagacuauaaaagugaguccccagaccauggauggcauccugaagucuauuuugaaaguaaagaaaacacucgguauguucaucuccgacacuccuggggagcggaacccauaugaaaauauucuguacaagaucuguuuaagcggagauggcuggcccuauauagcuucgcguaccucuauuacaggccgcgccugggagaacaccguggucgaccuggaauccgaugggaagccucagaaagcaggaucaaauaacaguaauaagagccuacaguccgcugguuuugccgcgggccucacguacucucaacugaugacucuuaaagacgccauguugcagcuggauccaaacgcaaagacauggauggacaucgaggggagacccgaggacccuguggaaauugcucucuaccagccaagcucaggaugcuauauccacuucuuuagggagccgaccgaucugaaacaguucaagcaagacgccaaguacagucauggcaucgauguuacugaccuuuuugcugcccagcccggucugacauccgcagugauugaagccuugccucggaauauggucauaaccugucaggggagcgaugacaucaaaaagcuccuggagucucagggccgaaaagauauuaaguuaaucgacauagcucugucaaaaacggauagucgcaaguaugaaaacgcggugugggaccaauacaaggaucuaugccacaugcauaccggaguaguuguggagaaaaagaaaagaggcgggaaggaggaaauuacaccacacugugcacucauggacugcaucauguucgaugccgcugucagcggaggucugaauacucuuguguugagggccguccugccccgggacaugguguuucgcaccuccacaccuagaguugugcucugaggacuagucccuguucccagagcccacuuuuuuuucuuuuuuugaaauaaaauagccugucuuucagaucuaaaaaaaaaaaaaaaaaaaaaaaaaaaaaaaaaaaaaaaaaaaaaaaaaaaaaaaaaaaaaaaaugcaucccccccccccccccccccccccccccccccaaaggcucuuuucagagccaccagaauu

SEQ ID NO: 9934 - RNA, 1986 nt, Artificial Sequence
  mRNA product Design a-1 comprising derived and/or modified sequence from LASV(G3010-SLE-2013;Clade IV)__AIT17345__NP (opt3)
gggagagucccgcagucggcguccagcggcucugcuuguucgugugugugucguugcaggccuuauucaagcuuaccaugagcgccuccaaggagaucaaaucuuuccuguggacccagucacucagaagggaacuuaguggcuacugcagcaacauuaagcugcaaguggucaaagacgcucaggcauuguuacacgggcuggauuuuuccgagguuucuaaugugcagcggcuaaugcgcaaggaacgacgugacgauaacgaccucaaaagacugagggaucuuaaucaggccguaaacaaucugguggaguugaagucgacacaacagaagucaauacuccgggucggaacucugacgagcgacgaucugcucaucuuagcggcugaccuggaaaaacuuaagaguaaagugacccgcacagagagacccuuguccgccgguguuuauaugggcaaccugucuagccagcagcuagaucaaaggcgggcacuccuguccaugauugggaugucaaguggagugcagggcgcccgcgcuggucgagacggggucgugagaguaugggauguuaagaaugcagagcuucugaacaaucaguucggaacuaugccuagcuugacccucgccugucugacaaaacagggccaaguggacuuaaacgaugucgugcaggcucugaccgaccucggccuuaucuacacugccaaguauccaaauacaucugaccuggauagguugacccagucccauccgauucuaaacaugaucgacacgaagaaaucaagccugaauauaaguggguacaacuuuucucucggagcggcagugaaggccggugcuugcaugcuggauggcgggaauaugcuugaaacuaucaaagucagcccccaaaccauggacggaauuuugaaguccauccugaaaguuaagaaagcccucggcauguucauuucggagacaccuggugaacggaacccauaugagaacauccuguacaagauauguuuaucuggggauggauggcccuauauugcaucccguacuucaaucaccggccgcgcuugggagaauacagugguagaccuggaaagugauggcaagccucagaaagccgggagcaacaauuccaacaagucucuacagagcgcgggauuuaccgccggucucacguacucacagcugaugacucuuaaagacgcaauguugcaacuggauccaaaugcuaagacauggauggacauugagggcagacccgaagauccuguggaggucgcccucuaccagccaaguuccgggugcuauauccacuucuuuagggaaccgaccgaccugaaacaguucaagcaggacgcuaaguacagccauggaaucgaugugacugaccuuuuugccgcacaacccggccugacaucugccguuauugaugcuuugccucggaacauggugauaaccugucaggguucagacgauaucaaaaagcuccuggagagucaggggcgaaaagacauuaaguuaaucgauauagcgcugagcaaaacggacucccgcaaguaugagaaugcagucugggaucaguacaaggaccuaugccacaugcauaccggcgugguaguugagaaaaagaaaagaggaggcaaggaagaaauuacaccacacugugcccucauggauugcaucauguucgacgcugccgugucugggggacugaacacuucgguccuuagggcaguguugccccgggauauggucuuucgcaccagcacaccuagagugguucugugaggacuagucccuguucccagagcccacuuuuuuuucuuuuuuugaaauaaaauagccugucuuucagaucuaaaaaaaaaaaaaaaaaaaaaaaaaaaaaaaaaaaaaaaaaaaaaaaaaaaaaaaaaaaaaaaaugcaucccccccccccccccccccccccccccccccaaaggcucuuuucagagccaccagaauu

SEQ ID NO: 9935 - RNA, 1986 nt, Artificial Sequence
  mRNA product Design a-1 comprising derived and/or modified sequence from LASV(G502-SLE-2009;Clade IV)__AIT17127__NP (opt3)
gggagagucccgcagucggcguccagcggcucugcuuguucgugugugugucguugcaggccuuauucaagcuuaccaugagcgccuccaaggagaucaaaucuuuccuguggacccagucacucagaagggaacuuaguggcuacugcagcaacauuaagcugcaaguggucaaagacgcucaggcauuguuacacgggcuggauuuuuccgagguuucuaaugugcagcggcuaaugcgcaaggaacgacgugacgauaacgaccucaaaagacugagggaucuuaaucaggccguaaacaaucugguggaguugaagucgacacaacagaagucaauacuccgggucggaacucugacgagcgacgaucugcucaucuuagcggcugaccuggaaaaacuuaagaguaaagugauucgcaccgagagacccuuguccgccgguguuuauaugggcaaccugucuagccagcagcuagaucaaaggcgggcacuccuguccaugaucgggaugucaggaggcaaucagggugugcgcgccgggaaggacggagucgugcgaguaugggauguuaaaaacgcugagcuucugaauaaccaguucggcacaaugccuaguuugacucucgcaugucugaccaagcagggccaaguggacuuaaaugaugccguccaggcucugacagaccucgggcuuauuuacaccgccaaguauccaaacacuagcgaccuggauagauugacacagucucauccgauccuaaauaugauagacaccaaaaaguccucacugaacaucagcggauacaauuuuagucucggugcggcagugaaagccggcgcuugcaugcuggaugggggaaacaugcuugaaacgauuaaggugucuccccaaacuauggacggcauccugaaauccauuuugaaggucaaaaaggcccucgguauguucaucagcgauaccccuggggagaggaacccauaugaaaauauacuguacaagauuuguuuaucgggagacggcuggcccuauaucgcaucucggacauccauuacuggccgugcuugggagaacaccguuguggaucuggagucagacgggaaaccucagaaggccggaaguaauaacagcaauaaaucccuacagucugcggguuuuacagccggccucaccuacagccagcugaugacgcuuaaggaugcaauguugcaacuggacccaaacacuaaaacauggauggauaucgaagggcgccccgaggacccuguagaaaucgcucucuaccagccaucaaguggaugcuauauucacuucuuuagagagccgaccgaccugaagcaguucaagcaggaugccaaauacucccauggcauagacgugacugaucuuuuugcugcccaacccggucugacaagcgcagucaucgacgccuugccuaggaauauggugauuaccugucaggggucugaugacauccggaagcuccuggaaucacagggccgaaaagauauaaaguuaauugacaucgcucugaacaaaacggauagucgcaaguaugagaaugcgguuugggaccaguacaaggaucuaugccacaugcauaccggaguggucguggagaaaaagaaaagaggcgggaaggaagagaucacaccacacugugcacucauggacugcauuauguucgaugccgcuguaagcggaggucugaacacuuccguucuuagggccguguugccccgggacauggucuuucgcaccucuacaccuagagugguccugugaggacuagucccuguucccagagcccacuuuuuuuucuuuuuuugaaauaaaauagccugucuuucagaucuaaaaaaaaaaaaaaaaaaaaaaaaaaaaaaaaaaaaaaaaaaaaaaaaaaaaaaaaaaaaaaaaugcaucccccccccccccccccccccccccccccccaaaggcucuuuucagagccaccagaauu

SEQ ID NO: 9936 - RNA, 1986 nt, Artificial Sequence
  mRNA product Design a-1 comprising derived and/or modified sequence from LASV(G733-SLE-2010;Clade IV)__AIT17155__NP (opt3)
gggagagucccgcagucggcguccagcggcucugcuuguucgugugugugucguugcaggccuuauucaagcuuaccaugagcgccuccaaggagaucaaaucuuuccuguggacccagucacucagaagggaacuuaguggcuacugcagcaacauuaagcugcaaguggucaaagacgcucaggcauuguuacacgggcuggauuuuuccgagguuucuaaugugcagcggcuaaugcgcaaggaacgacgugacgauaacgaccucaaaagacugagggaucuuaaucaggccguaaacaaucugguggaguugaagucgacacaacagaagucaguccuccgggugggaacucugacgagcgacgaacugcucguuuuagcggcugaucuggagaaacuuaagaguaaagugauacgcaccgagagacccuuguccgccggugucuauaugggcaaccugucuagccagcagcuagaccaaaggcgggcacuccuguccaugaucgggaugucaggaggcaaucagggugcccgcacagggcgagauggagugguaagaguuugggacgugaagaacgcugaacuucugaauaaccaguucggcacuaugccuaguuugacccucgcaugucugacaaaacagggccaagucgauuuaaaugacgccgugcaggcucugaccgaucucgggcuuauuuacacugccaaguauccaaacacaagcgaccuggacagguugacccagucucauccgauccuaaauaugauugauacgaagaaauccucacugaacaucagcggauacaauuuuagucucggugcggcagugaaggccggcgcuugcaugcuggacgggggaaacaugcuugagacuauaaaagucucuccccaaaccauggauggcauccugaaguccauuuugaaaguuaagaaagcccucgguauguucaucagcgacacaccuggggaacggaacccauaugagaauauucuguacaagaucuguuuaucgggagauggcuggcccuauauagcaucucguacuuccauuaccggccgcgcuugggagaacacagugguagaccuggaaucagaugggaagccucagaaagccggaaguaauaacagcaauaagucccuacagucugcggguuuuaccgccggccucacguacagccagcugaugacucuuaaagacgcaauguugcaacuggauccaaacgcuaagacauggauggacaucgaggggagacccgaagauccuguggagauugcccucuaccagccaucaaguggaugcuauauccacuucuuuagggaaccgaccgaccugaaacaguucaagcaggacgcuaaguacucccauggcaucgaugucacugaccuuuuugccgcacaacccggucugacaagcgccgugauugaugcuuugccucggaauaugguuauaaccugucaggggucugacgauauccgaaaacuccuggagucacagggccgcaaggacauuaaauuaaucgauauagcgcugaguaagauugacagcagaaaauaugagaacgcagugugggaucaguacaaggaccuaugccacaugcauacgggagucgugguagaaaagaaaaagaggggcgggaaagaggaaaucaccccacacugugcccucauggauugcaucauguucgacgcugccguuuccggaggucuuaauucucugguguugcgggcaguccugccccgcgauaugguguuuagaacaucgacuccuagggucgugcucugaggacuagucccuguucccagagcccacuuuuuuuucuuuuuuugaaauaaaauagccugucuuucagaucuaaaaaaaaaaaaaaaaaaaaaaaaaaaaaaaaaaaaaaaaaaaaaaaaaaaaaaaaaaaaaaaaugcaucccccccccccccccccccccccccccccccaaaggcucuuuucagagccaccagaauu

SEQ ID NO: 9937 - RNA, 1986 nt, Artificial Sequence
  mRNA product Design a-1 comprising derived and/or modified sequence from MOPV/LASV reassortant(IGS-1;Clade IV)__AFY05578__NP (opt3)
gggagagucccgcagucggcguccagcggcucugcuuguucgugugugugucguugcaggccuuauucaagcuuaccaugagcgccuccaaggagaucaaaucuuuccuguggacccagucacucagaagggaacuuaguggcuacugcagcaacauuaagcugcaaguggucaaagacgcucaggcauuguuacacgggcuggauuuuuccgagguuucuaaugugcagcggcuaaugcgcaaggaacgacgugacgauaacgaccucaaaagacugagggaucuuaaucaggccguaaacaaucugguggaguugaagucgacacaacagaagucaauacuccgggucggaacucugacgagcgacgaucugcucaucuuagcggcugaccuggaaaaacuucgcaguaaggugauuagaaccgagaggcccuuguccgccgguguuuauaugggcaaccugucuagccagcagcuagaucaacggcgcgcacuccugaauaugaucgggauguccggaggcaaccagggugcccgagcugggagagacggaguggucagggugugggauguuaaaaaugcagagcuucugucaaaccaguucggcacaaugccuaguuugacucucgccugucugaccaagcagggccaaguagacuuaaaugaugcugugcaggcccugacagaccucgggcuuauuuacaccgcgaaauauccaaacacuagcgaccuggaucgguugacacagucucauccgauccuaaauaugauagacaccaagaaguccucacugaacaucagcggauacaauuuuagucucggugcagccgucaaagcuggcgccugcaugcuggaugggggaaacaugcuugaaacgauuaaggugucuccccaaacuauggacggcauccugaaauccauuuugaaggugaaaaaggcacucgguauguucaucagcgauaccccuggggagcguaacccauaugaaaauauacuguacaaaauuuguuuaucgggagacggcuggcccuauaucgcuucucgcacauccauuacuggcagagccugggagaacaccgucguugaucuggagucagacgggaagccucagaaggcggauaguaauaacagcuccaaaucucuacagagcgccggauuuacagcaggucucaccuacucacagcugaugacgcuuaaggacgcuauguugcaacuggauccaaaugccaaaacuuggauggacaucgaaggcaggcccgaggacccuguggaaaucgcucucuaccagccaaguuccgggugcuauauucacuucuuucgggagccgacagaucugaagcaguucaaacaggacgccaaguacagccauggaauagauguaaccgaccuuuuugcaacucaacccggccugacaucugccgugaucgaugcuuugccucgaaacauggucauuaccugucaggguucagacgauauccgcaagcuccuggaaagucaggggagaaaagacauaaaguuaauugauaucgaccugagcaaaacggauuccaggaaguaugagaaugcggugugggaccaguacaaagaucuaugccacaugcauaccggcguuguggucgagaagaagaaacggggaggcaaggaagagaucacaccacacugugcacucauggacugcauuauguucgacgccgcugugucugggggacugaacacuucgguacuucgcgccguuuugcccagagauaugguguuuaggaccagcacaccucgugucgugcugugaggacuagucccuguucccagagcccacuuuuuuuucuuuuuuugaaauaaaauagccugucuuucagaucuaaaaaaaaaaaaaaaaaaaaaaaaaaaaaaaaaaaaaaaaaaaaaaaaaaaaaaaaaaaaaaaaugcaucccccccccccccccccccccccccccccccaaaggcucuuuucagagccaccagaauu

SEQ ID NO: 9938 - RNA, 1986 nt, Artificial Sequence
  mRNA product Design a-1 comprising derived and/or modified sequence from LASV(LM765-SLE-2012;Clade IV)__AIT17815__NP (opt3)
gggagagucccgcagucggcguccagcggcucugcuuguucgugugugugucguugcaggccuuauucaagcuuaccaugagcgccuccaaggagaucaaaucuuuccuguggacccagucacucagaagggaacuuaguggcuacugcagcaacauuaagcugcaaguggucaaagacgcucaggcauuguuacacgggcuggauuuuuccgagguuucuaaugugcagcggcuaaugcgcaaggaacgacgugacgauaacgaccucaaaagacugagggaucuuaaucaggccguaaacaaucugguggaguugaagucgacacaacagaagucaauacuccgggucggaacucugacgagcgacgaucugcucaucuuagcggcugaccuggaaaaacuuaagaguaaagugacccgcacagagagacccuuguccgccgguguuuauaugggcaaccugucuagccagcagcuagaucaaaggcgggcacuccuggacaugauugggauguccggaucaaaucagggcgcccgcgcuggucgagaugggguggucagagugugggacguaaagaacgcagagcuucugaauaaccaguucggaacuaugccuaguuugacccucgccugucugacaaaacagggccaaguugauuuaaaugacgcugugcaggcccugaccgaccucggccuuaucuacacugcgaaguauccaaacacaagcgaucuggacagguugacccagucucauccgauucuaaauaugaucgauacgaagaaauccucacugaacauaagcggguacaauuuuagucucggagcagccgucaaggcuggugccugcaugcuggacggcgggaacaugcuugaaacuaucaaagugucuccccaaaccauggauggcauucugaaguccaucuugaaagugaagaaagcacucggaauguucauuagcgacgcuccuggugagcggaacccauaugaaaauauccuguacaagauauguuuaucgggggauggauggcccuauauugccucucguacauccaucacuggccgcgcgugggagaacaccgucguugaccuggagucagauggcaagccucagaaagccgggaguaauggaagcaacaagucccuacagucugcagguuuuacagcuggccucaccuacagccagcugaugacgcuuaaagacgccauguugcaacuggauccaaaugcuaagacuuggauggacauugaagggagacccgaggacccuguggaaaucgcccucuaccagccaucaaguggaugcuauauccacuucuuuagggagccgacagaucugaaacaguucaagcaggacgcaaaguacucccauggcauugauguaaccgaccuuuuugccgcucaacccggucugacuagcgcggugauagaugcauugccucggaacauggucaucacaugucaggggucugacgauauucgaaaacucuucgaaucacagggccgcaaggacaucaaacugauagauauugccuuaaguaagaccgacagcagaaaauaugagaaugcugugugggaucaguacaaggaccugugccacaugcauacgggaaucguuguggagaagaaaaagaggggcgggaaagaagagaucaccccacacugugcccuaauggauugcauuauguuugacgcagccgucuccggaggucucaacacaucugugcugcgggcuguacuuccccgcgacaugguuuucagaacuucgaccccuaggguggucuugugaggacuagucccuguucccagagcccacuuuuuuuucuuuuuuugaaauaaaauagccugucuuucagaucuaaaaaaaaaaaaaaaaaaaaaaaaaaaaaaaaaaaaaaaaaaaaaaaaaaaaaaaaaaaaaaaaugcaucccccccccccccccccccccccccccccccaaaggcucuuuucagagccaccagaauu

SEQ ID NO: 9939 - RNA, 1986 nt, Artificial Sequence
  mRNA product Design a-1 comprising derived and/or modified sequence from LASV(LM776-SLE-2012;Clade IV)__AIT17825__NP (opt3)
gggagagucccgcagucggcguccagcggcucugcuuguucgugugugugucguugcaggccuuauucaagcuuaccaugagcgccuccaaggagaucaaaucuuuccuguggacccagucacucagaagggaacuuaguagcuacugcuccaacauuaagcugcaaguggucaaagacgcucaggcauuguuacacggccuggauuuuucugagguuucgaaugugcagcggcuaaugcgcaaggaacgacgugacgauaacgaccucaaaagacugagggaucuuaaucaggccguaaacaaucugguggaguugaagucaacacaacagaagaguauacuccgggucgggacucugacgagugacgaucugcucaucuuagcggcugaccuggaaaaacuuaaguccaaagugacccgcacagagagacccuugucugccggaguuuauauggguaaccugagcucccagcagcuagaucaaaggcgggcacuccugucaaugauuggcaugagugggagcaaucagggagcccgcgcuggccgagacgguguggucagagugugggauguaaagaacgcagagcuucugaauaaccaguucgggacuaugccuucuuugacccucgccugucugacaaaacagggacaaguugacuuaaaugaugcugugcaggcccugaccgaccucggccuuaucuacacugcgaaguauccaaacacauccgaccuggauagguugacccagucacauccgauucuaaauaugaucgacacgaagaaaagcagucugaacauaucuggcuacaauuuuucccucggggcagccgucaaggcuggagccugcaugcuggaugguggcaacaugcuugaaacuaucaaagugagcccccaaaccauggacgggauucugaagucgaucuugaaagugaagaaagcacucggaauguucauuucugauacaccuggcgagcggaacccauaugaaaauauccuguacaagauauguuuauccggugacggguggcccuauauugcuucacguacuagcaucaccggacgcgccugggagaacacagucguugaucuggagagcgacggcaagccucagaaagcgggcuccaauaacucuaauaagagccuacagucagccggguuuaccgcaggacucacguacagucagcugaugacucuuaaagaugcuauguugcaacuggacccaaacgccaagacauggauggauauugaagguagacccgaggacccuguggaaguagcucucuaccagccauccagcggcugcuauauccacuucuuuagggagccgaccgaccugaaacaguucaagcaggaugccaaguacucucaugggaucgacgugacugaucuuuuugcagcccaacccggacugacaucagcugucauugacgcguugccucggaauauggugauaaccugucagggcagugaugacauccgaaaacuccuggaaagccagggucgcaaggauauuaaauuaaucgacauagcacuguccaagacggauucuagaaaauaugagaacgccguuugggaccaguacaaggaucuaugccacaugcauaccgggguggucguggagaagaaaaagaggggcggaaaagaagagauuacaccacacugugcucucauggacugcaucauguucgaugccgcaguaucgggcgggcugaauacuagcguucuucgggccguguugccccgcgacauggucuuuagaaccuccacaccuagggugguccugugaggacuagucccuguucccagagcccacuuuuuuuucuuuuuuugaaauaaaauagccugucuuucagaucuaaaaaaaaaaaaaaaaaaaaaaaaaaaaaaaaaaaaaaaaaaaaaaaaaaaaaaaaaaaaaaaaugcaucccccccccccccccccccccccccccccccaaaggcucuuuucagagccaccagaauu

SEQ ID NO: 9940 - RNA, 1986 nt, Artificial Sequence
  mRNA product Design a-1 comprising derived and/or modified sequence from LASV(Mad39;Clade IV)__ANH09723__NP (opt3)
gggagagucccgcagucggcguccagcggcucugcuuguucgugugugugucguugcaggccuuauucaagcuuaccaugagcgccuccaaggagaucaaaucuuuccuguggacccagucacucagaagggaacuuaguggcuacugcagcaacauuaagcugcaaguggucaaagacgcucaggcauuguuacacgggcuggauuuuuccgagguuucuaaugugcagcggcuaaugcgcaagcagcgacgugacgauaacgaccucaaaagacugagggaucuuaaucaagccguaaacaaucugguggaauugaagucgacacagcagaagucaguccuccgggugggaacucugacgagcgacgaucugcucaccuuagcggcugaccuggagaaacuuaagaguaaaguuacacgcacugaaagacccuugaccgccgguguguauaugggcaaccuguccucucagcaacuagaucagaggcgggcacuccugaauaugauagggaugagcggaggcaaccagggugcccgcacagggcgagacggagucgugagaguaugggauguuaagaaugcugagcuucugaacaaucaguucggcaccaugccuuccuugacucucgcaugucugacaaaacaaggccagguggacuuaaacgaugucgugcaggcccugaccgaccucgggcuuaucuacacggcuaaguauccaaauacuucagaccuggauagguugacccaaagucauccgauucuaaacaugaucgacacaaauaagagcucucugaacauuuccggauacaacuuuucacucggugccgcggugaaagcaggcgccugcaugcuggaugggggaaauaugcuugagacuaucaaggucagcccccagaccauggacggcauacugaaaaguaucuugaagguuaaaaagucucucgguauguucauuuccgauacaccuggggaacggaacccauaugagaauauccuguacaaaauuuguuuaagcggagacggcuggcccuauaucgcuucgcguaccucuauaacgggccgcgccugggaaaacacugugguagaucuggaguccgggggaaagccucagaaggcagguucaaauaacaguaauaaaagccuacaguccgcuggcuuugccgcggggcucacauacucucaacugaugacccuuaaggacgccauguugcagcuggauccaaacgcaaaaacuuggauggacauugagggaagacccgaagauccuguggagaucgcucucuaccagccaauuagcggcugcuauauccacuucuuuagggaaccgacagaccugaagcaguucaaacaagacgccaaguacucacaugguaucgaugucaccgaccuuuuugcugcccagcccgggcugacgagugcagugauugaggccuugccucggaauaugguuauaaccugucagggcuccgaugacauccgaaaacucuucgaaagccagggacgcaaggauauuaagcugaucgacauagcuuuaucuaaaacagauucaagaaaguaugagaacgcggugugggaccaauacaaagaucugugccacaugcauacuggcgucgugguagagaagaagaaaaagggagggaaagaagagauuaccccacacugugcacuaauggacugcaucauguuugaugccgcuguuagugguggccucaauacacuggugcuuagggccgucuugccccgggacaugguguuccgcacuagcaccccuaaggucgugcugugaggacuagucccuguucccagagcccacuuuuuuuucuuuuuuugaaauaaaauagccugucuuucagaucuaaaaaaaaaaaaaaaaaaaaaaaaaaaaaaaaaaaaaaaaaaaaaaaaaaaaaaaaaaaaaaaaugcaucccccccccccccccccccccccccccccccaaaggcucuuuucagagccaccagaauu

SEQ ID NO: 9941 - RNA, 1986 nt, Artificial Sequence
  mRNA product Design a-1 comprising derived and/or modified sequence from LASV(Z0947-SLE-2011;Clade IV)__AIT17841__NP (opt3)
gggagagucccgcagucggcguccagcggcucugcuuguucgugugugugucguugcaggccuuauucaagcuuaccaugagcgccuccaaggagaucaaaucuuuccuguggacccagucacucagaagggaacuuaguggcuacugcagcaacauuaagcugcaaguggucaaagacgcucaggcauuguuacacgggcuggauuuuuccgagguuucuaaugugcagcggcuaaugcgcaaggaacgacgugacgauaacgaccucaaaagacugagggaucuuaaucaggccguaaacaaucugguggaguugaagucgacacaacagaagucaauacuccgggucggaacucugacgagcgacgaucugcucaucuuagcggcugaccuggaaaaacuuaagaguaaagugacccgcacagagagacccuuguccgccgguguuuauaugggcaaccugucuagccagcagcuagaucaaaggcgggcacuccugaauaugauugggauguccggaucaaaccagggcgcccgcacuggucgagacgggguggucagagugugggauguaaagaaugcugagcuucugaacaaucaguucggaaccaugccuaguuugacacucgcaugucugaccaaacagggccaaguugacuuaaacgaugccgugcaggcucugacugaccucggccuuaucuacacagccaaguauccaaauaccagcgaccuggauagguugacgcagucucauccgauucuaaacaugaucgacacuaagaaauccucacugaauauaagcggguacaacuuuagucucggagcggcagucaaggccggugcuugcaugcuggauggcgggaacaugcuugaaaccaucaaagugucuccccaaacaauggacggcauucugaaguccaucuugaaagugaagaaagcccucggaauguucauuagcgaugcaccuggugagcggaauccauaugaaaacauccuguacaagauauguuuaucgggggacggauggcccuauauugcuucucguacuuccaucaccggccgcgccugggagaauacagucguugaucuggagucagacggcaagccucagaaagcggggaguaacggaagcaauaagucccuacagucugccgguuuuaccgcaggccucacguacagccagcugaugacucuuaaagaugcuauguugcaacuggacccaaacgccaagacauggauggauauugaagggagacccgaggacccuguggaaaucgcucucuaccagccaucaaguggaugcuauauccacuucuuuagggagccgaccgaccugaaacaguucaagcaggaugccaaguacucccauggcauugacguaacugaucuuuuugcagcccaacccggucugacaagcgcugugauagacgcguugccucggaauauggucaucaccugucaggggucugaugacauucgaaaacucuucgaaucacagggccgcaaggauaucaaacugauagacauugcauuaaguaagacggauagcagaaaauaugagaacgccgugugggaccaguacaaggaucugugccacaugcauaccggaaucguuguggagaagaaaaagaggggcgggaaagaagagaucacaccacacugugcucuaauggacugcauuauguuugaugccgcagucuccggaggucucaauacuucugugcugcgggccguacuuccccgcgacaugguuuucagaaccucgacaccuaggguggucuugugaggacuagucccuguucccagagcccacuuuuuuuucuuuuuuugaaauaaaauagccugucuuucagaucuaaaaaaaaaaaaaaaaaaaaaaaaaaaaaaaaaaaaaaaaaaaaaaaaaaaaaaaaaaaaaaaaugcaucccccccccccccccccccccccccccccccaaaggcucuuuucagagccaccagaauu

SEQ ID NO: 9942 - RNA, 1986 nt, Artificial Sequence
  mRNA product Design a-1 comprising derived and/or modified sequence from LASV(Josiah;Clade IV)__NP_694869__NP (opt4)
gggagagucccgcagucggcguccagcggcucugcuuguucgugugugugucguugcaggccuuauucaagcuuaccaugagcgccagcaaggagaucaagagcuuccuguggacccagagccugagaagagagcugagcggcuacugcagcaacaucaagcugcagguggugaaggacgcccaggcccugcugcacggccuggacuucagcgaggugagcaacgugcagagacugaugagaaaggagagaagagacgacaacgaccugaagagacugagagaccugaaccaggccgugaacaaccugguggagcugaagagcacccagcagaagagcauccugagagugggcacccugaccagcgacgaccugcugauccuggccgccgaccuggagaagcugaagagcaaggugaucagaaccgagagaccccugagcgccggcguguacaugggcaaccugagcagccagcagcuggaccagagaagagcccugcugaacaugaucggcaugagcggcggcaaccagggcgccagagccggcagagacggcguggugagagugugggacgugaagaacgccgagcugcugaacaaccaguucggcaccaugcccagccugacccuggccugccugaccaagcagggccagguggaccugaacgacgccgugcaggcccugaccgaccugggccugaucuacaccgccaaguaccccaacaccagcgaccuggacagacugacccagagccaccccauccugaacaugaucgacaccaagaagagcagccugaacaucagcggcuacaacuucagccugggcgccgccgugaaggccggcgccugcaugcuggacggcggcaacaugcuggagaccaucaaggugagcccccagaccauggacggcauccugaagagcauccugaaggugaagaaggcccugggcauguucaucagcgacacccccggcgagagaaaccccuacgagaacauccuguacaagaucugccugagcggcgacggcuggcccuacaucgccagcagaaccagcaucaccggcagagccugggagaacaccgugguggaccuggagagcgacggcaagccccagaaggccgacagcaacaacagcagcaagagccugcagagcgccggcuucaccgccggccugaccuacagccagcugaugacccugaaggacgccaugcugcagcuggaccccaacgccaagaccuggauggacaucgagggcagacccgaggaccccguggagaucgcccuguaccagcccagcagcggcugcuacauccacuucuucagagagcccaccgaccugaagcaguucaagcaggacgccaaguacagccacggcaucgacgugaccgaccuguucgccacccagcccggccugaccagcgccgugaucgacgcccugcccagaaacauggugaucaccugccagggcagcgacgacaucagaaagcugcuggagagccagggcagaaaggacaucaagcugaucgacaucgcccugagcaagaccgacagcagaaaguacgagaacgccgugugggaccaguacaaggaccugugccacaugcacaccggcguggugguggagaagaagaagagaggcggcaaggaggagaucaccccccacugcgcccugauggacugcaucauguucgacgccgccgugagcggcggccugaacaccagcgugcugagagccgugcugcccagagacaugguguucagaaccagcacccccagaguggugcugugaggacuagucccuguucccagagcccacuuuuuuuucuuuuuuugaaauaaaauagccugucuuucagaucuaaaaaaaaaaaaaaaaaaaaaaaaaaaaaaaaaaaaaaaaaaaaaaaaaaaaaaaaaaaaaaaaugcaucccccccccccccccccccccccccccccccaaaggcucuuuucagagccaccagaauu

SEQ ID NO: 9943 - RNA, 1986 nt, Artificial Sequence
  mRNA product Design a-1 comprising derived and/or modified sequence from LASV(LP;Clade I)__AAF86702__NP (opt4)
gggagagucccgcagucggcguccagcggcucugcuuguucgugugugugucguugcaggccuuauucaagcuuaccaugagcaacagcaaggagaucaagagcuuccuguggacccagagccugagaagagagcugagcggcuacugcagcaacaucaagcugcagguggugaaggacgcccaggcccugcugcacggccuggacuucagcgaggugagcaacgugcagagacugaugagaaagcagaagagagacgacgccgaccugaagagacugagagaccugaaccaggccgugaacaaccugguggagcugaagagcacccagcagaagaacgugcugagagugggcacccugagcagcgacgaccugaucacccuggccgccgaccuggagaagcugaagagcaaggugaucagaaccgagagaccccugagcagcggcguguacaugggcaaccugagcagccagcagcuggaccagagaagagcccugcugagcaugaucggcaugagcggcggcccccagggcaacagaaccggcggcgacggcguggugagagugugggacgugaagaacgccgagcugcugaacaaccaguucggcaccaugcccagccugacccuggccugccugaccaagcagggccagguggaccugaacgacgccgugcaggcccugaccgaccugggccugaucuacaccgccaaguaccccaacagcagcgaccuggacaugcugacccagagccaccccauccugggcaugguggacaccaagaagagcagccugaacaucagcggcuacaacuucagccugggcgccgccgugaaggccggcgccugcaugcuggacggcggcaacaugcuggagaccaucaaggugagcccccagaccauggacggcauccugaagagcauccugaaggugaagagaagccugggcauguucaucagcgacacccccggcgagagaaaccccuacgagaacauccuguacaagaucugccugagcggcgagggcuggcccuacaucgccagcagaaccagcaucaccggcagagccugggagaacacccugguggaccuggagagcgacaacaagccccccaagcugaacagcgccggcagcaacaagagccugcaggccgccggccugaacgccggccugaccuacagccagcugaugacccugaaggacugcaugcugcagcuggaccccagcagcaagaccuggaucgacaucgagggcagacccgaggaccccguggagaucgcccuguuccagcccagcagcggcugcuacauccacuucuucagagagcccaccgaccugaagcaguucaagcaggacgccaaguacagccacggcaucgacgugaccgaccuguucagcacccagcccggccugaccagcgccgugaucgaggcccugcccagaaacauggugcugaccugccagggcagcgacgacaucaagaagcugcuggagagccagggcagaagagacaucaagcugaucgacaucagccugagcaaggccgacagcagaaaguucgagaacgccgugugggaccaguacaaggaccugugccacaugcacaccggcguggugguggagaagaagaagagaggcggcaaggaggagaucaccccccacugcgcccugcuggacugcaucauguucgacgccgccaccaccggcagccugaacaucaccacccugagagccgugcugcccagagacaugguguucagaaccagcacccccaagguggugcugugaggacuagucccuguucccagagcccacuuuuuuuucuuuuuuugaaauaaaauagccugucuuucagaucuaaaaaaaaaaaaaaaaaaaaaaaaaaaaaaaaaaaaaaaaaaaaaaaaaaaaaaaaaaaaaaaaugcaucccccccccccccccccccccccccccccccaaaggcucuuuucagagccaccagaauu

SEQ ID NO: 9944 - RNA, 1986 nt, Artificial Sequence
  mRNA product Design a-1 comprising derived and/or modified sequence from LASV(803213;Clade II)__AAF86704__NP (opt4)
gggagagucccgcagucggcguccagcggcucugcuuguucgugugugugucguugcaggccuuauucaagcuuaccaugagcgccagcaaggaggugaagagcuuccuguggacccagagccugagaagagagcugagcggcuacugcagcaacaucaagcugcagguggugaaggacgcccaggcccugcugcacggccuggacuucagcgaggugaacaacgugcagagacugaugagaaagcagaagagagacgacggcgaccugaagagacugagagaccugaaccaggccgugaacaaccugguggagcugaagagcacccagcagaagagcauccugagagugggcacccugaccagcgacgaccugcugacccuggccgccgaccuggagaagcugaagagcaaggugaucagaaccgagagaccccugagcagcggcguguacaugggcaaccugagcacccagcagcuggagcagagaagagcccugcugaacaugaucggcauggugggcggcgcccagggcacccagcccggcagagacggcguggugagagugugggacgugaagaaccccgaccugcugaacaaccaguucggcaccaugcccagccugacccuggccugccugaccaagcagggccagguggaccugaacgacgccgugcuggcccugaccgaccugggccugaucuacaccgccaaguaccccaacagcagcgaccuggacagacugagccagagccaccccauccugaacaugguggacaccaagaagagcagccugaacaucagcggcuacaacuucagccugggcgccgccgugaaggccggcgccugcaugcuggacggcggcaacaugcuggagaccaucaaggugaccccccagaccauggacggcauccugaagagcauccugaaggugaagagaagccugggcauguucgugagcgacacccccggcgagagaaaccccuacgagaacauccuguacaagaucugccugagcggcgacggcuggcccuacaucgccagcagaaccagcaucgugggcagagccugggagaacaccaccguggaccuggagagcgacggcaagccccagaaggugggcaccgccggcagcaacaagagccugcagagcgccggcuuccccaccggccugaccuacagccagcugaugacccugaaggacagcaugaugcagcuggaccccagcgccaagaccuggaucgacaucgagggcagacccgaggaccccguggagaucgcccuguaccagcccaugagcggcugcuacauccacuucuucagagagcccaccgaccugaagcaguucaagcaggacgccaaguacagccacggcaucgacguggccgaccuguuccccgcccagcccggccugaccagcgccgugaucgaggcccugcccagaaacauggugcugaccugccagggcagcgacgacaucaagaagcugcuggacagccagggcagaagagacaucaagcugaucgacaucagccugagcaagguggacagcagaaaguucgagaacgccgugugggaccagugcaaggaccugugccacaugcacaccggcguggugguggagaagaagaagagaggcggcaaggaggagaucaccccccacugcgcccugauggacugcaucauguucgacgccgccgugagcggcggccugaacauccccgugcugagagccgugcugcccagagacaugguguucagaaccagcagccccaagguggugcugugaggacuagucccuguucccagagcccacuuuuuuuucuuuuuuugaaauaaaauagccugucuuucagaucuaaaaaaaaaaaaaaaaaaaaaaaaaaaaaaaaaaaaaaaaaaaaaaaaaaaaaaaaaaaaaaaaugcaucccccccccccccccccccccccccccccccaaaggcucuuuucagagccaccagaauu

SEQ ID NO: 9945 - RNA, 1989 nt, Artificial Sequence
  mRNA product Design a-1 comprising derived and/or modified sequence from LASV(GA391;Clade III)__CAA36646__NP (opt4)
gggagagucccgcagucggcguccagcggcucugcuuguucgugugugugucguugcaggccuuauucaagcuuaccaugagcgccagcaaggaggugagaagcuuccuguggacccagagccugagaagagagcugagcggcuacugcagcaacaucaagcugcagguggugaaggacgcccaggcccugcugcacggccuggacuucagcgaggugagcaacgugcagagacugaugagaaagcagaagagagacgacggcgaccugaagagacugagagaccugaaccaggccgugaacaaccugguggagcugaagagcacccagcagaagagcgugcugagagugggcacccugagcagcgacgaccugcugauccuggccgccgaccuggagaagcugaagagcaaggugaccagaaccgagagaccccugagcagcggcguguacaugggcaaccugagcagccagcagcuggaccagagaagagcccugcugaacaugaucggcaugaccggcgugagcggcggcggcaagggcgccagcgacggcaucgugagagugugggacgugaagaacgccgagcugcugaacaaccaguucggcaccaugcccagccugacccuggccugccugaccaagcagggccagguggaccugaacgacgccgugcaggcccugaccgaccugggccugaucuacaccgccaaguaccccaacagcagcgaccuggacagacugagccagagccaccccauccugaacaugaucgacaccaagaagagcagccugaacaucagcggcuacaacuucagccugggcgccgccgugaaggccggcgccugcaugcuggacggcggcaacaugcuggagaccaucaaggugagcccccagaccauggacggcauccugaagagcauccugaaggugaagaagagccugggcauguucgugagcgacacccccggcgagagaaaccccuacgagaacauccuguacaagaucugccugagcggcgacggcuggcccuacaucgccagcagaaccagcaucgugggcagagccugggagaacaccgugguggaccuggagcaggacaacaagccccagaagaucggcaacggcggcagcaacaagagccugcagagcgccggcuucgccgccggccugaccuacagccagcugaugacccugaaggacuucaagugcuucaaccugauccccaacgccaagaccuggauggacaucgagggcagacccgaggaccccguggagaucgcccuguaccagcccagcagcggcugcuacgugcacuucuucagagagcccaccgaccugaagcaguucaagcaggacgccaaguacagccacggcaucgacgugaccgaccuguucgccgcccagcccggccugaccagcgccgugaucgaggcccugcccagaaacauggugaucaccugccagggcagcgaggacaucagaaagcugcuggagagccagggcagaagagacaucaagcugaucgacaucacccugagcaaggccgacagcagaaaguucgagaacgccgugugggaccaguucaaggaccugugccacaugcacaccggcguggugguggagaagaagaagagaggcggcaaggaggagaucaccccccacugcgcccugauggacugcaucauguucgacgccgccgugagcggcggccuggacgccaaggugcugagaguggugcugcccagagacaugguguucagaaccagcacccccaagguggugcugugaggacuagucccuguucccagagcccacuuuuuuuucuuuuuuugaaauaaaauagccugucuuucagaucuaaaaaaaaaaaaaaaaaaaaaaaaaaaaaaaaaaaaaaaaaaaaaaaaaaaaaaaaaaaaaaaaugcaucccccccccccccccccccccccccccccccaaaggcucuuuucagagccaccagaauu

SEQ ID NO: 9946 - RNA, 1986 nt, Artificial Sequence
  mRNA product Design a-1 comprising derived and/or modified sequence from LASV(AV;Clade V)__CCA30315__NP (opt4)
gggagagucccgcagucggcguccagcggcucugcuuguucgugugugugucguugcaggccuuauucaagcuuaccaugagcgccagcaaggaggugaagagcuuccuguggacccagagccugagaagagagcugagcggcuacugcagcaacaucaagcugcagguggugaaggacgcccaggcccugcugcacggccuggacuucagcgaggugagcaacgugcagagacugaugagaaagcagagaagagacgacagcgaccugaagagacugagagaccugaaccaggccgugaacaaccugguggagcugaagagcacccagcagaagagcgugcugagagugggcacccugagcagcgacgaccugcugacccuggccgccgaccuggagaagcugaagagcaaggugaccagaaccgagagaccccugagcagcggcguguacaugggcaaccugagcagccagcagcuggaccagagaagagcccugcugaaccugaucggcaugaccaacggcagccagggcagccaggccggcagagacggcguggugagagugugggacgugaagaacgccgagcugcugaacaaccaguucggcaccaugcccagccugacccuggccugccugaccaagcagggccagguggaccugaacgacguggugcaggcccugaccgaccugggccugaucuacaccgccaaguaccccaacaccagcgaccuggacagacugacccagagccaccccauccugaacaugaucgacaccaagaagagcagccugaacaucagcggcuacaacuucagccugggcgccgccgugaaggccggcgccugcaugcuggacggcggcaacaugcuggagaccaucaaggugagcccccagagcauggacggcauccugaagagcauccugaaggugaagagagcccugggcauguucgugagcgacacccccggcgagagaaaccccuacgagaacauccuguacaagaucugccugagcggcgacggcuggcccuacaucgccagcagaaccagcaucgugggcagagccugggagaacaccgugguggaccuggagaccgacggcaagccccagaagaucggcagcggcaacagcaacaagagccugcagagcgccggcuucagcgccggccugaccuacagccagcugaugacccugaaggacgccaugcugcagcuggaccccaacgccaagaccuggauggacaucgagggcagacccgaggaccccguggagguggcccuguaccagcccaucagcggcugcuacauccacuucuucagagagcccaccgaccugaagcaguucaagcaggacgccaaguacagccacggcaucgacaucgccgaccuguucgccgcccagcccggccugaccagcgccgugaucgaggcccugcccagaaacauggugaucaccugccagggcagcgaggacaucaagaagcugcuggagagccagggcagaaaggacaucaagcugaucgacaucgcccugagcaagaucgacagcagaaaguucgagaacgccgugugggaccaguacaaggaccugugccacaugcacaccggcguggugguggagaagaagaagagaggcggcaaggaggagaucaccccccacugcgcccugauggacugcaucauguucgacgccgccgugagcggcggccugaacacccuggugcugagagccgugcugcccagagacaugguguucagaaccagcacccccagaguggugcugugaggacuagucccuguucccagagcccacuuuuuuuucuuuuuuugaaauaaaauagccugucuuucagaucuaaaaaaaaaaaaaaaaaaaaaaaaaaaaaaaaaaaaaaaaaaaaaaaaaaaaaaaaaaaaaaaaugcaucccccccccccccccccccccccccccccccaaaggcucuuuucagagccaccagaauu

SEQ ID NO: 9947 - RNA, 1986 nt, Artificial Sequence
  mRNA product Design a-1 comprising derived and/or modified sequence from LASV(Togo/2016/7082;Clade VI)__AMR44578__NP (opt4)
gggagagucccgcagucggcguccagcggcucugcuuguucgugugugugucguugcaggccuuauucaagcuuaccaugagcaacagcaaggaggugaagagcuuccuguggacccagagccugagaagagagcugagcggcuacugcagcaacaucaagcugcagguggugaaggacgcccaggcccugcugcacggccuggacuucagcgaggugagcaacgugcagagacugaugagaaagcagaagagagacgacggcgaccugaagagacugagagaccugaaccaggccgugaacaaccugguggagcugaagagcgugcagcagaagagcauccugagagugggcacccugaccagcgacgaccugcugacccuggccgccgaccuggagaagcugaagagcaaggugaccagaaccgagagaccccugagcagcggcguguacaugggcaaccugagcagccagcagcuggaccagagaagagcccugcugagcaugaucggcaugagcggcggcaaccagaacagccagcccaagggcgacggcguggugagagugugggacgugaagaacgccgaccugcugaacaaccaguucggcaccaugcccagccugacccuggccugccugaccaagcagggccagguggaccugaacgacgccgugcaggcccugaccgaccugggccugaucuacaccgccaaguaccccaacagcagcgaccuggacagacugagccagagccaccccauccugaacaugaucgacaccaagaagagcagccugaacaucagcggcuacaacuucagccugggcgccgccaucaagaccggcgccugcaugcuggacggcggcaacaugcuggagaccaucaaggugaccccccagaccauggacggcauccugaagagcauccugaaggugaagagaagccugggcauguucaucagcgacacccccggcgagagaaaccccuacgagaacauccuguacaagaucugccugagcggcgacggcuggcccuacaucgccagcagaaccgccaucaucggcagagccugggagaacaccgugguggaccuggagagcgacagcaagccccagaagaucggcagcaacggcagcaacaagagccugcagagcgccggcuucgcccccggccugaccuacagccagcugaugacccugaaggacagcaugcugcagcuggaccccaacgccaagaccuggaucgacaucgagggcagacccgaggaccccguggagguggcccuguuccagcccaucagcggcugcuacauccacuucuucagagagcccaccgaccugaagcaguucaagcaggacgccaaguacagccacggcaucgacgugaccgaccuguucgccgcccagcccggccugaccagcgccgugaucgaggcccugcccagaaacauggugcugaccugccagggcagcgacgacaucaagaagcugcuggacagccagggcagaagagacaucaagcugaucgacgugagccugaacaagaucgacagcagaaaguucgagaacgccgugugggaccaguacaaggaccugugccacaugcacaccggcguggugguggagaagaagaagaagggcggcaaggaggagaucaccccccacugcgcccugcuggacugcaucauguucgacgccgccgugagcggcggccugaacgccaccgugcugagagccgugcugcccagagacaugguguucagaaccagcagccccaagguggugcugugaggacuagucccuguucccagagcccacuuuuuuuucuuuuuuugaaauaaaauagccugucuuucagaucuaaaaaaaaaaaaaaaaaaaaaaaaaaaaaaaaaaaaaaaaaaaaaaaaaaaaaaaaaaaaaaaaugcaucccccccccccccccccccccccccccccccaaaggcucuuuucagagccaccagaauu

SEQ ID NO: 9948 - RNA, 1986 nt, Artificial Sequence
  mRNA product Design a-1 comprising derived and/or modified sequence from LASV(KAK-428;Clade n.d. (VII))__ANH09741__NP (opt4)
gggagagucccgcagucggcguccagcggcucugcuuguucgugugugugucguugcaggccuuauucaagcuuaccaugagcaacagcaaggaggugaagagcuuccuguggacccagagccugagaagagagcugagcggcuacugcaccaacaucaagcugcagguggugaaggacgcccaggcccugcugcacggccuggacuucagcgaggugagcaacgugcagagacugaugagaaagcagaagagagacgacaacgaccugaagagacugagagaccugaaccaggccgugaacaaccugguggagcugaagagcgugcagcagaagagcgugcugaaggugggcacccugaacagcgacgaccugcugacccuggccgccgaccuggagaagcugaagagcaagguggugagaaccgagagaccccugagcagcggcguguacaugggcaaccugagcagccagcagcuggaccagagaagagcccugcugaacaugaucggcauggccggcggcagccagggcaaccagcccagcagagacggcguggugagagugugggacgugaagaacgccgaccugcugaacaaccaguucggcaccaugcccagccugacccuggccugccugaccaagcagggccagguggaccugaacgacguggugcuggcccugaccgaccugggccugaucuacaccgccaaguaccccaacagcagcgaccuggacagacugagccagaaccaccccgugcugaacaugaucgacgugaacaagagcagccugaacaucagcggcuacaacuucagccugggcgccgccgugaaggccggcgccugcaugcuggacggcggcaacaugcuggagaccaucaagaucagcccccagaccguggacggcauccugaagagcauccugaaggugaagagagcccugggcauguucgugagcgacacccccggcgagagaaaccccuacgagaacauccuguacaaggugugccugagcggcaacggcuggcccuacaucgccagcagaaccagcaucgugggcagagccugggagaacaccgugguggaccuggagagcaacaagaaccagcccaaggugggcaacaacggcagcaacaagaugcugcagagcagcggcuucgccaccggccugaccuacagccagcugaugacccugagagacagcaugcugcagcuggaccccaccgccaagaccuggaucgacaucgagggcagacccgaggaccccguggagcuggcccuguuccagcccagcagcggcugcuacauccacuucuucagagagcccaccgaccugaagcaguucaagcaggacgccaaguacagccacggcaucgacgugaacgaccuguucagcgcccagcccggccugaccagcgccgugcuggaggcccugcccagaaacauggugcugaccugccagggcagcgacgacaucagaaagcugcuggacagccaggacagaaaggacaucaagcugaucgacaucagccugagcaaggccgacgccagaaaguucgagaacgacgugugggaccaguucaaggaccugugccacaugcacaccggcaucgugguggagaagaagaagaagggcggcaagcaggagaugaccccccacugcgcccugcuggacugcaucauguucgacgccgccgugagcggcggccugaacgugcccacccugagagccgugcugcccaccgacaugguguucagaaccaucaccaccaagguggugcugugaggacuagucccuguucccagagcccacuuuuuuuucuuuuuuugaaauaaaauagccugucuuucagaucuaaaaaaaaaaaaaaaaaaaaaaaaaaaaaaaaaaaaaaaaaaaaaaaaaaaaaaaaaaaaaaaaugcaucccccccccccccccccccccccccccccccaaaggcucuuuucagagccaccagaauu

SEQ ID NO: 9949 - RNA, 1986 nt, Artificial Sequence; identical to SEQ ID NO: 9943
  mRNA product Design a-1 comprising derived and/or modified sequence from LASV(Pinneo-NIG-1969;Clade I)__AIT17837__NP (opt4)

SEQ ID NO: 9950 - RNA, 1986 nt, Artificial Sequence
  mRNA product Design a-1 comprising derived and/or modified sequence from LASV(ISTH0009-NIG-2011;Clade II)__AIT17405__NP (opt4)
gggagagucccgcagucggcguccagcggcucugcuuguucgugugugugucguugcaggccuuauucaagcuuaccaugagcgugagcaaggaggugaagagcuuccuguggacccagagccugagaagagagcugagcggcuacugcagcaacaucaagcugcagguggugaaggacgcccaggcccugcugcacggccuggacuucagcgaggugagcaacgugcagagacugaugagaaagcagaagagagacgacagcgaccugaagagacugagagaccugaaccaggccgugaacaaccugguggagcugaagagcacccagcagaagagcauccugagagugggcacccugaccagcgacgaccugcugacccuggccgccgaccuggagaagcugaagagcaaggugaucagaaccgagagaccccugagcagcggcguguacaugggcaaccugagcacccagcagcuggagcagagaagagcccugcugaacaugaucggcauggugggcggcgcccagggcacccagcccggcagagacggcguggugagagugugggacgugaagaaccccgaccugcugaacaaccaguucggcaccaugcccagccugacccuggccugccugaccaagcagggccagguggaccugaacgacgccgugcuggcccugaccgaccugggccugaucuacaccgccaaguaccccaacagcagcgaccuggacagacugagccagagccaccccauccugaacaugguggacaucaagaagagcagccugaacaucagcggcuacaacuucagccugggcgccgccgugaaggccggcgccugcaugcuggacggcggcaacaugcuggagaccaucaaggugaccccccagaccauggacggcauccugaagagcauccugaaggugaagagaagccugggcauguucgugagcgacacccccggcgagagaaaccccuacgagaacauccuguacaagaucugccugagcggcgacggcuggcccuacaucgccagcagaaccagcaucgugggcagagccugggagaacaccaccguggaccuggagagcgacggcaagccccagaaggugggcagcgccggcagcaacaagagccugcagagcgccggcuuccccaccggccugaccuacagccagcugaugacccugaaggacagcaugaugcagcuggaccccagcgccaagaccuggaucgacaucgagggcagacccgaggaccccguggagaucgcccuguaccagcccaugagcggcugcuacauccacuucuucagagagcccaccgaccugaagcaguucaagcaggacgccaaguacagccacggcaucgacguggccgaccuguuccccgcccagcccggccugaccagcgccgugaucgaggcccugcccagaaacauggugcugaccugccagggcagcgacgacaucaagagacugcuggacagccagggcagaagagacaucaagcugaucgacaucgcccugagcaaggccgacagcagaagauucgagaacgccgugugggaccagugcaaggaccugugccacaugcacaccggcguggugguggagaagaagaagagaggcggcaaggaggagaucaccccccacugcgcccugauggacugcaucauguacgacgccgccgugagcggcggccugaacauccccgugcugagagccgugcugcccagagacaugguguucagaaccagcagccccaagguggugcugugaggacuagucccuguucccagagcccacuuuuuuuucuuuuuuugaaauaaaauagccugucuuucagaucuaaaaaaaaaaaaaaaaaaaaaaaaaaaaaaaaaaaaaaaaaaaaaaaaaaaaaaaaaaaaaaaaugcaucccccccccccccccccccccccccccccccaaaggcucuuuucagagccaccagaauu

SEQ ID NO: 9951 - RNA, 1986 nt, Artificial Sequence
  mRNA product Design a-1 comprising derived and/or modified sequence from LASV(ISTH2010-NIG-2012;Clade II)__AIT17483__NP (opt4)
gggagagucccgcagucggcguccagcggcucugcuuguucgugugugugucguugcaggccuuauucaagcuuaccaugagcgccagcaaggaggugaagagcuuccuguggacccagagccugagaagagagcugagcggcuacugcagcaacaucaagcugcagguggugaaggacgcccaggcccugcugcacggccuggacuucagcgaggugagcaacgugcagagacugaugagaaagcagaagagagacgacagcgaccugaagagacugagagaccugaaccaggccgugaacaaccugguggagcugaagagcacccagcagaagagcauccugagagugggcacccugaccagcgacgaccugcugacccuggccgccgaccuggagaagcugaagagcaaggugaucagaaccgagagaccccugagcagcggcguguacaugggcaaccugagcacccagcagcuggagcagagaagagcccugcugaaccugaucggcauggugggcggcgcccagggcacccagcccggcagagacggcguggugagagugugggacgugaagaaccccgaccugcugaacaaccaguucggcaccaugcccagccugacccuggccugccugaccaagcagggccagguggaccugaacgacgccgugcuggcccugaccgaccugggccugaucuacaccgccaaguaccccaacagcagcgaccuggacagacugagccagagccaccccauccugaacaugguggacaccaagaagagcagccugaacaucagcggcuucaacuucagccugggcgccgccgugaaggccggcgccugcaugcuggacggcggcaacaugcuggagaccaucaaggugaccccccagaccauggacggcauccugaagagcauccugaaggugaagaagagccugggcauguucgugagcgacacccccggcgagagaaaccccuacgagaacauccuguacaagaucugccugagcggcgacggcuggcccuacaucgccagcagaaccagcaucgugggcagagccugggagaacaccaccguggaccuggagagcgacggcaagccccacaaggugggcaccgccggcagcaacaagagccugcagagcgccggcuuccccaccggccugaccuacagccagcugaugacccugaaggacagcaugaugcagcuggaccccagcgccaagaccuggaucgacaucgagggcagacccgaggaccccguggagaucgcccuguaccagcccaugagcggcugcuacauccacuucuucagagagcccaccgaccugaagcaguucaagcaggacgccaaguacagccacggcaucgacguggccgaccuguuccccgcccagcccggccugaccagcgccgugaucgaggcccugcccagaaacauggugcugaccugccagggcagcgacgacaucaagagacugcuggacagccagggcagaagagacaucaagcugaucgacaucgcccugagcaaggccgacagcagaagauucgagaacgccgugugggaccagugcaaggaccugugccacaugcacaccggcguggugguggagaagaagaagagaggcggcaaggaggagaucaccccccacugcgcccugauggacugcaucauguacgacgccgccgugagcggcggccugaacauccccgugcugagagccgugcugcccagagacaugguguucagaaccagcagccccaagguggugcugugaggacuagucccuguucccagagcccacuuuuuuuucuuuuuuugaaauaaaauagccugucuuucagaucuaaaaaaaaaaaaaaaaaaaaaaaaaaaaaaaaaaaaaaaaaaaaaaaaaaaaaaaaaaaaaaaaugcaucccccccccccccccccccccccccccccccaaaggcucuuuucagagccaccagaauu

SEQ ID NO: 9952 - RNA, 1986 nt, Artificial Sequence
  mRNA product Design a-1 comprising derived and/or modified sequence from LASV(Lassa virus/H.sapiens-wt/NGA/2015/ISTH_0543;Clade II)__AVO03640__NP (opt4)
gggagagucccgcagucggcguccagcggcucugcuuguucgugugugugucguugcaggccuuauucaagcuuaccaugagcgccagcaaggaggugaagagcuuccuguggacccagagccugagaagagagcugagcggcuacugcagcaacaucaagcugcagguggugaaggacgcccaggcccugcugcacggccuggacuucagcgaggugagcaacgugcagagacugaugagaaagcagaagagagacgacagcgaccugaagagacugagagaccugaaccaggccgugaacaaccugguggagcugaagagcacccagcagaagagcauccugagagugggcacccugaccagcgacgaccugcugacccuggccgccgaccuggagaagcugaagagcaaggugaucagaaccgagagaccccugagcagcggcguguacaugggcaaccugagcacccagcagcuggagcagagaagagcccugcugaacaugaucggcauggugggcggcgcccagggcacccagcccggcagagacggcguggugagagugugggacgugaagaaccccgaccugcugaacaaccaguucggcaccaugcccagccugacccuggccugccugaccaagcagggccagguggaccugaacgacgccgugcuggcccugaccgaccugggccugaucuacaccgccaaguaccccaacagcagcgaccuggacagacugagccagagccaccccauccugaacaugguggacaccaagaagagcagccugaacaucagcggcuacaacuucagccugggcgccgccgugaaggccggcgccugcaugcuggacggcggcaacaugcuggagaccaucaaggugaccccccagaccauggacggcauccugaagagcauccugaaggugaagaagagccugggcauguucgugagcgacacccccggcgagagaaaccccuacgagaacauccuguacaagaucugccugagcggcgacggcuggcccuacaucgccagcagaaccagcaucgugggcagagccugggagaacaccaccguggaccuggagagcgacggcaagccccagaaggugggcagcgccggcagcaacaagagccugcagagcgccggcuuccccaccggccugaccuacagccagcugaugacccugaaggacagcaugaugcagcuggaccccagcgccaagaccuggaucgacaucgagggcagacccgaggaccccguggagaucgcccuguaccagcccaugagcggcugcuacauccacuucuucagagagcccaccgaccugaagcaguucaagcaggacgccaaguacagccacggcaucgacguggccgaccuguuccccgcccagcccggccugaccagcgccgugaucgaggcccugcccagaaacauggugcugaccugccagggcagcgacgacaucaagagacugcuggacagccagggcagaaaggacaucaagcugaucgacaucgcccugagcaaggccgacagcagaagauucgagaacgccgugugggaccagugcaaggaccugugccacaugcacaccggcguggugguggagaagaagaagagaggcggcaaggaggagaucaccccccacugcgcccugauggacugcaucauguacgacgccgccgugagcggcggccugaacauccccgugcugagagccgugcugcccagagacaugguguucagaaccagcagccccaagguggugcugugaggacuagucccuguucccagagcccacuuuuuuuucuuuuuuugaaauaaaauagccugucuuucagaucuaaaaaaaaaaaaaaaaaaaaaaaaaaaaaaaaaaaaaaaaaaaaaaaaaaaaaaaaaaaaaaaaugcaucccccccccccccccccccccccccccccccaaaggcucuuuucagagccaccagaauu

SEQ ID NO: 9953 - RNA, 1986 nt, Artificial Sequence
  mRNA product Design a-1 comprising derived and/or modified sequence from LASV(Lassa virus/H.sapiens-wt/NGA/2016/ISTH_0009;Clade II)__AVO03572__NP (opt4)
gggagagucccgcagucggcguccagcggcucugcuuguucgugugugugucguugcaggccuuauucaagcuuaccaugagcgccagcaaggaggugaagagcuuccuguggacccagagccugagaagagagcugagcggcuacugcagcaacaucaagcugcagguggugaaggacgcccaggcccugcugcacggccuggacuucagcgaggugagcaacgugcagagacugaugagaaagcagaagagagacgacagcgaccugaagagacugagagaccugaaccaggccgugaacaaccugguggagcugaagagcacccagcagaagagcauccugagagugggcacccugaccagcgacgaccugcugacccuggccgccgaccuggagaagcugaagagcaaggugaucagaaccgagagaccccugagcagcggcguguacaugggcaaccugagcacccagcagcuggagcagagaagagcccugcugaacaugaucggcauggugggcggcgcccagggcacccagcccggcagagacggcguggugagagugugggacgugaagaaccccgaccugcugaacaaccaguucggcaccaugcccagccugacccuggccugccugaccaagcagggccagguggaccugaacgacgccgugcuggcccugaccgaccugggccugaucuacaccgccaaguaccccaacagcagcgaccuggacagacugagccagagccaccccauccugaacaugguggacaccaagaagagcagccugaacaucagcggcuacaacuucagccugggcgccgccgugaaggccggcgccugcaugcuggacggcggcaacaugcuggagaccaucaaggugaccccccagaccauggacggcauccugaagagcauccugaaggugaagaagagccugggcauguucgugagcgacacccccggcgagagaaaccccuacgagaacauccuguacaagaucugccugagcggcgacggcuggcccuacaucgccagcagaaccagcaucgugggcagagccugggagaacaccaccguggaccuggagagcgacggcaagccccagaaggugggcagcgccggcagcaacaagagccugcagagcgccggcuuccccaccggccugaccuacagccagcugaugacccugaaggacagcaugaugcagcuggaccccagcgccaagaccuggaucgacaucgagggcagacccgaggaccccguggagaucgcccuguaccagcccaugagcggcugcuacauccacuucuucagagagcccaccgaccugaagcaguucaagcaggacgccaaguacagccacggcaucgacguggccgaccuguuccccgcccagcccggccugaccagcgccgugaucgaggcccugcccagaaacauggugcugaccugccagggcagcgacgacaucaagagacugcuggacagccagggcagaagagacaucaagcugaucgacaucgcccugagcaaggccgacagcagaagauucgagaacgccgugugggaccagugcaaggaccugugccacaugcacaccggcguggugguggagaagaagaagagaggcggcaaggaggagaucaccccccacugcgcccugauggacugcaucauguacgacgccgccgugagcggcggccugaacauccccgugcugagagccgugcugcccagagacaugguguucagaaccagcagccccaagguggugcugugaggacuagucccuguucccagagcccacuuuuuuuucuuuuuuugaaauaaaauagccugucuuucagaucuaaaaaaaaaaaaaaaaaaaaaaaaaaaaaaaaaaaaaaaaaaaaaaaaaaaaaaaaaaaaaaaaugcaucccccccccccccccccccccccccccccccaaaggcucuuuucagagccaccagaauu

SEQ ID NO: 9954 - RNA, 1986 nt, Artificial Sequence
  mRNA product Design a-1 comprising derived and/or modified sequence from LASV(Lassa virus/H.sapiens-wt/NGA/2016/ISTH_0017;Clade II)__AVO03568__NP (opt4)
gggagagucccgcagucggcguccagcggcucugcuuguucgugugugugucguugcaggccuuauucaagcuuaccaugagcgccagcaaggaggugaagagcuuccuguggacccagagccugagaagagagcugagcggcuacugcagcagcaucaagcugcagguggugaaggacgcccaggcccugcugcacggccuggacuucagcgaggugagcaacgugcagagacugaugagaaagcagaagagagacgacagcgaccugaagagacugagagaccugaaccaggccgugaacaaccugguggagcugaagagcacccagcagaagagcauccugagagugggcacccugaccagcgacgaccugcugacccuggccgccgaccuggagaagcugaagagcaaggugaucagaaccgagagaccccugagcagcggcguguacaugggcaaccugagcacccagcagcuggagcagagaagagcccugcugaacaugaucggcauggccggcggcgcccagggcacccagcccggcagagacggcguggugagagugugggacgugaagaaccccgaccugcugaacaaccaguucggcaccaugcccagccugacccuggccugccugaccaagcagggccagguggaccugaacgacgccgugcuggcccugaccgaccugggccugaucuacaccgccaaguaccccaacagcagcgaccuggacagacugagccagagccaccccauccugaacaugguggacaccaagaagagcagccugaacaucagcggcuacaacuucagccugggcgccgccgugaaggccggcgccugcaugcuggacggcggcaacaugcuggagaccaucaaggugaccccccagaccauggacggcauccugaagagcauccugaaggugaagagaagccugggcauguucgugagcgacgcccccggcgagagaaaccccuacgagaacauccuguacaagaucugccugagcggcgacggcuggcccuacaucgccagcagaaccagcaucgugggcagagccugggagaacaccaccguggaccuggagagcgacggcaagccccagaaggugggcgccaccggcagcaacaagagccugcagagcgccggcuuccccaccggccugaccuacagccagcugaugacccugaaggacagcaugaugcagcuggaccccagcgccaagaccuggaucgacaucgagggcagacccgaggaccccguggagguggcccuguaccagcccgugagcggcugcuacauccacuucuucagagagcccaccgaccugaagcaguucaagcaggacgccaaguacagccacggcaucgacguggccgaccuguuccccgcccagcccggccugaccagcgccgugaucgaggcccugcccagaaacauggugcugaccugccagggcagcgacgacaucaagaagcugcuggacagccagggcagaaaggacaucaagcugaucgacaucgcccugagcaaggccgacagcagaagauucgagaacgccgugugggaccagugcaaggaccugugccacaugcacaccggcguggugguggagaagaagaagagaggcggcaaggaggagaucaccccccacugcgcccugauggacugcaucauguacgacgccgccgugagcggcggccugaacauccccgugcugagagccgugcugcccagagacaugguguucagaaccagcagccccaagguggugcugugaggacuagucccuguucccagagcccacuuuuuuuucuuuuuuugaaauaaaauagccugucuuucagaucuaaaaaaaaaaaaaaaaaaaaaaaaaaaaaaaaaaaaaaaaaaaaaaaaaaaaaaaaaaaaaaaaugcaucccccccccccccccccccccccccccccccaaaggcucuuuucagagccaccagaauu

SEQ ID NO: 9955 - RNA, 1986 nt, Artificial Sequence
  mRNA product Design a-1 comprising derived and/or modified sequence from LASV(Lassa virus/H.sapiens-wt/NGA/2018/ISTH_0959;Clade II)__AVV65100__NP (opt4)
gggagagucccgcagucggcguccagcggcucugcuuguucgugugugugucguugcaggccuuauucaagcuuaccaugagcgccagcaaggaggugaagagcuuccuguggacccagagccugagaagagagcugagcggcuacugcagcaacaucaagcugcagguggugaaggacgcccaggcccugcugcacggccuggacuucagcgaggugagcaacgugcagagacugaugagaaagcagaagagagacgacagcgaccugaagagacugagagaccugaaccaggccgugaacaaccugguggagcugaagagcacccagcagaagagcauccugagagugggcacccugaccagcgacgaccugcugacccuggccgccgaccuggagaagcugaagagcaaggugaucagaaccgagagaccccugagcagcggcguguacaugggcaaccugagcacccagcagcuggagcagagaagagcccugcugaaccugaucggcauggugggcggcgcccagggcacccagcccggcagagacggcguggugagagugugggacgugaagaaccccgaccugcugaacaaccaguucggcaccaugcccagccugacccuggccugccugaccaagcagggccagguggaccugaacgacguggugcuggcccugaccgaccugggccugaucuacaccgccaaguaccccaacagcagcgaccuggacagacugagccagagccaccccauccugaacaugguggacaccaagaagagcagccugaacaucagcggcuucaacuucagccugggcgccgccgugaaggccggcgccugcaugcuggacggcggcaacaugcuggagaccaucaaggugaccccccagaccauggacggcauccugaagagcauccugaaggugaagaagagccugggcauguucgugagcgacacccccggcgagagaaaccccuacgagaacauccuguacaagaucugccugagcggcgacggcuggcccuacaucgccagcagaaccagcaucgugggcagagccugggagaacaccaccguggaccuggagagcgacggcaagccccacaaggugggcaccgccggcagcaacaagagccugcagagcgccggcuuccccaccggccugaccuacagccagcugaugacccugaaggacagcaugaugcagcuggaccccagcgccaagaccuggaucgacaucgagggcagacccgaggaccccguggagaucgcccuguaccagcccaugagcggcugcuacauccacuucuucagagagcccaccgaccugaagcaguucaagcaggacgccaaguacagccacggcaucgacguggccgaccuguuccccgcccagcccggccugaccagcgccgugaucgaggcccugcccagaaacauggugcugaccugccagggcagcgacgacaucaagagacugcuggacagccagggcagaaaggacaucaagcugaucgacaucgcccugagcaagaccgacagcagaagauucgagaacgccgugugggaccagugcaaggaccugugccacaugcacaccggcguggugguggagaagaagaagagaggcggcaaggaggagaucaccccccacugcgcccugauggacugcaucauguacgacgccgccgugagcggcggccugaacauccccgugcugagagccgugcugcccagagacaugguguucagaaccagcagccccaagguggugcugugaggacuagucccuguucccagagcccacuuuuuuuucuuuuuuugaaauaaaauagccugucuuucagaucuaaaaaaaaaaaaaaaaaaaaaaaaaaaaaaaaaaaaaaaaaaaaaaaaaaaaaaaaaaaaaaaaugcaucccccccccccccccccccccccccccccccaaaggcucuuuucagagccaccagaauu

SEQ ID NO: 9956 - RNA, 1986 nt, Artificial Sequence
  mRNA product Design a-1 comprising derived and/or modified sequence from LASV(LASV003-NIG-2008;Clade II)__AIT17581__NP (opt4)
gggagagucccgcagucggcguccagcggcucugcuuguucgugugugugucguugcaggccuuauucaagcuuaccaugagcgccagcaaggaggugaagagcuuccuguggacccagagccugagaagagagcugagcggcuacugcagcagcaucaagcugcagguggugaaggacgcccaggcccugcugcacggccuggacuucagcgaggugagcaacgugcagagacugaugagaaagcagaagagagacgacagcgaccugaagagacugagagaccugaaccaggccgugaacaaccugguggagcugaagagcacccagcagaagagcgugcugagagugggcacccugaccagcgacgaccugcugacccuggccgccgaccuggagaagcugaagagcaaggugaucagaaccgagagaccccugagcagcggcguguacaugggcaaccugagcgcccagcagcuggagcagagaagaacccugcugaacaugaucggcauggugggcggcgcccagggcacccagcccggcagagacggcguggugagagugugggacgugaagaaccccgaccugcugaacaaccaguucggcaccaugcccagccugacccuggccugccugaccaagcagggccagguggaccugaacgacguggugcuggcccugaccgaccugggccugaucuacaccgccaaguaccccaacagcagcgaccuggacagacugagccagagccaccccauccugagcaugguggacaccaagaagagcagccugaacaucagcggcuacaacuucagccugggcgccgccgugaaggccggcgccugcaugcuggacggcggcaacaugcuggagaccaucaaggugaccccccagaccauggacggcauccugaagagcauccugaaggugaagaagagccugggcauguucgugagcgacacccccggcgagagaaaccccuacgagaacauccuguacaagaucugccugagcggcgacggcuggcccuacaucgccagcagaaccagcaucgugggcagagccugggagaacaccaccguggaccuggagagcgacggcaagccccagaaggugggcaccgccggcagcaacaagagccugcagagcgccggcuuccccaccggccugaccuacagccagcugaugacccugaaggacagcaugaugcagcuggaccccagcgccaagaccuggaucgacaucgagggcagacccgaggaccccguggagaucgcccuguaccagcccaugagcggcugcuacauccacuucuucagagagcccaccgaccugaagcaguucaagcaggacgccaaguacagccacggcaucgacgugaccgaccuguuccccgcccagcccggccugaccagcgccgugaucgaggcccugcccagaaacauggugcugaccugccagggcagcgacgacaucaagagacugcuggacagccagggcagaagagacaucaagcugaucgacaucgcccugagcaaggccgacagcagaagauucgagaacgccgugugggaccagugcaaggaccugugccacaugcacaccggcguggugguggagaagaagaagagaggcggcaaggaggagaucaccccccacugcgcccugauggacugcaucauguacgacgccgccgugagcggcggccugaacauccccgugcugagagccgugcugcccagagacaugguguucagaaccagcagccccaagguggugcugugaggacuagucccuguucccagagcccacuuuuuuuucuuuuuuugaaauaaaauagccugucuuucagaucuaaaaaaaaaaaaaaaaaaaaaaaaaaaaaaaaaaaaaaaaaaaaaaaaaaaaaaaaaaaaaaaaugcaucccccccccccccccccccccccccccccccaaaggcucuuuucagagccaccagaauu

SEQ ID NO: 9957 - RNA, 1986 nt, Artificial Sequence
  mRNA product Design a-1 comprising derived and/or modified sequence from LASV(LASV035-NIG-2009;Clade II)__AIT17589__NP (opt4)
gggagagucccgcagucggcguccagcggcucugcuuguucgugugugugucguugcaggccuuauucaagcuuaccaugagcgccagcaaggaggugaagagcuuccuguggacccagagccugagaagagagcugagcggcuacugcagcagcaucaagcugcagguggugaaggacgcccaggcccugcugcacggccuggacuucagcgaggugagcaacgugcagagacugaugagaaagcagaagagagacgacagcgaccugaagagacugagagaccugaaccaggccgugaacaaccugguggagcugaagagcacccagcagaagagcauccugagagugggcacccugaccagcgacgaccugcugacccuggccgccgaccuggagaagcugaagagcaaggugaucagaaccgagagaccccugagcagcggcguguacaugggcaaccugagcgcccagcagcuggagcagagaagagcccugcugaacaugaucggcauggugggcggcgcccagggcacccagcccggcagagacggcguggugagagugugggacgugaagaaccccgaccugcugaacaaccaguucggcaccaugcccagccugacccuggccugccugaccaagcagggccagguggaccugaacgacgccgugcuggcccugaccgaccugggccugaucuacaccgccaaguaccccaacagcagcgaccuggacagacugagccagagccaccccauccugaacaugguggacaccaagaagagcagccugaacaucagcggcuacaacuucagccugggcgccgccgugaaggccggcgccugcaugcuggacggcggcaacaugcuggagaccaucaaggugaccccccagaccauggacggcauccugaagagcauccugaaggugaagagaagccugggcauguucgugagcgacacccccggcgagagaaaccccuacgagaacauccuguacaagaucugccugagcggcgacggcuggcccuacaucgccagcagaaccagcaucgugggcagagccugggagaacaccaccguggaccuggagagcgacggcaagccccagaaggugggcaccaccggcagcaacaagagccugcagagcgccggcuuccccaccggccugaccuacagccagcugaugacccugaaggacagcaugaugcagcuggaccccagcgccaagaccuggaucgacaucgagggcagacccgaggaccccguggagaucgcccuguaccagcccaugagcggcugcuacauccacuucuucagagagcccaccgaccugaagcaguucaagcaggacgccaaguacagccacggcaucgacguggccgaccuguuccccgcccagcccggccugaccagcgccgugaucgaggcccugcccagaaacauggugcugaccugccagggcagcgacgacaucaagaagcugcuggacagccagggcagaagagacaucaagcugaucgacaucgcccugagcaaggccgacagcagaaaguucgagaacgccgugugggaccagugcaaggaccugugccacaugcacaccggcguggugguggagaagaagaagagaggcggcaaggaggagaucaccccccacugcgcccugauggacugcaucauguacgacgccgccgugagcggcggccugaacauccccgugcugagagccgugcugcccagagacaugguguucagaaccagcagccccaagguggugcugugaggacuagucccuguucccagagcccacuuuuuuuucuuuuuuugaaauaaaauagccugucuuucagaucuaaaaaaaaaaaaaaaaaaaaaaaaaaaaaaaaaaaaaaaaaaaaaaaaaaaaaaaaaaaaaaaaugcaucccccccccccccccccccccccccccccccaaaggcucuuuucagagccaccagaauu

SEQ ID NO: 9958 - RNA, 1986 nt, Artificial Sequence
  mRNA product Design a-1 comprising derived and/or modified sequence from LASV(LASV1000-NIG-2009;Clade II)__AIT17783__NP (opt4)
gggagagucccgcagucggcguccagcggcucugcuuguucgugugugugucguugcaggccuuauucaagcuuaccaugagcgccagcaaggaggugaagagcuuccuguggacccagagccugagaagagagcugagcggcuacugcagcaacaucaagcugcagguggugaaggacgcccaggcccugcugcacggccuggacuucagcgaggugagcaacgugcagagacugaugagaaagcagaagagagacgacagcgaccugaagagacugagagaccugaaccaggccgugaacaaccugguggagcugaagagcacccagcagaagagcauccugagagugggcacccugaccagcgacgaccugcugacccuggccgccgaccuggagaagcugaagagcaaggugaucagaaccgagagaccccugagcagcggcguguacaugggcaaccugagcacccagcagcuggagcagagaagagcccugcugaacaugaucggcauggugggcggcgcccagggcacccagcccggcagagacggcguggugagagugugggacgugaagaaccccgaccugcugaacaaccaguucggcaccaugcccagccugacccuggccugccugaccaagcagggccagguggaccugaacgacguggugcuggcccugaccgaccugggccugaucuacaccgccaaguaccccaacagcagcgaccuggacagacugagccagagccaccccauccugaacaugguggacaccaagaagagcagccugaacaucagcggcuacaacuucagccugggcgccgccgugaaggccggcgccugcaugcuggacggcggcaacaugcuggagaccaucaaggugaccccccagaccauggacggcauccugaagagcauccugaaggugaagaagagccugggcauguucgugagcgacacccccggcgagagaaaccccuacgagaacauccuguacaagaucugccugagcggcgacggcuggcccuacaucgccagcagaaccagcaucgugggcagagccugggagaacaccaccguggaccuggagagcgacggcaagccccagaaggugggcaccgccggcagcaacaagagccugcagagcgccggcuuccccaccggccugaccuacagccagcugaugacccugaaggacagcaugaugcagcuggaccccagcgccaagaccuggaucgacaucgagggcagacccgaggaccccguggagaucgcccuguaccagcccgugagcggcugcuacauccacuucuucagagagcccaccgaccugaagcaguucaagcaggacgccaaguacagccacggcaucgacguggccgaccuguuccccgcccagcccggccugaccagcgccgugaucgaggcccugcccagaaacauggugcugaccugccagggcagcgacgacaucaagagacugcuggacagccagggcagaagagacaucaagcugaucgacaucgcccugagcaaggccgacagcagaagauucgagaacgccgugugggaccagugcaaggaccugugccacaugcacaccggcguggugguggagaagaagaagagaggcggcaaggaggagaucaccccccacugcgcccugauggacugcaucauguacgacgccgccgugagcggcggccugaacauccccgugcugagagccgugcugcccagagacaugguguucagaaccagcagccccaagguggugcugugaggacuagucccuguucccagagcccacuuuuuuuucuuuuuuugaaauaaaauagccugucuuucagaucuaaaaaaaaaaaaaaaaaaaaaaaaaaaaaaaaaaaaaaaaaaaaaaaaaaaaaaaaaaaaaaaaugcaucccccccccccccccccccccccccccccccaaaggcucuuuucagagccaccagaauu

SEQ ID NO: 9959 - RNA, 1986 nt, Artificial Sequence
  mRNA product Design a-1 comprising derived and/or modified sequence from LASV(LASV221-NIG-2010;Clade II)__AIT17625__NP (opt4)
gggagagucccgcagucggcguccagcggcucugcuuguucgugugugugucguugcaggccuuauucaagcuuaccaugagcgccagcaaggaggugaagagcuuccuguggacccagagccugagaagagagcugagcggcuacugcagcagcaucaagcugcagguggugaaggacgcccaggcccugcugcacggccuggacuucagcgaggugagcaacgugcagagacugaugagaaagcagagaagagacgacagcgaccugaagagacugagagaccugaaccaggccgugaacaaccugguggagcugaagagcacccagcagaagagcauccugagagugggcacccugaccagcgacgaccugcugacccuggccgccgaccuggagaagcugaagagcaaggugaucagaaccgagagaccccugagcagcggcguguacaugggcaaccugagcacccagcagcuggagcagagaagagcccugcugaacaugaucggcauggugggcggcgcccagggcacccagcccggcagagacggcguggugagagugugggacgugaagaaccccgaccugcugaacaaccaguucggcaccaugcccagccugacccuggccugccugaccaagcagggccagguggaccugaacgacgccgugcuggcccugaccgaccugggccugaucuacaccgccaaguaccccaacagcagcgaccuggacagacugagccagagccaccccauccugaacaugguggacaccaagaagagcagccugaacaucagcggcuacaacuucagccugggcgccgccgugaaggccggcgccugcaugcuggacggcggcaacaugcuggagaccaucaaggugaccccccagaccguggacggcauccugaagagcauccugaaggugaagagaagccugggcauguucgugagcgacacccccggcgagagaaaccccuacgagaacauccuguacaagaucugccugagcggcgacggcuggcccuacaucgccagcagaaccagcaucgugggcagagccugggagaacaccaccguggaccuggagagcgacggcaagccccagaaggugggcaccgccggcagcaacaagagccugcagagcgccggcuuccccaccggccugaccuacagccagcugaugacccugaaggacagcaugaugcagcuggaccccagcgccaagaccuggaucgacaucgagggcagacccgaggaccccguggagaucgcccuguaccagcccaugagcggcugcuacauccacuucuucagagagcccaccgaccugaagcaguucaagcaggacgccaaguacagccacggcaucgacguggccgaccuguuccccgcccagcccggccugaccagcgccgugaucgaggcccugcccagaaacauggugcugaccugccagggcagcgacgacaucaagagacugcuggacagccagggcagaagagacaucaagcugaucgacaucgcccugagcaaggccgacagcagaaaguucgagaacgccgugugggaccagugcaaggaccugugccacaugcacaccggcguggugguggagaagaagaagagaggcggcaaggaggagaucaccccccacugcgcccugauggacugcaucauguacgacgccgccgugagcggcggccugaacauccccgugcugagagccgugcugcccagagacaugguguucagaaccagcagccccaagguggugcugugaggacuagucccuguucccagagcccacuuuuuuuucuuuuuuugaaauaaaauagccugucuuucagaucuaaaaaaaaaaaaaaaaaaaaaaaaaaaaaaaaaaaaaaaaaaaaaaaaaaaaaaaaaaaaaaaaugcaucccccccccccccccccccccccccccccccaaaggcucuuuucagagccaccagaauu

SEQ ID NO: 9960 - RNA, 1986 nt, Artificial Sequence
  mRNA product Design a-1 comprising derived and/or modified sequence from LASV(LASV237-NIG-2010;Clade II)__AIT17639__NP (opt4)
gggagagucccgcagucggcguccagcggcucugcuuguucgugugugugucguugcaggccuuauucaagcuuaccaugagcgccagcaaggaggugaagagcuuccuguggacccagagccugagaagagagcugagcggcuacugcagcaacaucaagcugcagguggugaaggacgcccaggcccugcugcacggccuggacuucagcgaggugagcaacgugcagagacugaugagaaagcagaagagagacgacagcgaccugaagagacugagagaccugaaccaggccgugaacaaccugguggagcugaagagcacccagcagaagagcauccugagagugggcacccugaccagcgacgaccugcugacccuggccgccgaccuggagaagcugaagagcaaggugaucagaaccgagagaccccugagcagcggcguguacaugggcaaccugagcacccagcagcuggagcagagaagagcccugcugaacaugaucggcauggugggcggcgcccagggcacccagcccggcagagacggcguggugagagugugggacgugaagaaccccgaccugcugaacaaccaguucggcaccaugcccagccugacccuggccugccugaccaagcagggccagguggaccugaacgacgccgugcuggcccugaccgaccugggccugaucuacaccgccaaguaccccaacagcagcgaccuggacagacugagccagagccaccccauccugaacaugguggacaucaagaagagcagccugaacaucagcggcuacaacuucagccugggcgccgccgugaaggccggcgccugcaugcuggacggcggcaacaugcuggagaccaucaaggugaccccccagaccauggacggcauccugaagagcauccugaaggugaagagaagccugggcauguucgugagcgacacccccggcgagagaaaccccuacgagaacauccuguacaagaucugccugagcggcgacggcuggcccuacaucgccagcagaaccagcaucgugggcagagccugggagaacaccaccguggaccuggagagcgacggcaagccccagaaggugggcagcgccggcagcaacaagagccugcagagcgccggcuuccccaccggccugaccuacagccagcugaugacccugaaggacagcaugaugcagcuggaccccagcgccaagaccuggaucgacaucgagggcagacccgaggaccccguggagaucgcccuguaccagcccaugagcggcugcuacauccacuucuucagagagcccaccgaccugaagcaguucaagcaggacgccaaguacagccacggcaucgacguggccgaccuguuccccgcccagcccggccugaccagcgccgugaucgaggcccugcccagaaacauggugcugaccugccagggcagcgacgacaucaagagacugcuggacagccagggcagaagagacaucaagcugaucgacaucgcccugagcaaggccgacagcagaagauucgagaacgccgugugggaccagugcaaggaccugugccacaugcacaccggcguggugguggagaagaagaagagaggcggcaaggaggagaucaccccccacugcgcccugauggacugcaucauguacgacgccgccgugagcggcggccugaacauccccgugcugagagccgugcugcccagagacaugguguucagaaccagcagccccaagguggugcugugaggacuagucccuguucccagagcccacuuuuuuuucuuuuuuugaaauaaaauagccugucuuucagaucuaaaaaaaaaaaaaaaaaaaaaaaaaaaaaaaaaaaaaaaaaaaaaaaaaaaaaaaaaaaaaaaaugcaucccccccccccccccccccccccccccccccaaaggcucuuuucagagccaccagaauu

SEQ ID NO: 9961 - RNA, 1986 nt, Artificial Sequence
  mRNA product Design a-1 comprising derived and/or modified sequence from LASV(LASV253-NIG-2011;Clade II)__AIT17671__NP (opt4)
gggagagucccgcagucggcguccagcggcucugcuuguucgugugugugucguugcaggccuuauucaagcuuaccaugagcgccagcaaggaggugaagagcuuccuguggacccagagccugagaagagagcugagcggcuacugcagcagcaucaagcugcagguggugaaggacgcccaggcccugcugcacggccuggacuucagcgaggugagcaacgugcagagacugaugagaaagcagaagagagacgacagcgaccugaagagacugagagaccugaaccaggccgugaacaaccugguggagcugaagagcacccagcagaagagcgugcugagagugggcacccugaccagcgacgaccugcugacccuggccgccgaccuggagaagcugaagagcaaggugaucagaaccgagagaccccugagcagcggcguguacaugggcaaccugagcacccagcagcuggagcagagaagagcccugcugaacaugaucggcauggugggcggcgcccagggcacccagcccggcagagacggcguggugagagugugggacgugaagaaccccgaccugcugaacaaccaguucggcaccaugcccagccugacccuggccugccugaccaagcagggccagguggaccugaacgacguggugcuggcccugaccgaccugggccugaucuacaccgccaaguaccccaacagcagcgaccuggacagacugagccagagccaccccauccugaacaugguggacaccaagaagagcagccugaacaucagcggcuacaacuucagccugggcgccgccgugaaggccggcgccugcaugcuggacggcggcaacaugcuggagaccaucaaggugaccccccagaccauggacggcauccugaagagcauccugaaggugaagaagagccugggcauguucgugagcgacacccccggcgagagaaaccccuacgagaacauccuguacaagaucugccugagcggcgacggcuggcccuacaucgccagcagaaccagcaucgugggcagagccugggagaacaccaccguggaccuggagagcgacggcaagccccagaaggugggcaccgccggcagcaacaagagccugcagagcgccggcuuccccaccggccugaccuacagccagcugaugacccugaaggacagcaugaugcagcuggaccccagcgccaagaccuggaucgacaucgagggcagacccgaggaccccguggagaucgcccuguaccagcccaugagcggcugcuacauccacuucuucagagagcccaccgaccugaagcaguucaagcaggacgccaaguacagccacggcaucgacgugaccgaccuguuccccgcccagcccggccugaccagcgccgugaucgaggcccugcccagaaacauggugcugaccugccagggcagcgacgacaucaagagacugcuggacagccagggcagaagagacaucaagcugaucgacaucgcccugagcaaggccgacagcagaagauucgagaacgccgugugggaccagugcaaggaccugugccacaugcacaccggcguggugguggagaagaagaagagaggcggcaaggaggagaucaccccccacugcgcccugauggacugcaucauguacgacgccgccgugagcggcggccugaacauccccgugcugagagccgugcugcccagagacaugguguucagaaccagcagccccaagguggugcugugaggacuagucccuguucccagagcccacuuuuuuuucuuuuuuugaaauaaaauagccugucuuucagaucuaaaaaaaaaaaaaaaaaaaaaaaaaaaaaaaaaaaaaaaaaaaaaaaaaaaaaaaaaaaaaaaaugcaucccccccccccccccccccccccccccccccaaaggcucuuuucagagccaccagaauu

SEQ ID NO: 9962 - RNA, 1986 nt, Artificial Sequence
  mRNA product Design a-1 comprising derived and/or modified sequence from LASV(LASV254-NIG-2011;Clade II)__AIT17675__NP (opt4)
gggagagucccgcagucggcguccagcggcucugcuuguucgugugugugucguugcaggccuuauucaagcuuaccaugagcgccagcaaggaggugaagagcuuccuguggacccagagccugagaagagagcugagcggcuacugcagcagcaucaagcugcagguggugaaggacgcccaggcccugcugcacggccuggacuucagcgaggugagcaacgugcagagacugaugagaaagcagaagagagacgacagcgaccugaagagacugagagaccugaaccaggccgugaacaaccugguggagcugaagagcacccagcagaagagcgugcugagagugggcacccugaccagcgacgaccugcugacccuggccgccgaccuggagaagcugaagagcaaggugaucagaaccgagagaccccugagcagcggcguguacaugggcaaccugagcacccagcagcuggagcagagaagagcccugcugaacaugaucggcauggugggcggcgcccagggcacccagcccggcagagacggcguggugagagugugggacgugaagaaccccgaccugcugaacaaccaguucggcaccaugcccagccugacccuggccugccugaccaagcagggccagguggaccugaacgacgccgugcuggcccugaccgaccugggccugaucuacaccgccaaguaccccaacagcagcgaccuggacagacugagccagagccaccccauccugaacaugguggacaccaagaagagcagccugaacaucagcggcuacaacuucagccugggcgccgccgugaaggccggcgccugcaugcuggacggcggcaacaugcuggagaccaucaaggugaccccccagaccauggacggcauccugaagagcauccugaaggugaagaagagccugggcauguucgugagcgacacccccggcgagagaaaccccuacgagaacauccuguacaagaucugccugagcggcgacggcuggcccuacaucgccagcagaaccagcaucgugggcagagccugggagaacaccaucguggaccuggagagcgacggcaagccccagaaggugggcaccgccggcagcaacaagagccugcagagcgccggcuuccccaccggccugaccuacagccagcugaugacccugaaggacagcaugaugcagcuggaccccagcgccaagaccuggaucgacaucgagggcagacccgaggaccccguggagaucgcccuguaccagcccaugagcggcugcuacauccacuucuucagagagcccaccgaccugaagcaguucaagcaggacgccaaguacagccacggcaucgacguggccgaccuguuccccgcccagcccggccugaccagcgccgugaucgaggcccugcccagaaacauggugcugaccugccagggcagcgacgacaucaagagacugcuggacagccagggcagaagagacaucaagcugaucgacaucgcccugagcaaggccgacagcagaagauucgagaacgccgugugggaccagugcaaggaccugugccacaugcacaccggcguggugguggagaagaagaagagaggcggcaaggaggagaucaccccccacugcgcccugauggacugcaucauguacgacgccgccgugagcggcggccugaacauccccgugcugagagccgugcugcccagagacaugguguucagaaccagcagccccaagguggugcugugaggacuagucccuguucccagagcccacuuuuuuuucuuuuuuugaaauaaaauagccugucuuucagaucuaaaaaaaaaaaaaaaaaaaaaaaaaaaaaaaaaaaaaaaaaaaaaaaaaaaaaaaaaaaaaaaaugcaucccccccccccccccccccccccccccccccaaaggcucuuuucagagccaccagaauu

SEQ ID NO: 9963 - RNA, 1986 nt, Artificial Sequence
  mRNA product Design a-1 comprising derived and/or modified sequence from LASV(Nig08-04;Clade II)__ADU56611__NP (opt4)
gggagagucccgcagucggcguccagcggcucugcuuguucgugugugugucguugcaggccuuauucaagcuuaccaugagcgccagcaaggaggugaagagcuuccuguggacccagagccugagaagagagcugagcggcuacugcagcaacaucaagcugcagguggugaaggacgcccaggcccugcugcacggccuggacuucagcgaggugagcaacgugcagagacugaugagaaagcagaagagagacgacggcgaccugaagagacugagagaccugaaccaggccgugaacaaccugguggagcugaagagcacccagcagaagagcgugcugagagugggcacccugaccagcgacgaccugcugacccuggccgccgaccuggagaagcugaagagcaaggugaucagaaccgagagaccccugagcagcggcguguacaugggcaaccugagcacccagcagcuggagcagagaaaggcccugcugagcaugaucggcauggugggcggcgcccagggcacccagcccggcagagacggcguggugagagugugggacgugaagaaccccgaccugcugaacaaccaguucggcaccaugcccagccugacccuggccugccugaccaagcagggccagguggaccugaacgacgccgugcuggcccugaccgaccugggccugaucuacaccgccaaguaccccaacagcagcgaccuggacagacugagccagagccaccccauccugaacaugguggacaccaagaagagcagccugaacaucagcggcuacaacuucagccugggcgccgccgugaaggccggcgccugcaugcuggacggcggcaacaugcuggagaccaucaaggugaccccccagaccauggacggcauccugaagagcauccugaaggugaagagaagccugggcauguucgugagcgacacccccggcgagagaaaccccuacgagaacauccuguacaagaucugccugagcggcgacggcuggcccuacaucgccagcagaaccagcaucgugggcagagccugggagaacaccaccguggaccuggagagcgacggcaagccccagaaggugggcaccgccggcagcaacaagagccugcagagcgccggcuuccccaccggccugaccuacagccagcugaugacccugaaggacagcaugaugcagcuggaccccagcgccaagaccuggaucgacaucgagggcagacccgaggaccccguggagaucgcccuguaccagcccaugagcggcugcuacauccacuucuucagagagcccaccgaccugaagcaguucaagcaggacgccaaguacagccacggcaucgacgugaccgaccuguucagcgcccagcccggccugaccagcgccgugaucgaggcccugcccagaaacauggugcugaccugccagggcagcgacgacaucaagaagcugcuggacagccagggcagaagagacaucaagcugaucgacaucagccugaacaaggccgacagcagaagauucgagaacgccgugugggaccagugcaaggaccugugccacaugcacaccggcguggugguggagaagaagaagagaggcggcaaggaggagaucaccccccacugcgcccugauggacugcaucauguucgacgccgccgugagcggcggccugaacauccccauccugagagccgugcugcccagagacaugguguucagaaccagcagccccaagguggugcugugaggacuagucccuguucccagagcccacuuuuuuuucuuuuuuugaaauaaaauagccugucuuucagaucuaaaaaaaaaaaaaaaaaaaaaaaaaaaaaaaaaaaaaaaaaaaaaaaaaaaaaaaaaaaaaaaaugcaucccccccccccccccccccccccccccccccaaaggcucuuuucagagccaccagaauu

SEQ ID NO: 9964 - RNA, 1989 nt, Artificial Sequence
  mRNA product Design a-1 comprising derived and/or modified sequence from LASV(GA391;Clade III)__AAA46284__NP (opt4)
gggagagucccgcagucggcguccagcggcucugcuuguucgugugugugucguugcaggccuuauucaagcuuaccaugagcgccagcaaggaggugagaagcugccuguggacccagagccugagaagagagcugagcggcuacugcagcaacaucaagcugcagguggugaaggacgcccaggcccugcugcacggccuggacuucagcgaggugagcaacgugcagagacugaugagaaagcagaagagagacgacggcgaccugaagagacugagagaccugaaccaggccgugaacaaccugguggagcugaagagcacccagcagaagagcgugcugagagugggcacccugagcagcgacgaccugcugauccuggccgccgaccuggagaagcugaagagcaaggugaccagaaccgagagaccccugagcagcggcguguacaugggcaaccugagcagccagcagcuggaccagagaagagcccugcugaacaugaucggcaugaccggcgugagcggcggcggcaagggcgccagcaacggcaucgugagagugugggacgugaagaacgccgagcugcugaacaaccaguucggcaccaugcccagccugacccuggccugccugaccaagcagggccagguggaccugaacgacgccgugcaggcccugaccgaccugggccugaucuacaccgccaaguaccccaacagcagcgaccuggacagacugagccagagccaccccauccugaacaugaucgacaccaagaagagcagccugaacaucagcggcuacaacuucagccugggcgccgccgugaaggccggcgccugcaugcuggacggcggcaacaugcuggagaccaucaaggugagcccccagaccauggacggcauccugaagagcauccugaaggugaagaagagccugggcauguucgugagcgacacccccggcgagagaaaccccuacgagaacauccuguacaagaucugccugagcggcgacggcuggagcuacaucgccagcagaaccagcaucgugggcagagccugggagaacaccgugguggaccuggagcaggacaacaagccccagaagaucggcaacggcggcagcaacaagagccugcagagcgccggcuucgccgccggccugaucuacagccagcugaugacccugaaggacuucaagugcuucaaccugauccccaacgccaagaccuggauggacaucgagggcagacccgaggaccccguggagaucgcccuguaccagcccagcagcggcugcuacgugcacuucuucagagagcccaccgaccugaagcaguucaagcaggacgccaaguacagccacggcagagacgugaccgaccuguucgccgcccagcccggccugaccagcgccgugaucgaggcccugcccagaaacauggugaucaccugccagggcagcgaggacaucagaaagcugcuggagagccagggcagaagagacaucaagcugaucgacaucacccugagcaaggccgacagcagaaaguucgagaacgccgugugggaccaguucaaggaccugugccacaugcacaccggcguggugguggagaagaagaagagaggcggcaaggaggagaucaccccccacugcgcccugauggacugcaucauguucgacgccgccgugagcggcggccuggacgccaaggugcugagaguggugcugcccagagacaugguguucagaaccagcacccccaagguggugcugugaggacuagucccuguucccagagcccacuuuuuuuucuuuuuuugaaauaaaauagccugucuuucagaucuaaaaaaaaaaaaaaaaaaaaaaaaaaaaaaaaaaaaaaaaaaaaaaaaaaaaaaaaaaaaaaaaugcaucccccccccccccccccccccccccccccccaaaggcucuuuucagagccaccagaauu

SEQ ID NO: 9965 - RNA, 1986 nt, Artificial Sequence
  mRNA product Design a-1 comprising derived and/or modified sequence from LASV(Nig08-A19;Clade III)__ADU56619__NP (opt4)
gggagagucccgcagucggcguccagcggcucugcuuguucgugugugugucguugcaggccuuauucaagcuuaccaugagcgccagcaaggaggugaagagcuuccuguggacccagagccugagaagagagcugagcggcuacugcagcaacaucaagcugcagguggugaaggacgcccaggcccugcugcacggccuggacuucagcgaggugagcaacgugcagagacugaugagaaagcagaagagagacgacggcgaccugaagagacugagagaccugaaccaggccgugaacaaccugguggagcugaagagcacccagcagaagagcgugcugagagugggcacccugagcagcgacgaccugcuggugcuggccgccgaccuggagaagcugaagagcaagguggugagaaccgagagaccccugagcagcggcaucuacaugggcaaccugagcagccagcagcuggaccagagaaaggcccugcugaacaugaucggcaugaccggcggcaacggcggcagaaacaccaccagcgacggcaucgugagagugugggacgugaagaacgccgagcugcugaacaaccaguucggcaccaugcccagccugacccuggccugccugaccaagcagggccagguggaccugaacgacgccgugcaggcccugaccgaccugggccugaucuacaccgccaaguaccccaacagcagcgaccuggacagacuggcccagagccaccccauccugaacaugaucgacaccaagaagagcagccugaacaucagcggcuacaacuucagccugggcgccgccgugaaggccggcgccugcaugcuggacggcggcaacaugcuggagaccaucaaggugagcccccagaccauggacggcauccugaagagcauccugaaggugaagagaagccugggcauguucaucagcgacacccccggcgagagaaaccccuacgagaacauccuguacaagaucugccugagcggcgacggcuggcccuacaucgccagcagaaccagcaucgugggcagagccugggagaacaccgugguggaccuggagagcgacaacaagccccagaagaccggcaacggcggcagcaacaagagccugcagagcgccggcuucgccgccggccugaccuacagccagcugaugacccugaaggacagcaugcugcagcuggaccccaacgccaagaccuggauggacaucgagggcagacccgaggaccccguggagaucgcccuguaccagcccagcagcggcugcuacauccacuucuucagagagcccaccgaccugaagcaguucaagcaggacgccaaguacagccacggcaucgacgugaccgaccuguucgccgcccagcccggccugaccagcgccgugaucgaggcccugcccagaaacauggugaucaccugccagggcagcgaggacaucagaaagcugcuggagagccagggcagaagagacaucaagcugaucgacaucagccugagcaagguggacagcagaaaguucgagaacgccgugugggaccaguucaaggaccugugccacaugcacaccggcaucgugguggagaagaagaagagaggcggcaaggaggagaucaccccccacugcgcccugauggacugcaucauguucgacgccgccgugagcggcggcguggacgccaaggugcugagagccgugcugcccagagacaugguguucagaaccagcacccccaagguggugcugugaggacuagucccuguucccagagcccacuuuuuuuucuuuuuuugaaauaaaauagccugucuuucagaucuaaaaaaaaaaaaaaaaaaaaaaaaaaaaaaaaaaaaaaaaaaaaaaaaaaaaaaaaaaaaaaaaugcaucccccccccccccccccccccccccccccccaaaggcucuuuucagagccaccagaauu

SEQ ID NO: 9966 - RNA, 1986 nt, Artificial Sequence
  mRNA product Design a-1 comprising derived and/or modified sequence from LASV(G1180-SLE-2010;Clade IV)__AIT17169__NP (opt4)
gggagagucccgcagucggcguccagcggcucugcuuguucgugugugugucguugcaggccuuauucaagcuuaccaugagcgccagcaaggagaucaagagcuuccuguggacccagagccugagaagagagcugagcggcuacugcagcaacaucaagcugcagguggugaaggacgcccaggcccugcugcacggccuggacuucagcgaggugagcaacgugcagagacugaugagaaaggagagaagagacgacaacgaccugaagagacugagagaccugaaccaggccgugaacaaccugguggagcugaagagcacccagcagaagagcauccugagagugggcacccugaccagcgacgaccugcugauccuggccgccgaccuggagaagcugaagagcaaggugaucagaaccgagagaccccugagcgccggcguguacaugggcaaccugagcagccagcagcuggaccagagaagagcccugcugagcaugaucggcaugagcagcggcaaccagagagcccaggccggcagagacggcguggugagagugugggacgugaagaacguggagcugcugaacaaccaguucggcaccaugcccagccugacccuggccugccugaccaagcagggccagguggaccugaacgacgccgugcaggcccugaccgaccugggccugaucuacaccgccaaguaccccaacaccagcgaccuggacagacugacccagagccaccccauccugaacaugaucgacaccaagaagagcagccugaacaucagcggcuacaacuucagccugggcgccgccgugaaggccggcgccugcaugcuggacggcggcaacaugcuggagaccaucaaggugagcccccagaccauggacggcauccugaagagcauccugaaggugaagaaggcccugggcauguucaucagcgacacccccggcgagagaaaccccuacgagaacauccuguacaagaucugccugagcggcgacggcuggcccuacaucgccagcagaaccagcaucaccggcagagccugggagaacaccgugguggaccuggagagcgacggcaagccccagaaggccggcagcaacaacagcaacaagagccugcagagcgugggcuucaccgccggccugaccuacagccagcugaugacccugaaggacgccaugcugcagcuggaccccaacgccaagaccuggauggacaucgagggcagacccgaggaccccguggagaucgcccuguaccagcccagcagcggcugcuacauccacuucuucagagagcccaccgaccugaagcaguucaagcaggacgccaaguacagccacggcaucgacgugaccgaccuguucgccgcccagcccggccugaccagcgccgugaucgacgcccugcccagaaacauggugaucaccugccagggcagcgacgacaucagaaagcugcuggagagccagggcagaaaggacaucaagcugaucgacaucgcccugagcaagaccgacagcagaaaguacgagaacgccgugugggaccaguacaaggaccugugccacaugcacaccggcguggugguggagaagaagaagagaggcggcaaggaggagaucaccccccacugcgcccugauggacugcaucauguucgacgccgccgugagcggcggccugaacaccagcgugcugagagccgugcugcccagagacaugguguucagaaccagcacccccagaguggugcugugaggacuagucccuguucccagagcccacuuuuuuuucuuuuuuugaaauaaaauagccugucuuucagaucuaaaaaaaaaaaaaaaaaaaaaaaaaaaaaaaaaaaaaaaaaaaaaaaaaaaaaaaaaaaaaaaaugcaucccccccccccccccccccccccccccccccaaaggcucuuuucagagccaccagaauu

SEQ ID NO: 9967 - RNA, 1986 nt, Artificial Sequence
  mRNA product Design a-1 comprising derived and/or modified sequence from LASV(G1442-SLE-2011;Clade IV)__AIT17181__NP (opt4)
gggagagucccgcagucggcguccagcggcucugcuuguucgugugugugucguugcaggccuuauucaagcuuaccaugagcgccagcaaggaggugaagagcuuccuguggacccagagccugagaagagagcugagcggcuacugcagcaacaucaagcugcagguggugaaggacgcccaggcccugcugcacggccuggacuucagcgaggugagcaacgugcagagacugaugagaaagcagagaagagacgacaacgaccugaagagacugagagaccugaaccaggccgugaacaaccugguggagcugaagagcacccagcagaagagcgugcugagagugggcacccugaccagcgacgaccugcuggugcuggccgccgaccuggagaagcugaagagcaaggugaucagaaccgagagaccccugagcgccggcguguacaugggcaaccugagcagccagcagcuggaccagagaagagcccugcugaacaugaucggcaugagcggcggcauccagggcaccagaaccggcagagacggcguggugagagugugggacgugaagaacgccgaccugcugaacaaccaguucggcaccaugcccagccugacccuggccugccugaccaagcagggccagguggaccugaacgacguggugcaggcccugaccgaccugggccugaucuacaccgccaaguaccccaacgccagcgaccuggacagacugacccagagccaccccauccugaacaugaucgacaccaagaagagcagccugaacaucagcggcuacaacuucagccugggcgccgccgugaaggccggcgccugcaugcuggacggcggcaacaugcuggagaccaucaaggugagcccccagaccauggacggcauccugaagagcauccugaaggugaagaagacccugggcauguucaucagcgacacccccggcgagagaaaccccuacgagaacauccuguacaagaucugccugagcggcgacggcuggcccuacaucgccagcagaaccagcaucaccggcagagccugggagaacaccgugguggaccuggagagcgacggcaagccccagaaggccggcagcaacaacagcaacaagagccugcagagcgccggcuucgccgccggccugaccuacagccagcugaugacccugaaggacgccaugcugcagcuggaccccaacgccaagaccuggauggacaucgagggcagacccgaggaccccguggagaucgcccuguaccagcccagcagcggcugcuacauccacuucuucagagagcccaccgaccugaagcaguucaagcaggacgccaaguacagccacggcaucgacgugaccgaccuguucgccgcccagcccggccugaccagcgccgugaucgaggcccugcccagaaacauggugaucaccugccagggcagcgacgacaucaagaagcugcuggagagccagggcagaaaggacaucaagcugaucgacaucgcccugagcaagaccgacagcagaaaguacgagaacgccgugugggaccaguacaaggaccugugccacaugcacaccggcguggugguggagaagaagaagagaggcggcaaggaggagaucaccccccacugcgcccugauggacugcaucauguucgacgccgccgugagcggcggccugaacacccuggugcugagagccgugcugcccagagacaugguguucagaaccagcacccccagaguggugcugugaggacuagucccuguucccagagcccacuuuuuuuucuuuuuuugaaauaaaauagccugucuuucagaucuaaaaaaaaaaaaaaaaaaaaaaaaaaaaaaaaaaaaaaaaaaaaaaaaaaaaaaaaaaaaaaaaugcaucccccccccccccccccccccccccccccccaaaggcucuuuucagagccaccagaauu

SEQ ID NO: 9968 - RNA, 1986 nt, Artificial Sequence
  mRNA product Design a-1 comprising derived and/or modified sequence from LASV(G3010-SLE-2013;Clade IV)__AIT17345__NP (opt4)
gggagagucccgcagucggcguccagcggcucugcuuguucgugugugugucguugcaggccuuauucaagcuuaccaugagcgccagcaaggagaucaagagcuuccuguggacccagagccugagaagagagcugagcggcuacugcagcaacaucaagcugcagguggugaaggacgcccaggcccugcugcacggccuggacuucagcgaggugagcaacgugcagagacugaugagaaaggagagaagagacgacaacgaccugaagagacugagagaccugaaccaggccgugaacaaccugguggagcugaagagcacccagcagaagagcauccugagagugggcacccugaccagcgacgaccugcugauccuggccgccgaccuggagaagcugaagagcaaggugaccagaaccgagagaccccugagcgccggcguguacaugggcaaccugagcagccagcagcuggaccagagaagagcccugcugagcaugaucggcaugagcagcggcgugcagggcgccagagccggcagagacggcguggugagagugugggacgugaagaacgccgagcugcugaacaaccaguucggcaccaugcccagccugacccuggccugccugaccaagcagggccagguggaccugaacgacguggugcaggcccugaccgaccugggccugaucuacaccgccaaguaccccaacaccagcgaccuggacagacugacccagagccaccccauccugaacaugaucgacaccaagaagagcagccugaacaucagcggcuacaacuucagccugggcgccgccgugaaggccggcgccugcaugcuggacggcggcaacaugcuggagaccaucaaggugagcccccagaccauggacggcauccugaagagcauccugaaggugaagaaggcccugggcauguucaucagcgagacccccggcgagagaaaccccuacgagaacauccuguacaagaucugccugagcggcgacggcuggcccuacaucgccagcagaaccagcaucaccggcagagccugggagaacaccgugguggaccuggagagcgacggcaagccccagaaggccggcagcaacaacagcaacaagagccugcagagcgccggcuucaccgccggccugaccuacagccagcugaugacccugaaggacgccaugcugcagcuggaccccaacgccaagaccuggauggacaucgagggcagacccgaggaccccguggagguggcccuguaccagcccagcagcggcugcuacauccacuucuucagagagcccaccgaccugaagcaguucaagcaggacgccaaguacagccacggcaucgacgugaccgaccuguucgccgcccagcccggccugaccagcgccgugaucgacgcccugcccagaaacauggugaucaccugccagggcagcgacgacaucaagaagcugcuggagagccagggcagaaaggacaucaagcugaucgacaucgcccugagcaagaccgacagcagaaaguacgagaacgccgugugggaccaguacaaggaccugugccacaugcacaccggcguggugguggagaagaagaagagaggcggcaaggaggagaucaccccccacugcgcccugauggacugcaucauguucgacgccgccgugagcggcggccugaacaccagcgugcugagagccgugcugcccagagacaugguguucagaaccagcacccccagaguggugcugugaggacuagucccuguucccagagcccacuuuuuuuucuuuuuuugaaauaaaauagccugucuuucagaucuaaaaaaaaaaaaaaaaaaaaaaaaaaaaaaaaaaaaaaaaaaaaaaaaaaaaaaaaaaaaaaaaugcaucccccccccccccccccccccccccccccccaaaggcucuuuucagagccaccagaauu

SEQ ID NO: 9969 - RNA, 1986 nt, Artificial Sequence
  mRNA product Design a-1 comprising derived and/or modified sequence from LASV(G502-SLE-2009;Clade IV)__AIT17127__NP (opt4)
gggagagucccgcagucggcguccagcggcucugcuuguucgugugugugucguugcaggccuuauucaagcuuaccaugagcgccagcaaggagaucaagagcuuccuguggacccagagccugagaagagagcugagcggcuacugcagcaacaucaagcugcagguggugaaggacgcccaggcccugcugcacggccuggacuucagcgaggugagcaacgugcagagacugaugagaaaggagagaagagacgacaacgaccugaagagacugagagaccugaaccaggccgugaacaaccugguggagcugaagagcacccagcagaagagcauccugagagugggcacccugaccagcgacgaccugcugauccuggccgccgaccuggagaagcugaagagcaaggugaucagaaccgagagaccccugagcgccggcguguacaugggcaaccugagcagccagcagcuggaccagagaagagcccugcugagcaugaucggcaugagcggcggcaaccagggcgugagagccggcaaggacggcguggugagagugugggacgugaagaacgccgagcugcugaacaaccaguucggcaccaugcccagccugacccuggccugccugaccaagcagggccagguggaccugaacgacgccgugcaggcccugaccgaccugggccugaucuacaccgccaaguaccccaacaccagcgaccuggacagacugacccagagccaccccauccugaacaugaucgacaccaagaagagcagccugaacaucagcggcuacaacuucagccugggcgccgccgugaaggccggcgccugcaugcuggacggcggcaacaugcuggagaccaucaaggugagcccccagaccauggacggcauccugaagagcauccugaaggugaagaaggcccugggcauguucaucagcgacacccccggcgagagaaaccccuacgagaacauccuguacaagaucugccugagcggcgacggcuggcccuacaucgccagcagaaccagcaucaccggcagagccugggagaacaccgugguggaccuggagagcgacggcaagccccagaaggccggcagcaacaacagcaacaagagccugcagagcgccggcuucaccgccggccugaccuacagccagcugaugacccugaaggacgccaugcugcagcuggaccccaacaccaagaccuggauggacaucgagggcagacccgaggaccccguggagaucgcccuguaccagcccagcagcggcugcuacauccacuucuucagagagcccaccgaccugaagcaguucaagcaggacgccaaguacagccacggcaucgacgugaccgaccuguucgccgcccagcccggccugaccagcgccgugaucgacgcccugcccagaaacauggugaucaccugccagggcagcgacgacaucagaaagcugcuggagagccagggcagaaaggacaucaagcugaucgacaucgcccugaacaagaccgacagcagaaaguacgagaacgccgugugggaccaguacaaggaccugugccacaugcacaccggcguggugguggagaagaagaagagaggcggcaaggaggagaucaccccccacugcgcccugauggacugcaucauguucgacgccgccgugagcggcggccugaacaccagcgugcugagagccgugcugcccagagacaugguguucagaaccagcacccccagaguggugcugugaggacuagucccuguucccagagcccacuuuuuuuucuuuuuuugaaauaaaauagccugucuuucagaucuaaaaaaaaaaaaaaaaaaaaaaaaaaaaaaaaaaaaaaaaaaaaaaaaaaaaaaaaaaaaaaaaugcaucccccccccccccccccccccccccccccccaaaggcucuuuucagagccaccagaauu

SEQ ID NO: 9970 - RNA, 1986 nt, Artificial Sequence
  mRNA product Design a-1 comprising derived and/or modified sequence from LASV(G733-SLE-2010;Clade IV)__AIT17155__NP (opt4)
gggagagucccgcagucggcguccagcggcucugcuuguucgugugugugucguugcaggccuuauucaagcuuaccaugagcgccagcaaggagaucaagagcuuccuguggacccagagccugagaagagagcugagcggcuacugcagcaacaucaagcugcagguggugaaggacgcccaggcccugcugcacggccuggacuucagcgaggugagcaacgugcagagacugaugagaaaggagagaagagacgacaacgaccugaagagacugagagaccugaaccaggccgugaacaaccugguggagcugaagagcacccagcagaagagcgugcugagagugggcacccugaccagcgacgagcugcuggugcuggccgccgaccuggagaagcugaagagcaaggugaucagaaccgagagaccccugagcgccggcguguacaugggcaaccugagcagccagcagcuggaccagagaagagcccugcugagcaugaucggcaugagcggcggcaaccagggcgccagaaccggcagagacggcguggugagagugugggacgugaagaacgccgagcugcugaacaaccaguucggcaccaugcccagccugacccuggccugccugaccaagcagggccagguggaccugaacgacgccgugcaggcccugaccgaccugggccugaucuacaccgccaaguaccccaacaccagcgaccuggacagacugacccagagccaccccauccugaacaugaucgacaccaagaagagcagccugaacaucagcggcuacaacuucagccugggcgccgccgugaaggccggcgccugcaugcuggacggcggcaacaugcuggagaccaucaaggugagcccccagaccauggacggcauccugaagagcauccugaaggugaagaaggcccugggcauguucaucagcgacacccccggcgagagaaaccccuacgagaacauccuguacaagaucugccugagcggcgacggcuggcccuacaucgccagcagaaccagcaucaccggcagagccugggagaacaccgugguggaccuggagagcgacggcaagccccagaaggccggcagcaacaacagcaacaagagccugcagagcgccggcuucaccgccggccugaccuacagccagcugaugacccugaaggacgccaugcugcagcuggaccccaacgccaagaccuggauggacaucgagggcagacccgaggaccccguggagaucgcccuguaccagcccagcagcggcugcuacauccacuucuucagagagcccaccgaccugaagcaguucaagcaggacgccaaguacagccacggcaucgacgugaccgaccuguucgccgcccagcccggccugaccagcgccgugaucgacgcccugcccagaaacauggugaucaccugccagggcagcgacgacaucagaaagcugcuggagagccagggcagaaaggacaucaagcugaucgacaucgcccugagcaagaucgacagcagaaaguacgagaacgccgugugggaccaguacaaggaccugugccacaugcacaccggcguggugguggagaagaagaagagaggcggcaaggaggagaucaccccccacugcgcccugauggacugcaucauguucgacgccgccgugagcggcggccugaacagccuggugcugagagccgugcugcccagagacaugguguucagaaccagcacccccagaguggugcugugaggacuagucccuguucccagagcccacuuuuuuuucuuuuuuugaaauaaaauagccugucuuucagaucuaaaaaaaaaaaaaaaaaaaaaaaaaaaaaaaaaaaaaaaaaaaaaaaaaaaaaaaaaaaaaaaaugcaucccccccccccccccccccccccccccccccaaaggcucuuuucagagccaccagaauu

SEQ ID NO: 9971 - RNA, 1986 nt, Artificial Sequence
  mRNA product Design a-1 comprising derived and/or modified sequence from MOPV/LASV reassortant(IGS-1;Clade IV)__AFY05578__NP (opt4)
gggagagucccgcagucggcguccagcggcucugcuuguucgugugugugucguugcaggccuuauucaagcuuaccaugagcgccagcaaggagaucaagagcuuccuguggacccagagccugagaagagagcugagcggcuacugcagcaacaucaagcugcagguggugaaggacgcccaggcccugcugcacggccuggacuucagcgaggugagcaacgugcagagacugaugagaaaggagagaagagacgacaacgaccugaagagacugagagaccugaaccaggccgugaacaaccugguggagcugaagagcacccagcagaagagcauccugagagugggcacccugaccagcgacgaccugcugauccuggccgccgaccuggagaagcugagaagcaaggugaucagaaccgagagaccccugagcgccggcguguacaugggcaaccugagcagccagcagcuggaccagagaagagcccugcugaacaugaucggcaugagcggcggcaaccagggcgccagagccggcagagacggcguggugagagugugggacgugaagaacgccgagcugcugagcaaccaguucggcaccaugcccagccugacccuggccugccugaccaagcagggccagguggaccugaacgacgccgugcaggcccugaccgaccugggccugaucuacaccgccaaguaccccaacaccagcgaccuggacagacugacccagagccaccccauccugaacaugaucgacaccaagaagagcagccugaacaucagcggcuacaacuucagccugggcgccgccgugaaggccggcgccugcaugcuggacggcggcaacaugcuggagaccaucaaggugagcccccagaccauggacggcauccugaagagcauccugaaggugaagaaggcccugggcauguucaucagcgacacccccggcgagagaaaccccuacgagaacauccuguacaagaucugccugagcggcgacggcuggcccuacaucgccagcagaaccagcaucaccggcagagccugggagaacaccgugguggaccuggagagcgacggcaagccccagaaggccgacagcaacaacagcagcaagagccugcagagcgccggcuucaccgccggccugaccuacagccagcugaugacccugaaggacgccaugcugcagcuggaccccaacgccaagaccuggauggacaucgagggcagacccgaggaccccguggagaucgcccuguaccagcccagcagcggcugcuacauccacuucuucagagagcccaccgaccugaagcaguucaagcaggacgccaaguacagccacggcaucgacgugaccgaccuguucgccacccagcccggccugaccagcgccgugaucgacgcccugcccagaaacauggugaucaccugccagggcagcgacgacaucagaaagcugcuggagagccagggcagaaaggacaucaagcugaucgacaucgaccugagcaagaccgacagcagaaaguacgagaacgccgugugggaccaguacaaggaccugugccacaugcacaccggcguggugguggagaagaagaagagaggcggcaaggaggagaucaccccccacugcgcccugauggacugcaucauguucgacgccgccgugagcggcggccugaacaccagcgugcugagagccgugcugcccagagacaugguguucagaaccagcacccccagaguggugcugugaggacuagucccuguucccagagcccacuuuuuuuucuuuuuuugaaauaaaauagccugucuuucagaucuaaaaaaaaaaaaaaaaaaaaaaaaaaaaaaaaaaaaaaaaaaaaaaaaaaaaaaaaaaaaaaaaugcaucccccccccccccccccccccccccccccccaaaggcucuuuucagagccaccagaauu

SEQ ID NO: 9972 - RNA, 1986 nt, Artificial Sequence
  mRNA product Design a-1 comprising derived and/or modified sequence from LASV(LM765-SLE-2012;Clade IV)__AIT17815__NP (opt4)
gggagagucccgcagucggcguccagcggcucugcuuguucgugugugugucguugcaggccuuauucaagcuuaccaugagcgccagcaaggagaucaagagcuuccuguggacccagagccugagaagagagcugagcggcuacugcagcaacaucaagcugcagguggugaaggacgcccaggcccugcugcacggccuggacuucagcgaggugagcaacgugcagagacugaugagaaaggagagaagagacgacaacgaccugaagagacugagagaccugaaccaggccgugaacaaccugguggagcugaagagcacccagcagaagagcauccugagagugggcacccugaccagcgacgaccugcugauccuggccgccgaccuggagaagcugaagagcaaggugaccagaaccgagagaccccugagcgccggcguguacaugggcaaccugagcagccagcagcuggaccagagaagagcccugcuggacaugaucggcaugagcggcagcaaccagggcgccagagccggcagagacggcguggugagagugugggacgugaagaacgccgagcugcugaacaaccaguucggcaccaugcccagccugacccuggccugccugaccaagcagggccagguggaccugaacgacgccgugcaggcccugaccgaccugggccugaucuacaccgccaaguaccccaacaccagcgaccuggacagacugacccagagccaccccauccugaacaugaucgacaccaagaagagcagccugaacaucagcggcuacaacuucagccugggcgccgccgugaaggccggcgccugcaugcuggacggcggcaacaugcuggagaccaucaaggugagcccccagaccauggacggcauccugaagagcauccugaaggugaagaaggcccugggcauguucaucagcgacgcccccggcgagagaaaccccuacgagaacauccuguacaagaucugccugagcggcgacggcuggcccuacaucgccagcagaaccagcaucaccggcagagccugggagaacaccgugguggaccuggagagcgacggcaagccccagaaggccggcagcaacggcagcaacaagagccugcagagcgccggcuucaccgccggccugaccuacagccagcugaugacccugaaggacgccaugcugcagcuggaccccaacgccaagaccuggauggacaucgagggcagacccgaggaccccguggagaucgcccuguaccagcccagcagcggcugcuacauccacuucuucagagagcccaccgaccugaagcaguucaagcaggacgccaaguacagccacggcaucgacgugaccgaccuguucgccgcccagcccggccugaccagcgccgugaucgacgcccugcccagaaacauggugaucaccugccagggcagcgacgacaucagaaagcuguucgagagccagggcagaaaggacaucaagcugaucgacaucgcccugagcaagaccgacagcagaaaguacgagaacgccgugugggaccaguacaaggaccugugccacaugcacaccggcaucgugguggagaagaagaagagaggcggcaaggaggagaucaccccccacugcgcccugauggacugcaucauguucgacgccgccgugagcggcggccugaacaccagcgugcugagagccgugcugcccagagacaugguguucagaaccagcacccccagaguggugcugugaggacuagucccuguucccagagcccacuuuuuuuucuuuuuuugaaauaaaauagccugucuuucagaucuaaaaaaaaaaaaaaaaaaaaaaaaaaaaaaaaaaaaaaaaaaaaaaaaaaaaaaaaaaaaaaaaugcaucccccccccccccccccccccccccccccccaaaggcucuuuucagagccaccagaauu

SEQ ID NO: 9973 - RNA, 1986 nt, Artificial Sequence
  mRNA product Design a-1 comprising derived and/or modified sequence from LASV(LM776-SLE-2012;Clade IV)__AIT17825__NP (opt4)
gggagagucccgcagucggcguccagcggcucugcuuguucgugugugugucguugcaggccuuauucaagcuuaccaugagcgccagcaaggagaucaagagcuuccuguggacccagagccugagaagagagcugagcagcuacugcagcaacaucaagcugcagguggugaaggacgcccaggcccugcugcacggccuggacuucagcgaggugagcaacgugcagagacugaugagaaaggagagaagagacgacaacgaccugaagagacugagagaccugaaccaggccgugaacaaccugguggagcugaagagcacccagcagaagagcauccugagagugggcacccugaccagcgacgaccugcugauccuggccgccgaccuggagaagcugaagagcaaggugaccagaaccgagagaccccugagcgccggcguguacaugggcaaccugagcagccagcagcuggaccagagaagagcccugcugagcaugaucggcaugagcggcagcaaccagggcgccagagccggcagagacggcguggugagagugugggacgugaagaacgccgagcugcugaacaaccaguucggcaccaugcccagccugacccuggccugccugaccaagcagggccagguggaccugaacgacgccgugcaggcccugaccgaccugggccugaucuacaccgccaaguaccccaacaccagcgaccuggacagacugacccagagccaccccauccugaacaugaucgacaccaagaagagcagccugaacaucagcggcuacaacuucagccugggcgccgccgugaaggccggcgccugcaugcuggacggcggcaacaugcuggagaccaucaaggugagcccccagaccauggacggcauccugaagagcauccugaaggugaagaaggcccugggcauguucaucagcgacacccccggcgagagaaaccccuacgagaacauccuguacaagaucugccugagcggcgacggcuggcccuacaucgccagcagaaccagcaucaccggcagagccugggagaacaccgugguggaccuggagagcgacggcaagccccagaaggccggcagcaacaacagcaacaagagccugcagagcgccggcuucaccgccggccugaccuacagccagcugaugacccugaaggacgccaugcugcagcuggaccccaacgccaagaccuggauggacaucgagggcagacccgaggaccccguggagguggcccuguaccagcccagcagcggcugcuacauccacuucuucagagagcccaccgaccugaagcaguucaagcaggacgccaaguacagccacggcaucgacgugaccgaccuguucgccgcccagcccggccugaccagcgccgugaucgacgcccugcccagaaacauggugaucaccugccagggcagcgacgacaucagaaagcugcuggagagccagggcagaaaggacaucaagcugaucgacaucgcccugagcaagaccgacagcagaaaguacgagaacgccgugugggaccaguacaaggaccugugccacaugcacaccggcguggugguggagaagaagaagagaggcggcaaggaggagaucaccccccacugcgcccugauggacugcaucauguucgacgccgccgugagcggcggccugaacaccagcgugcugagagccgugcugcccagagacaugguguucagaaccagcacccccagaguggugcugugaggacuagucccuguucccagagcccacuuuuuuuucuuuuuuugaaauaaaauagccugucuuucagaucuaaaaaaaaaaaaaaaaaaaaaaaaaaaaaaaaaaaaaaaaaaaaaaaaaaaaaaaaaaaaaaaaugcaucccccccccccccccccccccccccccccccaaaggcucuuuucagagccaccagaauu

SEQ ID NO: 9974 - RNA, 1986 nt, Artificial Sequence
  mRNA product Design a-1 comprising derived and/or modified sequence from LASV(Mad39;Clade IV)__ANH09723__NP (opt4)
gggagagucccgcagucggcguccagcggcucugcuuguucgugugugugucguugcaggccuuauucaagcuuaccaugagcgccagcaaggagaucaagagcuuccuguggacccagagccugagaagagagcugagcggcuacugcagcaacaucaagcugcagguggugaaggacgcccaggcccugcugcacggccuggacuucagcgaggugagcaacgugcagagacugaugagaaagcagagaagagacgacaacgaccugaagagacugagagaccugaaccaggccgugaacaaccugguggagcugaagagcacccagcagaagagcgugcugagagugggcacccugaccagcgacgaccugcugacccuggccgccgaccuggagaagcugaagagcaaggugaccagaaccgagagaccccugaccgccggcguguacaugggcaaccugagcagccagcagcuggaccagagaagagcccugcugaacaugaucggcaugagcggcggcaaccagggcgccagaaccggcagagacggcguggugagagugugggacgugaagaacgccgagcugcugaacaaccaguucggcaccaugcccagccugacccuggccugccugaccaagcagggccagguggaccugaacgacguggugcaggcccugaccgaccugggccugaucuacaccgccaaguaccccaacaccagcgaccuggacagacugacccagagccaccccauccugaacaugaucgacaccaacaagagcagccugaacaucagcggcuacaacuucagccugggcgccgccgugaaggccggcgccugcaugcuggacggcggcaacaugcuggagaccaucaaggugagcccccagaccauggacggcauccugaagagcauccugaaggugaagaagagccugggcauguucaucagcgacacccccggcgagagaaaccccuacgagaacauccuguacaagaucugccugagcggcgacggcuggcccuacaucgccagcagaaccagcaucaccggcagagccugggagaacaccgugguggaccuggagagcggcggcaagccccagaaggccggcagcaacaacagcaacaagagccugcagagcgccggcuucgccgccggccugaccuacagccagcugaugacccugaaggacgccaugcugcagcuggaccccaacgccaagaccuggauggacaucgagggcagacccgaggaccccguggagaucgcccuguaccagcccaucagcggcugcuacauccacuucuucagagagcccaccgaccugaagcaguucaagcaggacgccaaguacagccacggcaucgacgugaccgaccuguucgccgcccagcccggccugaccagcgccgugaucgaggcccugcccagaaacauggugaucaccugccagggcagcgacgacaucagaaagcuguucgagagccagggcagaaaggacaucaagcugaucgacaucgcccugagcaagaccgacagcagaaaguacgagaacgccgugugggaccaguacaaggaccugugccacaugcacaccggcguggugguggagaagaagaagaagggcggcaaggaggagaucaccccccacugcgcccugauggacugcaucauguucgacgccgccgugagcggcggccugaacacccuggugcugagagccgugcugcccagagacaugguguucagaaccagcacccccaagguggugcugugaggacuagucccuguucccagagcccacuuuuuuuucuuuuuuugaaauaaaauagccugucuuucagaucuaaaaaaaaaaaaaaaaaaaaaaaaaaaaaaaaaaaaaaaaaaaaaaaaaaaaaaaaaaaaaaaaugcaucccccccccccccccccccccccccccccccaaaggcucuuuucagagccaccagaauu

SEQ ID NO: 9975 - RNA, 1986 nt, Artificial Sequence
  mRNA product Design a-1 comprising derived and/or modified sequence from LASV(Z0947-SLE-2011;Clade IV)__AIT17841__NP (opt4)
gggagagucccgcagucggcguccagcggcucugcuuguucgugugugugucguugcaggccuuauucaagcuuaccaugagcgccagcaaggagaucaagagcuuccuguggacccagagccugagaagagagcugagcggcuacugcagcaacaucaagcugcagguggugaaggacgcccaggcccugcugcacggccuggacuucagcgaggugagcaacgugcagagacugaugagaaaggagagaagagacgacaacgaccugaagagacugagagaccugaaccaggccgugaacaaccugguggagcugaagagcacccagcagaagagcauccugagagugggcacccugaccagcgacgaccugcugauccuggccgccgaccuggagaagcugaagagcaaggugaccagaaccgagagaccccugagcgccggcguguacaugggcaaccugagcagccagcagcuggaccagagaagagcccugcugaacaugaucggcaugagcggcagcaaccagggcgccagaaccggcagagacggcguggugagagugugggacgugaagaacgccgagcugcugaacaaccaguucggcaccaugcccagccugacccuggccugccugaccaagcagggccagguggaccugaacgacgccgugcaggcccugaccgaccugggccugaucuacaccgccaaguaccccaacaccagcgaccuggacagacugacccagagccaccccauccugaacaugaucgacaccaagaagagcagccugaacaucagcggcuacaacuucagccugggcgccgccgugaaggccggcgccugcaugcuggacggcggcaacaugcuggagaccaucaaggugagcccccagaccauggacggcauccugaagagcauccugaaggugaagaaggcccugggcauguucaucagcgacgcccccggcgagagaaaccccuacgagaacauccuguacaagaucugccugagcggcgacggcuggcccuacaucgccagcagaaccagcaucaccggcagagccugggagaacaccgugguggaccuggagagcgacggcaagccccagaaggccggcagcaacggcagcaacaagagccugcagagcgccggcuucaccgccggccugaccuacagccagcugaugacccugaaggacgccaugcugcagcuggaccccaacgccaagaccuggauggacaucgagggcagacccgaggaccccguggagaucgcccuguaccagcccagcagcggcugcuacauccacuucuucagagagcccaccgaccugaagcaguucaagcaggacgccaaguacagccacggcaucgacgugaccgaccuguucgccgcccagcccggccugaccagcgccgugaucgacgcccugcccagaaacauggugaucaccugccagggcagcgacgacaucagaaagcuguucgagagccagggcagaaaggacaucaagcugaucgacaucgcccugagcaagaccgacagcagaaaguacgagaacgccgugugggaccaguacaaggaccugugccacaugcacaccggcaucgugguggagaagaagaagagaggcggcaaggaggagaucaccccccacugcgcccugauggacugcaucauguucgacgccgccgugagcggcggccugaacaccagcgugcugagagccgugcugcccagagacaugguguucagaaccagcacccccagaguggugcugugaggacuagucccuguucccagagcccacuuuuuuuucuuuuuuugaaauaaaauagccugucuuucagaucuaaaaaaaaaaaaaaaaaaaaaaaaaaaaaaaaaaaaaaaaaaaaaaaaaaaaaaaaaaaaaaaaugcaucccccccccccccccccccccccccccccccaaaggcucuuuucagagccaccagaauu

SEQ ID NO: 9976 - RNA, 1986 nt, Artificial Sequence
  mRNA product Design a-1 comprising derived and/or modified sequence from LASV(Josiah;Clade IV)__NP_694869__NP (opt5)
gggagagucccgcagucggcguccagcggcucugcuuguucgugugugugucguugcaggccuuauucaagcuuaccaugagcgccuccaaggagaucaaaucuuuccuguggacccagagccucagacgggaacuguccggcuacugcucuaacauuaagcugcaaguggucaaagacgcucaggcccugcuccacgggcuggauuuuagcgagguuuccaaugugcagcgccuuaugagaaaggaacggcgcgacgauaacgaccugaaaagacuccgggaucugaaucaggcggugaacaaucuggucgagcucaagucuacacaacaaaagagcauccugcgcgugggaacgcuuaccuccgacgaucugcucauucuggcugccgaccuugaaaaacuuaagagcaaaguuaucagaacagagcggccccucucugccggcguguauauggggaaccuguccagccagcagcuggaucagcgcagagcucuccugaauaugauuggaaugucuggcgggaaccagggagcccgggcuggccgcgacggcgucgugagaguuugggaugugaagaaugccgagcuucugaacaaucaguucgggaccaugccuucccucacacuggcgugucuuaccaaacagggacaagucgaccugaacgaugccgugcaggcucucacagaccugggccugaucuacaccgccaaguauccgaauacgagcgaccucgaucggcugacccagucucaucccauccuuaacaugauugacacaaagaaauccagccugaauaucuccggguacaacuuuucucucggagcugccgugaaggcgggcgccugcaugcuggaugggggaaacaugcuugaaaccauuaaagucagcccucaaacaauggacggcauccugaaguccauucucaaaguuaagaaagcucugggcauguucaucagcgauacccccggggagcgcaauccuuaugaaaacauucuguacaagaucugucucucuggagacggcuggcccuauaucgccuccagaacgagcauuacagggcgggcuugggagaauaccgugguggaucuggagucugacggaaagccucagaaagccgauagcaacaauuccucuaagagccuucaguccgccggcuuuacagcugggcugaccuacagccagcucaugacccugaaagacgcgaugcugcaacuugauccgaacgccaagacauggauggacaucgaaggaagacccgaggacccugucgaaauugcucucuaccagcccucuuccggcugcuauauccacuucuuucgcgagccuacggaucugaaacaguucaagcaggacgccaaguacagccauggcauugaugugaccgaccuguuugccacacaacccgggcucaccucugcuguuaucgaugcccugccgcggaauauggugaucacaugucagggauccgacgauauuagaaaacuucuggaaagccagggccgcaaggacaucaaacucauugauaucgcgcuguccaagaccgacucucggaaauaugagaacgcugucugggaucaguacaaggaccugugccacaugcauacgggggugguuguggagaagaaaaagagaggaggcaaagaagagauuacaccucacugugcccuuauggauugcaucauguucgacgccgcugucagcgggggccucaauaccuccgugcugcgcgccguccugccccgggacaugguguuuagaaccucuacaccucgcguugugcucugaggacuagucccuguucccagagcccacuuuuuuuucuuuuuuugaaauaaaauagccugucuuucagaucuaaaaaaaaaaaaaaaaaaaaaaaaaaaaaaaaaaaaaaaaaaaaaaaaaaaaaaaaaaaaaaaaugcaucccccccccccccccccccccccccccccccaaaggcucuuuucagagccaccagaauu

SEQ ID NO: 9977 - RNA, 1986 nt, Artificial Sequence
  mRNA product Design a-1 comprising derived and/or modified sequence from LASV(LP;Clade I)__AAF86702__NP (opt5)
gggagagucccgcagucggcguccagcggcucugcuuguucgugugugugucguugcaggccuuauucaagcuuaccaugagcaacuccaaggagaucaaaucuuuccuguggacccagagccucagacgggaacuguccggcuacugcucuaauauuaagcuccaaguggucaaagacgcccaggcucugcuccacgggcuggauuuuagcgagguuuccaacgugcagcgccuuaugagaaagcagaaacgggacgaugccgaccugaagcgccucagagaucugaaucaagcggugaacaaucuggucgaacucaagucuacacagcagaaaaacgugcugcggguuggaacgcuuagcuccgacgaucugaucacccucgcugccgaccuggagaaacuuaaaagcaaggugauucgcacagaaagaccccugucuuccggcgucuauauggggaaucucagcucucagcaacuggaucagcggcgcgcccugcucuccaugaucggaaugagcggcgggccucagggaaacagaaccggcggcgacggggugguucgggugugggaugucaaaaaugcugagcugcuuaacaaucaguucggaacaaugccgucucugacccucgccugucugacaaagcaaggccagguggaccuuaacgaugcugugcaggcccugaccgaccucgggcugauuuacacggcgaaguaucccaauuccagcgaccuggauaugcucacccaaucccauccuauccugggaauggucgacacaaagaagucuagccuuaacaucuccggcuacaauuuuagccugggggccgcuguuaaagccggagcuugcaugcucgauggcggcaacaugcuggagaccauuaaggugucuccccagacaauggacgggauccuuaaauccauucugaaggugaaacgcagccucggaauguucaucucugauaccccuggcgaaagaaaccccuaugagaauauucuguacaagaucugucugagcggggaaggauggccuuauauugccucccggacgucuaucacaggccgcgcgugggagaacacccucgucgaccuggagagcgauaauaagccgcccaaacuuaacuccgccgggagcaauaagucucugcaggcugccggacucaacgcuggccugacauacucccagcugaugacccuuaaagacugcaugcuccaacuggauccuagcucuaagaccuggaucgacauugaaggcagacccgaggauccuguggaaaucgcccuguuucagcccuccagcggguguuacauucacuucuuucgggagccgacagaccucaaacaguucaagcaggacgccaaguauucccauggaaucgauguuacggaccuguuuucuacccaaccuggccuuacaagcgcugugauugaagcgcugcccagaaauaugguccuuaccugccagggguccgaugacaucaaaaagcugcuggagucucagggacgccgggauaucaaacuuauugacaucagccucuccaaggccgauagcagaaaauucgagaacgcugugugggaccaguacaaggaucugugucacaugcauacaggcguuguggucgaaaagaaaaagcgcgggggcaaagaggaaauuaccccucacugcgcccugcucgacuguaucauguuugaugccgcuacgacaggaucucugaauauuaccacccuucgggccgugcugcccagagacauggucuuccgcacauccacccccaaggugguucucugaggacuagucccuguucccagagcccacuuuuuuuucuuuuuuugaaauaaaauagccugucuuucagaucuaaaaaaaaaaaaaaaaaaaaaaaaaaaaaaaaaaaaaaaaaaaaaaaaaaaaaaaaaaaaaaaaugcaucccccccccccccccccccccccccccccccaaaggcucuuuucagagccaccagaauu

SEQ ID NO: 9978 - RNA, 1986 nt, Artificial Sequence
  mRNA product Design a-1 comprising derived and/or modified sequence from LASV(803213;Clade II)__AAF86704__NP (opt5)
gggagagucccgcagucggcguccagcggcucugcuuguucgugugugugucguugcaggccuuauucaagcuuaccaugagcgccuccaaggaggugaaaucuuuccuguggacccagagccucagacgggaacuguccggcuacugcucuaacaucaaacuucaagucguuaaggacgcucaggcccugcuccacgggcuggauuuuagcgaggugaauaacgugcagcgccuuaugagaaagcagaaacgggacgauggagaccugaagcgccucagagaucugaaucaagcggucaacaaucugguggaacucaaguccacacagcagaaaucuauucugcggguuggcacgcuuaccagcgacgaucugcucacacuggcugccgaccuugagaagcugaaauccaaggugauccgcaccgaaagaccccucagcucuggggucuauaugggaaaccuguccacacagcaacuggagcagcggcgcgcccuccugaauaugauuggcauggugggaggagcucagggcacccagccuggcagagaugggguugugcgggucugggacgugaaaaacccggaucuucugaauaaccaauucggaacaaugcccagccucacccuggccugucuuacgaagcagggccagguggaccugaaugaugcuguccucgcccugaccgaccuggggcucaucuacacagcgaaguauccuaacucuuccgaccuggaucgccuuagccaaucucaucccauucugaauaugguugacaccaaaaaguccagccucaacaucuccggauacaauuuuucucugggcgccgcugugaaagccggggcuugcaugcuugauggaggcaacaugcuggagacaaucaaggugaccccucagacgauggacggcauucucaaaagcauccugaaggucaaaagaucccuggggauguucgugagcgauacacccggagaacggaacccuuaugagaauauucucuacaagaucugucugucuggcgacggguggccguauauugccucccgcaccagcaucguugggagagcgugggaaaacacaaccguggaucuugagucugacggcaagccccagaaagucgggaccgccggaagcaauaagucccugcagucugcuggcuuuccuacaggccucacguacagccaacugaugacccugaaagauuccaugaugcagcuugaccccagcgccaagacauggauugauaucgaggggcggccugaagaccccguggagaucgcucucuaccagccgaugucuggaugcuauauucacuucuuuagagaaccuaccgaccugaaacaguucaagcaagaugccaaguacucccauggcaucgacguugccgaucuguuucccgcucagccugggcucacaagcgcggugauugaggcccugccccgcaacaugguccuuaccugucagggaucugacgauaucaaaaagcugcucgacucccagggccggagagauauuaaacugaucgacaucagccuguccaagguggauucucgcaaauucgaaaaugcugucugggaccaaugcaaggaucuuugucacaugcauacgggggugguuguggagaagaaaaagcggggcggaaaagaggaaauuacaccccacugcgcccucauggacuguaucauguuugaugccgcugucagcggcgggcugaacauuccugugcugagagccguucucccgcgcgacaugguguuccggaccuccucucccaaggucgugcugugaggacuagucccuguucccagagcccacuuuuuuuucuuuuuuugaaauaaaauagccugucuuucagaucuaaaaaaaaaaaaaaaaaaaaaaaaaaaaaaaaaaaaaaaaaaaaaaaaaaaaaaaaaaaaaaaaugcaucccccccccccccccccccccccccccccccaaaggcucuuuucagagccaccagaauu

SEQ ID NO: 9979 - RNA, 1989 nt, Artificial Sequence
  mRNA product Design a-1 comprising derived and/or modified sequence from LASV(GA391;Clade III)__CAA36646__NP (opt5)
gggagagucccgcagucggcguccagcggcucugcuuguucgugugugugucguugcaggccuuauucaagcuuaccaugagcgccuccaaggaggugagaucuuuccuguggacccagagccuccggcgcgaacuguccggcuacugcucuaacaucaaacuucaagucguuaaggacgcucaggcccugcuccacgggcuggauuuuagcgagguguccaaugugcagagacuuaugcggaaacagaagcgcgacgauggagaccugaaaagacuccgggaucugaaccaagcggucaauaaccugguggaacucaagucuacacagcagaaaagcguucugcgcgugggcacgcuuuccagcgacgaucugcucauucuggcugccgaccuugagaaacugaagucuaaagucaccagaacagaacggccccucuccagcgggguguauaugggaaaucugucuucccagcaacuggaucagcgcagagcccuccugaacaugaucggcaugaccgggguuagcggaggcggcaagggggcuucugacggaauugugcgggucugggaugugaaaaaugccgagcuucugaacaaucaguucggcacaaugccuucccucacccuggcuugucuuacaaagcaggggcaaguggaccugaacgaugccguccaggcgcucaccgaccugggacugaucuacacggccaaguauccgaauagcuccgaccucgaucgccugucucagagccaucccauucuuaacaugaucgacaccaaaaaguccagccugaauaucucuggcuacaacuuuucccucggggcugccguuaaagcuggagccugcaugcuggauggcggcaauaugcuugagacaauuaaggugagcccucaaaccauggacgggauccugaaaucuauucucaaggugaaaaagagccugggaauguucgucuccgauacacccggcgaaagaaacccuuaugagaacauccuguacaagauuugucucucuggggacggauggcccuauaucgcgagccggaccuccauugugggccgcgccugggaaaauacgguuguggaucuggagcaggacaacaaaccucagaagaucgggaauggaggcagcaacaaaucucuucaguccgcuggcuuugccgcugggcugacauacagccaacucaugacccugaaggauuucaaaugcuuuaaucugaucccgaacgccaagacauggauggacauugagggaagacccgaagauccugucgagaucgcccuuuaccagcccucuuccggcuguuaugugcacuucuuucgggaaccuaccgaccucaagcaguucaaacaggacgcuaaguacagccaugggauugauguuaccgaccuguuugcggcccaacccggacugacauccgcugugaucgaggcccucccgagaaauauggucauuacgugccagggcucugaagauauccgcaaacugcuugagagccaggggcggagagacaucaagcugauugauaucacccucuccaaagccgacucucgcaaguucgagaacgcugugugggaucaguuuaaggaccugugucacaugcauacaggcgucgugguugaaaagaagaaacggggaggcaaggaggaaauuaccccucacugcgcccugauggauuguaucauguucgacgcggcugugagcgggggacuugaugccaaaguccucagagugguucugccccgcgacaugguguuccggacauccaccccuaaggucgugcugugaggacuagucccuguucccagagcccacuuuuuuuucuuuuuuugaaauaaaauagccugucuuucagaucuaaaaaaaaaaaaaaaaaaaaaaaaaaaaaaaaaaaaaaaaaaaaaaaaaaaaaaaaaaaaaaaaugcaucccccccccccccccccccccccccccccccaaaggcucuuuucagagccaccagaauu

SEQ ID NO: 9980 - RNA, 1986 nt, Artificial Sequence
  mRNA product Design a-1 comprising derived and/or modified sequence from LASV(AV;Clade V)__CCA30315__NP (opt5)
gggagagucccgcagucggcguccagcggcucugcuuguucgugugugugucguugcaggccuuauucaagcuuaccaugagcgccuccaaggaggugaaaucuuuccuguggacccagagccucagacgggaacuguccggcuacugcucuaacaucaaacuucaagucguuaaggacgcucaggcccugcuccacgggcuggauuuuagcgagguguccaaugugcagcgccuuaugagaaagcagcggcgcgacgauucugaccugaaaagacuccgggaucugaaccaagcggucaauaaccugguggaacucaagagcacacagcagaaguccguucugcgcgugggaacgcuuagcucugacgaucugcucacccuggcugccgaccuugagaaacugaaguccaaagucacaagaaccgaacggccccucagcucuggcguguauauggggaaucuguccagccagcaacuggaucagcgcagagcccuccugaaccuuauuggaaugacaaauggcucucaggggucccaggcuggacgggacggcguugugcgcgucugggaugugaagaacgccgagcugcucaauaaccaauucggcaccaugccuagccugacacuugcuugucugaccaaacagggacagguggaccucaaugaugucguucaagcccugacggaccuggggcucaucuacaccgcgaaguauccgaacacauccgaccuggauagacuuacccagucucaucccauucugaauaugaucgacacaaagaaaagcucccucaacauuagcggcuacaauuuuucucugggggccgcugugaaggccggagcuugcaugcuugauggcgggaacaugcuggagaccaucaaaguguccccucagagcauggacggaauccucaagucuauucugaaagucaagcgggcccugggcauguucgugagcgauacgcccggcgaacgcaacccuuaugagaauauccucuacaaaauuugucuguccggggacggauggcccuauaucgcgucuagaacaagcauuguuggccgggccugggaaaacaccguggucgaucuugagacagacgggaagccucagaagaucggauccggcaauagcaacaaaucucugcaauccgcuggguuuagcgccggacucaccuacucucagcugaugacccugaaggaugcuaugcuucagcucgacccgaaugccaaaacauggauggauauugagggcagacccgaagacccuguggagguugcccuguaccagcccaucuccggcugcuauauccacuucuuucgcgaaccuacggaccugaagcaauucaaacaggaugcuaaguacagccaugggauugacaucgcggaucucuuugccgcucagcccggacugaccuccgccgugauugaggcccuuccgcggaacauggucaucacaugucagggcucugaagacauuaagaaacugcucgagagccaagggagaaaggauaucaaacugaucgacauugcucuguccaagaucgauucucgcaaauucgagaaugccgugugggaccaguauaaggaucuuugccacaugcauaccggagucgugguugaaaagaaaaagcggggcgggaaagaggaaauuacaccucacugugcgcucauggacugcaucauguuugaugcugccgugagcggcggacugaacacccugguccucagagccgugcugccccgcgacaugguuuuccggacguccacaccuagagugguccuuugaggacuagucccuguucccagagcccacuuuuuuuucuuuuuuugaaauaaaauagccugucuuucagaucuaaaaaaaaaaaaaaaaaaaaaaaaaaaaaaaaaaaaaaaaaaaaaaaaaaaaaaaaaaaaaaaaugcaucccccccccccccccccccccccccccccccaaaggcucuuuucagagccaccagaauu

SEQ ID NO: 9981 - RNA, 1986 nt, Artificial Sequence
  mRNA product Design a-1 comprising derived and/or modified sequence from LASV(Togo/2016/7082;Clade VI)__AMR44578__NP (opt5)
gggagagucccgcagucggcguccagcggcucugcuuguucgugugugugucguugcaggccuuauucaagcuuaccaugagcaacuccaaggaggugaaaucuuuccuguggacccagagccucagacgggaacuguccggcuacugcucuaauaucaaacuucaagucguuaaagacgcccaggcucugcuccacgggcuggauuuuagcgagguguccaacgugcagcgccuuaugagaaagcagaaacgggacgauggagaccugaagcgccucagagaucugaaucaagccgucaacaaucugguggaacucaagucuguucagcagaaaagcauucugcgggugggcacacuuacguccgacgaucugcucacccuggcggcugaccuugagaagcugaaaagcaaggucacacgcaccgaaagaccccucucuuccgggguguauaugggaaaccugagcucucagcaacuggaucagcggcgcgcccuccuguccaugaucggcaugagcgggggaaaucagaacucucagccuaaaggcgacggcguugugagagucugggaugugaagaaugccgaccuucugaacaaucaauucgggacaaugccgucccucacccuggcuugucuuacaaagcagggacagguggaucugaacgacgccguccaagcucucaccgaccugggccugauuuacacggccaaauaucccaauagcuccgaucucgaccggcugucucagagccauccuauccuuaacaugauugauaccaagaaauccagccugaauaucucuggguacaacuuuucccucggagcggccaucaagacaggcgcuugcaugcuggacgggggaaacaugcuugagaccauuaaaguuacaccccagaccauggauggcauccucaagagcauucugaaagugaagcgcucucugggcauguucaucagcgacacgccuggggagagaaaucccuaugaaaacauucuguacaagaucugucucuccggagauggcuggccuuauauugccucucggacagcuaucaucgggcgcgccugggagaauaccguggucgaccuggaaagcgauuccaaaccgcagaagauuggaagcaacggcucuaauaaaucccuucaaagcgcgggguuugcccccggacugacauacucucagcucaugacccugaaggacuccaugcugcagcuugauccuaacgcuaaaaccuggaucgacauugagggcagacccgaggacccuguggaaguugcccucuuccagcccaucagcggcugcuacauucacuuuuuccgggagccgacagaucugaagcaauuuaagcaggacgcuaaauauucccaugggaucgaugugacggaccuguucgccgcccagccuggacucaccucugcugucaucgaagcgcugcccagaaauauggugcuuacaugucagggcagcgaugacauuaagaaacugcucgauucccaagggcgccgggacaucaagcugauugauguuucucugaacaaaaucgacagcagaaaguuugagaaugccgugugggaucaguacaaggaccuuugccacaugcauaccggagucguggucgaaaagaagaaaaagggcgggaaagaggagauuacaccucacugugcucuccuggauugcaucauguucgacgccgccguguccggcggacugaacgcuaccguucuccgcgccgugcugccccgggacauggucuuuagaacgagcucucccaaggugguucuuugaggacuagucccuguucccagagcccacuuuuuuuucuuuuuuugaaauaaaauagccugucuuucagaucuaaaaaaaaaaaaaaaaaaaaaaaaaaaaaaaaaaaaaaaaaaaaaaaaaaaaaaaaaaaaaaaaugcaucccccccccccccccccccccccccccccccaaaggcucuuuucagagccaccagaauu

SEQ ID NO: 9982 - RNA, 1986 nt, Artificial Sequence
  mRNA product Design a-1 comprising derived and/or modified sequence from LASV(KAK-428;Clade n.d. (VII))__ANH09741__NP (opt5)
gggagagucccgcagucggcguccagcggcucugcuuguucgugugugugucguugcaggccuuauucaagcuuaccaugagcaacuccaaggaggugaaaucuuuccuguggacccagagccucagacgggaacuguccggcuacugcacaaauaucaaacuucaagucguuaaggacgcccaggcucugcuccacgggcuggauuuuucugaggugagcaacgugcagcgccuuaugagaaagcagaaacgggacgauaaugaccugaagcgccucagagaucugaaccaagccgucaauaaccugguggaacucaaguccguucagcagaaaucugugcugaaggucggaacgcuuaauagcgacgaucugcucacccuggcggcugaccuugagaaacugaaguccaaagugguucggacagaacgcccccucagcucuggcguguauauggggaaccuguccagccagcaacuggaucagagacgggcccuccugaauaugauuggaauggccggcgggucucagggaaaccagccuucccgcgacggcgucgugagagugugggaugucaagaaugcugaccuucugaacaaucaauucggcaccaugccgagccucacacuggccugucuuaccaagcaggggcagguugaucugaacgacguggugcucgcucugacagaccugggacucaucuacaccgccaaauaucccaauucuuccgaucuggaccggcuuagccaaaaccauccuguccugaacaugauugaugugaauaaguccucucucaacaucagcggcuacaauuuuucccugggggcggccguuaaagcuggagccugcaugcuugacggcgggaacaugcuggagacgauuaagaucagcccccagaccguggauggaauccucaaaucuauucugaaggucaaacgcgcucugggcauguucguguccgacacaccuggcgagagaaaucccuaugaaaacauccucuacaagguuugucugagcgggaauggauggccuuauauugccucucggaccagcaucgugggccgcgcgugggagaacacagucguggaucuugaauccaauaagaaccagccgaaagucgggaauaacggaucuaauaagaugcugcagagcuccggcuuugccaccgggcucacguacagccaacugaugacacugagagacucuaugcuucagcucgaucccaccgcuaaaacauggauugacaucgagggacggccugaggaucccguggaacuggcccuguuccagccuuccagcggcugcuacauucacuuuuucagagagcccaccgaccucaagcaguuuaaacaagacgcuaaguauucucauggcaucgauguuaacgaccuguucuccgcccagccggggcuuaccagcgccgugcuggaagcucucccucgcaauaugguccugacaugucagggauccgaugacauccggaagcugcuugauucucaggacagaaaagauauuaagcucaucgacauuagccuguccaaagcggaugcccgcaaguuugagaacgacgugugggaucaauucaaagaccugugccacaugcauacgggcaucguuguggaaaagaagaaaaagggagggaaacaggagaugacaccccacugugcucuccuggauugcauuauguuugacgccgccgucucuggcgggcuuaacgugccuacccugcgggcugugcuccccaccgacaugguuuucagaacaaucaccacgaaggucgugcugugaggacuagucccuguucccagagcccacuuuuuuuucuuuuuuugaaauaaaauagccugucuuucagaucuaaaaaaaaaaaaaaaaaaaaaaaaaaaaaaaaaaaaaaaaaaaaaaaaaaaaaaaaaaaaaaaaugcaucccccccccccccccccccccccccccccccaaaggcucuuuucagagccaccagaauu

SEQ ID NO: 9983 - RNA, 1986 nt, Artificial Sequence; identical to SEQ ID NO: 9977
  mRNA product Design a-1 comprising derived and/or modified sequence from LASV(Pinneo-NIG-1969;Clade I)__AIT17837__NP (opt5)

SEQ ID NO: 9984 - RNA, 1986 nt, Artificial Sequence
  mRNA product Design a-1 comprising derived and/or modified sequence from LASV(ISTH0009-NIG-2011;Clade II)__AIT17405__NP (opt5)
gggagagucccgcagucggcguccagcggcucugcuuguucgugugugugucguugcaggccuuauucaagcuuaccaugagcguguccaaggaggucaaaucuuuccuguggacccagagccucagacgggaacuguccggcuacugcucuaacaucaaacuucaaguugugaaggacgcccaggcucugcuccacgggcuggauuuuagcgagguguccaauguccagcgccuuaugagaaagcagaaacgggacgauucugaccugaagcgccucagagaucugaaccaagccgugaauaaccugguugaacucaagagcacacagcagaaauccauucugcgggugggaacgcuuaccagcgacgaucugcucacacuggcggcugaccuugagaagcugaaaucuaaggucauccgcaccgaaagaccccucuccagcggcguguauauggggaaucugucuacacagcaacuggagcagcggcgcgcccuccugaacaugauuggaaugguuggcggggcccagggaacccagccuggcagagauggcgugguccgggugugggacgugaaaaauccggaucuucugaacaaucaauucgggacaaugcccucccucacccuggcuugucuuacgaagcagggacaggucgaccugaacgaugccguucucgcucugaccgaccugggccucaucuacacagccaaguauccuaauagcucugaccuggaucgccuuucccaaagccaucccauucugaacaugguggacaucaaaaaguccucucucaauaucagcggguacaacuuuucccugggagcggccgugaaagcuggcgccugcaugcuugaugggggaaauaugcuggagaccauuaaggucacaccucagaccauggacggcauccucaaaagcauucugaaggugaaaagaucucugggcauguucguuuccgauacgcccggggaacggaacccuuaugagaacauccucuacaagauuugucugagcggagacggcuggccguauaucgcuucucgcacaagcauuguggggagagccugggaaaauaccacagucgaucuugaguccgacggaaagccccagaaagugggcucugcggggagcaacaagucccugcagagcgccggauuuccuaccggccucaccuacucucaacugaugacacugaaagauuccaugaugcagcuugaccccagcgcuaagacguggaucgauaucgagggccggccugaagaccccguugagauugcccucuaccagccgaugucugggugcuauauccacuucuuuagagaaccuaccgaccugaaacaguucaagcaagaugcuaaguacucccauggaauugacguggccgaucuguuucccgcccagccuggccucacaagcgcugucaucgaggcgcugccccgcaauauggugcuuaccugucagggguccgacgauauuaaacggcugcucgacucucagggaagacgcgauaucaagcugaucgacauugcccugagcaaagcugauucccggagauucgaaaacgccgucugggaccaaugcaaggaucuuugucacaugcauacaggcgugguuguggagaaaaagaagcgcgggggcaaagaggaaaucacgccccacugcgcccucauggacuguauuauguaugaugcugccgucucuggaggccugaauaucccugugcugcgggcgguucucccgagagacaugguguuucgcaccagcucccccaaggucgugcugugaggacuagucccuguucccagagcccacuuuuuuuucuuuuuuugaaauaaaauagccugucuuucagaucuaaaaaaaaaaaaaaaaaaaaaaaaaaaaaaaaaaaaaaaaaaaaaaaaaaaaaaaaaaaaaaaaugcaucccccccccccccccccccccccccccccccaaaggcucuuuucagagccaccagaauu

SEQ ID NO: 9985 - RNA, 1986 nt, Artificial Sequence
  mRNA product Design a-1 comprising derived and/or modified sequence from LASV(ISTH2010-NIG-2012;Clade II)__AIT17483__NP (opt5)
gggagagucccgcagucggcguccagcggcucugcuuguucgugugugugucguugcaggccuuauucaagcuuaccaugagcgccuccaaggaggugaaaucuuuccuguggacccagagccucagacgggaacuguccggcuacugcucuaacaucaaacuucaagucguuaaggacgcucaggcccugcuccacgggcuggauuuuagcgagguguccaaugugcagcgccuuaugagaaagcagaaacgggacgauucugaccugaagcgccucagagaucugaaccaagcggucaauaaccugguggaacucaagagcacacagcagaaauccauucugcggguuggaacgcuuaccagcgacgaucugcucacacuggcugccgaccuugagaagcugaaaucuaaggugauccgcaccgaaagaccccucuccagcggcgucuauauggggaaucugucuacacagcaacuggagcagcggcgcgcccuccugaaccuuauuggaauggugggcggggcucagggaacccagccuggcagagauggcguugugcgggucugggacgugaaaaauccggaucugcucaacaaucaauucgggacaaugcccucccugacccuugccugucugacgaagcagggacagguggaccucaacgaugcuguccuggcccugaccgaccucggccugaucuacacagcgaaguauccuaauagcucugaccuugaucgccugucccaaagccaucccauucucaacaugguugacaccaaaaaguccucucugaauaucagcggguuuaacuucucccuuggagccgcugugaaagccggcgcuugcaugcuggaugggggaaauaugcucgagacaaucaaggugaccccucagacgauggacggcauucugaaaagcauccugaaggucaaaaagucucucggcauguuuguguccgauacacccggggaaagaaacccuuacgagaacauucuguauaagaucugucuuagcggagacggcuggccguacauugccucucggaccagcaucguugggcgcgcgugggaaaauacaaccguggaucuggaguccgacggaaaaccccacaaggucggcaccgccgggucuaacaaaagccuccaguccgcuggauucccuacaggccugacguauagccagcugaugacccuuaaggauucuaugaugcaacucgaccccuccgccaaaacauggauugauaucgagggcagaccugaagaccccguggagaucgcucuguaccagccgaugagcgggugcuacauucacuuuuuccgggaaccuaccgaccugaagcaguuuaagcaggaugccaaauauucucauggaaucgacguugccgaucucuuccccgcucaaccuggccugacauccgcggugauugaggcccuucccagaaauaugguccugaccugucaggggagcgacgauaucaagcgccuccuggacucccagggacggagagauauuaaacugaucgacaucgcucuuucuaaggccgauagccgccgguuugaaaacgccgugugggaccagugcaaagaucucugucauaugcacacgggcgucgugguugagaagaagaaaagagggggcaaggaggaaauuacaccccacugcgcucugauggacuguaucauguacgaugccgcgguguccggaggccugaauauuccuguccuccgcgcugugcugccgcgggacaugguuuucagaaccucuagccccaaagugguccuuugaggacuagucccuguucccagagcccacuuuuuuuucuuuuuuugaaauaaaauagccugucuuucagaucuaaaaaaaaaaaaaaaaaaaaaaaaaaaaaaaaaaaaaaaaaaaaaaaaaaaaaaaaaaaaaaaaugcaucccccccccccccccccccccccccccccccaaaggcucuuuucagagccaccagaauu

SEQ ID NO: 9986 - RNA, 1986 nt, Artificial Sequence
  mRNA product Design a-1 comprising derived and/or modified sequence from LASV(Lassa virus/H.sapiens-wt/NGA/2015/ISTH_0543;Clade II)__AVO03640__NP (opt5)
gggagagucccgcagucggcguccagcggcucugcuuguucgugugugugucguugcaggccuuauucaagcuuaccaugagcgccuccaaggaggugaaaucuuuccuguggacccagagccucagacgggaacuguccggcuacugcucuaacaucaaacuucaagucguuaaggacgcucaggcccugcuccacgggcuggauuuuagcgagguguccaaugugcagcgccuuaugagaaagcagaaacgggacgauucugaccugaagcgccucagagaucugaaccaagcggucaauaaccugguggaacucaagagcacacagcagaaauccauucugcggguuggaacgcuuaccagcgacgaucugcucacacuggcugccgaccuugagaagcugaaaucuaaggugauccgcaccgaaagaccccucuccagcggcgucuauauggggaaucugucuacacagcaacuggagcagcggcgcgcccuccugaacaugauuggaauggugggcggggcucagggaacccagccuggcagagauggcguugugcgggucugggacgugaaaaauccggaucuucugaacaaucaauucgggacaaugcccucccucacccuggccugucuuacgaagcagggacagguggaccugaacgaugcuguccucgcccugaccgaccugggccucaucuacacagcgaaguauccuaauagcucugaccuggaucgccuuucccaaagccaucccauucugaacaugguugacaccaaaaaguccucucucaauaucagcggguacaacuuuucccugggagccgcugugaaagccggcgcuugcaugcuugaugggggaaauaugcuggagacaaucaaggugaccccucagacgauggacggcauucucaaaagcauccugaaggucaaaaagucucugggcauguucguguccgauacacccggggaaagaaacccuuaugagaacauucucuacaagaucugucugagcggagacggcuggccguauauugccucucggaccagcaucguugggcgcgcgugggaaaauacaaccguggaucuugaguccgacggaaaaccccagaaggucggcucugccgggagcaacaaaucccugcagagcgcuggauuuccuaccggccucacauacucucaacugaugacgcugaaggauuccaugaugcagcuugaccccagcgccaaaaccuggauugauaucgagggcagaccugaagaccccguggagaucgcucucuaccagccgaugucugggugcuauauucacuucuuucgggaaccuacagaccugaagcaguucaagcaagaugccaaauacucccauggaaucgacguugccgaucuguuucccgcucagccuggccucaccagcgcggugauugaggcccugcccagaaauaugguccuuacaugucagggguccgacgauaucaagcgccugcucgacucucagggacggaaagauauuaagcugaucgacaucgcucugagcaaagccgauuccagacgcuucgaaaacgccgugugggaccaaugcaaggaucuuugucacaugcauaccggcgucgugguugagaagaaaaagagagggggcaaagaggaaauuacgccccacugcgcucucauggacuguaucauguaugaugccgcggugucuggaggccugaauauuccuguccugcgggcugugcucccgcgcgacaugguuuuucggacaagcucccccaaggugguccugugaggacuagucccuguucccagagcccacuuuuuuuucuuuuuuugaaauaaaauagccugucuuucagaucuaaaaaaaaaaaaaaaaaaaaaaaaaaaaaaaaaaaaaaaaaaaaaaaaaaaaaaaaaaaaaaaaugcaucccccccccccccccccccccccccccccccaaaggcucuuuucagagccaccagaauu

SEQ ID NO: 9987 - RNA, 1986 nt, Artificial Sequence
  mRNA product Design a-1 comprising derived and/or modified sequence from LASV(Lassa virus/H.sapiens-wt/NGA/2016/ISTH_0009;Clade II)__AVO03572__NP (opt5)
gggagagucccgcagucggcguccagcggcucugcuuguucgugugugugucguugcaggccuuauucaagcuuaccaugagcgccuccaaggaggugaaaucuuuccuguggacccagagccucagacgggaacuguccggcuacugcucuaacaucaaacuucaagucguuaaggacgcucaggcccugcuccacgggcuggauuuuagcgagguguccaaugugcagcgccuuaugagaaagcagaaacgggacgauucugaccugaagcgccucagagaucugaaccaagcggucaauaaccugguggaacucaagagcacacagcagaaauccauucugcggguuggaacgcuuaccagcgacgaucugcucacacuggcugccgaccuugagaagcugaaaucuaaggugauccgcaccgaaagaccccucuccagcggcgucuauauggggaaucugucuacacagcaacuggagcagcggcgcgcccuccugaacaugauuggaauggugggcggggcucagggaacccagccuggcagagauggcguugugcgggucugggacgugaaaaauccggaucuucugaacaaucaauucgggacaaugcccucccucacccuggccugucuuacgaagcagggacagguggaccugaacgaugcuguccucgcccugaccgaccugggccucaucuacacagcgaaguauccuaauagcucugaccuggaucgccuuucccaaagccaucccauucugaacaugguugacaccaaaaaguccucucucaauaucagcggguacaacuuuucccugggagccgcugugaaagccggcgcuugcaugcuugaugggggaaauaugcuggagacaaucaaggugaccccucagacgauggacggcauucucaaaagcauccugaaggucaaaaagucucugggcauguucguguccgauacacccggggaaagaaacccuuaugagaacauucucuacaagaucugucugagcggagacggcuggccguauauugccucucggaccagcaucguugggcgcgcgugggaaaauacaaccguggaucuugaguccgacggaaaaccccagaaggucggcucugccgggagcaacaaaucccugcagagcgcuggauuuccuaccggccucacauacucucaacugaugacgcugaaggauuccaugaugcagcuugaccccagcgccaaaaccuggauugauaucgagggcagaccugaagaccccguggagaucgcucucuaccagccgaugucugggugcuauauucacuucuuucgggaaccuacagaccugaagcaguucaagcaagaugccaaauacucccauggaaucgacguugccgaucuguuucccgcucagccuggccucaccagcgcggugauugaggcccugcccagaaauaugguccuuacaugucagggguccgacgauaucaagcgccugcucgacucucagggacggagagauauuaaacugaucgacaucgcucugagcaaggccgauucccgccgguucgaaaacgccgugugggaccaaugcaaagaucuuugucacaugcauaccggcgucgugguugagaagaagaaaagagggggcaaggaggaaauuacgccccacugcgcucucauggacuguaucauguaugaugccgcggugucuggaggccugaauauuccuguccugcgcgcugugcucccgcgggacaugguuuuuagaacaagcucccccaaagugguccugugaggacuagucccuguucccagagcccacuuuuuuuucuuuuuuugaaauaaaauagccugucuuucagaucuaaaaaaaaaaaaaaaaaaaaaaaaaaaaaaaaaaaaaaaaaaaaaaaaaaaaaaaaaaaaaaaaugcaucccccccccccccccccccccccccccccccaaaggcucuuuucagagccaccagaauu

SEQ ID NO: 9988 - RNA, 1986 nt, Artificial Sequence
  mRNA product Design a-1 comprising derived and/or modified sequence from LASV(Lassa virus/H.sapiens-wt/NGA/2016/ISTH_0017;Clade II)__AVO03568__NP (opt5)
gggagagucccgcagucggcguccagcggcucugcuuguucgugugugugucguugcaggccuuauucaagcuuaccaugagcgccuccaaggaggugaaaucuuuccuguggacccagagccucagacgggaacuguccggcuacugcucuagcaucaaacuucaagucguuaaggacgcucaggcccugcuccacgggcuggauuuuuccgaggugucuaacgugcagcgccuuaugagaaagcagaaacgggacgauagcgaccugaagcgccucagagaucugaaucaagcggucaacaaucugguggaacucaaguccacacagcagaaaagcauucugcggguuggaacgcuuaccucugacgaucugcucacacuggcugccgaccuugagaagcugaaauccaaggugauccgcaccgaaagaccccucagcucuggcgucuauauggggaaccuguccacacagcaacuggagcagcggcgcgcccuccugaauaugauuggaauggcuggcggggcccagggaacccagccuggcagagauggcgugguucgggugugggacgucaaaaacccggaucuucugaauaaccaauucgggacaaugcccagccucacccuggcuugucuuacgaagcagggacagguggaccugaaugaugccgugcucgcgcugaccgaccugggccucaucuacacagccaaguauccuaacucuuccgaccuggaucgccuuagccaaucccaucccauucugaauauggucgacaccaaaaagucuagccucaacaucuccggguacaauuuuagccugggagcugccguuaaagcuggcgccugcaugcuugaugggggaaacaugcuggagacaaucaaggugaccccucagacgauggacggcauucucaaaucuauccugaaggugaaaagaucccugggcauguucgucagcgaugcgcccggggaacggaauccuuaugagaacauucucuacaagaucugucugucuggagacggcuggccguauauugccagccgcacauccaucguggggagagcuugggaaaacaccacaguugaucuugagucugacggaaagccccagaaagugggcgccaccgggagcaauaagucccugcagagcgcuggauuuccuaccggccucacauacucucaacugaugacgcugaaagauuccaugaugcagcuugaccccagcgccaagaccuggauugauaucgagggccggccugaagaccccgucgagguggcccucuaccagccgguuucugggugcuauauccacuucuuuagagaaccuacagaccugaaacaguucaagcaagaugcuaaguacucccauggaauugacguggcggaucuguuucccgcccagccuggccucaccagcgcugucaucgaggcccugccccgcaacauggugcuuacaugucagggguccgacgauauuaaaaagcugcucgacucucagggacggaaagauaucaagcugauugacaucgcccugagcaaagcugauuccagacgcuucgaaaaugccgucugggaccaaugcaaggaucuuugucacaugcauaccggcgugguuguggagaagaaaaagagagggggcaaagaggaaaucacgccccacugcgcgcucauggacuguauuauguaugaugcugccgucucuggaggccugaacaucccugugcugcgggccguucucccgcgcgacaugguguuucggacaagcucccccaaggucgugcugugaggacuagucccuguucccagagcccacuuuuuuuucuuuuuuugaaauaaaauagccugucuuucagaucuaaaaaaaaaaaaaaaaaaaaaaaaaaaaaaaaaaaaaaaaaaaaaaaaaaaaaaaaaaaaaaaaugcaucccccccccccccccccccccccccccccccaaaggcucuuuucagagccaccagaauu

SEQ ID NO: 9989 - RNA, 1986 nt, Artificial Sequence
  mRNA product Design a-1 comprising derived and/or modified sequence from LASV(Lassa virus/H.sapiens-wt/NGA/2018/ISTH_0959;Clade II)__AVV65100__NP (opt5)
gggagagucccgcagucggcguccagcggcucugcuuguucgugugugugucguugcaggccuuauucaagcuuaccaugagcgccuccaaggaggugaaaucuuuccuguggacccagagccucagacgggaacuguccggcuacugcucuaacaucaaacuucaagucguuaaggacgcucaggcccugcuccacgggcuggauuuuagcgagguguccaaugugcagcgccuuaugagaaagcagaaacgggacgauucugaccugaagcgccucagagaucugaaccaagcggucaauaaccugguggaacucaagagcacccagcagaaauccauucugcggguuggaacgcuuaccagcgacgaucugcucacacuggcugccgaccuugagaagcugaaaucuaaggugauccgcaccgaaagaccccucuccagcggcgucuauauggggaaucugucuacacagcaacuggagcagcggcgcgcccuccugaaccuuauuggaauggugggcggggcucagggaacccagccuggcagagauggcguugugcgggucugggacgugaaaaauccggaucugcucaacaaucaauucgggacaaugcccucccugacccuugccugucugacgaagcagggacagguggaccucaacgaugucguucuggcucugaccgaccucggccugaucuacacagccaaguauccuaauagcucugaccuugaucgccugucccaaagccaucccauucucaacaugguggacaccaaaaaguccucucugaauaucagcggguuuaacuucucccuuggagcggccgugaaagcuggcgccugcaugcuggaugggggaaauaugcucgagacaaucaaggucaccccucagacgauggacggcauucugaaaagcauccugaaggugaaaaagucucucggcauguuuguuuccgauacacccggggaaagaaacccuuacgagaacauucuguauaagaucugucuuagcggagacggcuggccguacauugcuucucggaccagcaucguggggcgcgccugggaaaauacaaccgucgaucuggaguccgacggaaaaccccacaaggugggcaccgcggggucuaacaaaagccuccaguccgccggauucccuacaggccugacguauagccagcugaugacccuuaaggauucuaugaugcaacucgaccccuccgcuaaaacauggauugauaucgagggcagaccugaagaccccguugagaucgcccuguaccagccgaugagcgggugcuacauucacuuuuuccgggaaccuaccgaccugaagcaguuuaagcaggaugcuaaauauucucauggaaucgacguggccgaucucuuccccgcccaaccuggccugacauccgcugucauugaggcgcuucccagaaauauggugcugaccugucaggggagcgacgauaucaagcgccuccuggacucccagggacggaaagauauuaagcugaucgacaucgcccuuucuaaaacggauagcagacgcuuugaaaacgcugucugggaccagugcaaggaucucugucauaugcacacaggcgugguuguggagaagaaaaagagagggggcaaagaggaaauuacaccccacugcgcccugauggacuguaucauguacgaugccgcugucuccggaggccugaauauuccugugcuccgggccguucugccgcgcgacaugguguuccggaccucuagccccaaggucgugcuuugaggacuagucccuguucccagagcccacuuuuuuuucuuuuuuugaaauaaaauagccugucuuucagaucuaaaaaaaaaaaaaaaaaaaaaaaaaaaaaaaaaaaaaaaaaaaaaaaaaaaaaaaaaaaaaaaaugcaucccccccccccccccccccccccccccccccaaaggcucuuuucagagccaccagaauu

SEQ ID NO: 9990 - RNA, 1986 nt, Artificial Sequence
  mRNA product Design a-1 comprising derived and/or modified sequence from LASV(LASV003-NIG-2008;Clade II)__AIT17581__NP (opt5)
gggagagucccgcagucggcguccagcggcucugcuuguucgugugugugucguugcaggccuuauucaagcuuaccaugagcgccuccaaggaggugaaaucuuuccuguggacccagagccucagacgggaacuguccggcuacugcucuagcaucaaacuucaagucguuaaggacgcucaggcccugcuccacgggcuggauuuuuccgaggugucuaacgugcagcgccuuaugagaaagcagaaacgggacgauagcgaccugaagcgccucagagaucugaaucaagcggucaacaaucugguggaacucaaguccacccagcagaaaagcguucugcgggugggaacgcuuaccucugacgaucugcucacacuggcugccgaccuugagaagcugaaauccaaggucauucgcaccgaaagaccccucagcucuggcguguauauggggaaccuguccgcccagcaacuggagcagcggcgcacacuccugaauaugaucggaaugguuggcggggcucagggaacccagccuggcagagauggcgugguccgggugugggacgugaaaaacccggaucuucugaauaaccaauucgggacaaugcccagccucacccuggccugucuuacgaagcagggacaggucgaccugaaugauguugugcucgcucugaccgaccugggccucauuuacacagccaaguauccuaacucuuccgaccuggaucgccuuagccaaucccaucccauccugucuaugguggacaccaaaaagagcucccucaauauuagcggguacaacuuuucucugggagcggccgucaaagcuggcgccugcaugcuugaugggggaaauaugcuggagacaaucaaggugaccccucagacgauggacggcauccucaaauccauucugaagguuaaaaagagccugggcauguucgugucugauacacccggggaaagaaacccuuaugagaauauccucuacaagauuugucugagcggagacggcuggccguauaucgcuucccggaccucuauugucgggcgcgccugggaaaacacaaccguggaucuugagagcgacggaaaaccccagaagguuggcaccgcgggguccaacaaaagccugcagucugccggauuuccuacaggccucacguacucccaacugaugacccugaaggauagcaugaugcagcuugaccccucugcuaaaacauggaucgauauugagggcagaccugaagaccccguggagaucgcccucuaccagccgauguccgggugcuauauccacuucuuucgggaaccuaccgaccugaagcaguucaagcaagaugcuaaauacagccauggaauugacgucacagaucuguuucccgcccagccuggccucaccuccgccgugaucgaggcucugcccagaaauaugguccuuacgugucaggggucugacgauauuaagcgccugcucgacagccagggacggagagauaucaaacugauugacaucgcgcuguccaaggccgauucucgccgguucgaaaacgcugugugggaccaaugcaaagaucuuugucacaugcauacaggcguuguggucgagaagaagaaaagagggggcaaggaggaaaucacaccccacugcgcccucauggacuguauuauguaugaugccgcugugagcggaggccugaauaucccuguucugcgcgccgugcucccgcgggacauggucuuuagaaccuccagccccaaaguggugcugugaggacuagucccuguucccagagcccacuuuuuuuucuuuuuuugaaauaaaauagccugucuuucagaucuaaaaaaaaaaaaaaaaaaaaaaaaaaaaaaaaaaaaaaaaaaaaaaaaaaaaaaaaaaaaaaaaugcaucccccccccccccccccccccccccccccccaaaggcucuuuucagagccaccagaauu

SEQ ID NO: 9991 - RNA, 1986 nt, Artificial Sequence
  mRNA product Design a-1 comprising derived and/or modified sequence from LASV(LASV035-NIG-2009;Clade II)__AIT17589__NP (opt5)
gggagagucccgcagucggcguccagcggcucugcuuguucgugugugugucguugcaggccuuauucaagcuuaccaugagcgccuccaaggaggugaaaucuuuccuguggacccagagccucagacgggaacuguccggcuacugcucuagcaucaaacuucaagucguuaaagacgcucaggcccugcuccacgggcuggauuuuuccgaggugucuaacgugcagcgccuuaugagaaagcagaaacgggacgauagcgaccugaagcgccucagagaucugaaucaagcggucaacaaucugguggaacucaaguccacacagcagaaaagcauucugcggguuggaacgcuuaccucugacgaucugcucacacuggcugccgaccuugagaagcugaaauccaaggugauccgcaccgaaagaccccucagcucuggcgucuauauggggaaccuguccgcccagcaacuggagcagcggcgcgcucuccugaauaugauuggaauggugggcggggcccagggaacacagccuggcagagauggcguugugcgggucugggacgugaaaaacccggaucuucugaauaaccaauucgggaccaugcccagccucacacuggcuugucuuaccaagcagggacagguggaccugaaugaugccguccucgcgcugacggaccugggccucaucuacaccgccaaguauccuaacucuuccgaccuggaucgccuuagccaaucccaucccauucugaauaugguugacacaaagaagucuagccucaacaucuccggguacaauuuuagccugggagcugccgugaaagcuggcgccugcaugcuugaugggggaaacaugcuggagaccaucaaggugacaccucagaccauggacggcauucucaaaucuauccugaaggucaaaagaucccugggcauguucgugagcgauacgcccggggaacggaauccuuaugagaacauucucuacaagaucugucugucuggagacggcuggccguauauugcgagccgcacauccaucguugggagagccugggaaaacaccacaguggaucuugagucugacggaaagccccagaaagucggcaccaccgggagcaauaagucccugcagagcgcuggauuuccuacaggccucacguacucucaacugaugacccugaaagauuccaugaugcagcuugaccccagcgccaagacauggauugauaucgagggccggccugaagaccccguggagaucgcucucuaccagccgaugucugggugcuauauucacuucuuuagagaaccuaccgaccugaaacaguucaagcaagaugccaaguacucccauggaaucgacguugccgaucuguuucccgcucagccuggccucacaagcgcggugauugaggcccugccccgcaacaugguccuuaccugucagggguccgacgauaucaaaaagcugcucgacucucagggacggagagauauuaaacugaucgacaucgcucugagcaaggccgauucccgcaaauucgaaaaugccgugugggaccaaugcaaggaucuuugucacaugcauacgggcgucgugguugagaagaaaaagagagggggcaaagaggaaauuacaccccacugcgcucucauggacuguaucauguaugaugccgcggugucuggaggccugaacauuccuguccugcgggcugugcucccgcgcgacaugguuuuucggaccagcucccccaaggugguccugugaggacuagucccuguucccagagcccacuuuuuuuucuuuuuuugaaauaaaauagccugucuuucagaucuaaaaaaaaaaaaaaaaaaaaaaaaaaaaaaaaaaaaaaaaaaaaaaaaaaaaaaaaaaaaaaaaugcaucccccccccccccccccccccccccccccccaaaggcucuuuucagagccaccagaauu

SEQ ID NO: 9992 - RNA, 1986 nt, Artificial Sequence
  mRNA product Design a-1 comprising derived and/or modified sequence from LASV(LASV1000-NIG-2009;Clade II)__AIT17783__NP (opt5)
gggagagucccgcagucggcguccagcggcucugcuuguucgugugugugucguugcaggccuuauucaagcuuaccaugagcgccuccaaggaggugaaaucuuuccuguggacccagagccucagacgggaacuguccggcuacugcucuaacaucaaacuucaagucguuaaggacgcucaggcccugcuccacgggcuggauuuuagcgagguguccaaugugcagcgccuuaugagaaagcagaaacgggacgauucugaccugaagcgccucagagaucugaaccaagcggucaauaaccugguggaacucaagagcacacagcagaaauccauucugcggguuggaacgcuuaccagcgacgaucugcucacacuggcugccgaccuugagaagcugaaaucuaaggugauccgcaccgaaagaccccucuccagcggcgucuauauggggaaucugucuacacagcaacuggagcagcggcgcgcccuccugaacaugauuggaauggugggcggggcucagggaacccagccuggcagagauggcguugugcgggucugggacgugaaaaauccggaucuucugaacaaucaauucgggacaaugcccucccucacccuggccugucuuacgaagcagggacagguggaccugaacgaugucguucucgcucugaccgaccugggccucaucuacacagccaaguauccuaauagcucugaccuggaucgccuuucccaaagccaucccauucugaacaugguggacaccaaaaaguccucucucaauaucagcggguacaacuuuucccugggagcggccgugaaagcuggcgccugcaugcuugaugggggaaauaugcuggagacaaucaaggucaccccucagacgauggacggcauucucaaaagcauccugaaggugaaaaagucucugggcauguucguuuccgauacacccggggaaagaaacccuuaugagaacauucucuacaagaucugucugagcggagacggcuggccguauauugcuucucggaccagcaucguggggcgcgccugggaaaauacaaccgucgaucuugaguccgacggaaaaccccagaaggugggcaccgcggggucuaacaaaagccugcaguccgccggauuuccuacaggccucacguacagccaacugaugacccugaaggauucuaugaugcagcuugaccccuccgcuaaaacauggauugauaucgagggcagaccugaagaccccguugagaucgcccucuaccagccggugagcgggugcuauauucacuucuuucgggaaccuaccgaccugaagcaguucaagcaagaugcuaaauacucucauggaaucgacgucgccgaucuguuucccgcccagccuggccucacauccgcugugauugaggcgcugcccagaaauaugguccuuaccugucaggggagcgacgauaucaagcgccugcucgacucccagggacggagagauauuaaacugaucgacaucgcccugucuaaggcugauagccgccgguucgaaaacgccgugugggaccaaugcaaagaucuuugucacaugcauacgggcguuguggucgagaagaagaaaagagggggcaaggaggaaauuacaccccacugcgcccucauggacuguaucauguaugaugcugccguguccggaggccugaauauuccuguucugcgcgcggugcucccgcgggacauggucuuuagaaccucuagccccaaaguggugcugugaggacuagucccuguucccagagcccacuuuuuuuucuuuuuuugaaauaaaauagccugucuuucagaucuaaaaaaaaaaaaaaaaaaaaaaaaaaaaaaaaaaaaaaaaaaaaaaaaaaaaaaaaaaaaaaaaugcaucccccccccccccccccccccccccccccccaaaggcucuuuucagagccaccagaauu

SEQ ID NO: 9993 - RNA, 1986 nt, Artificial Sequence
  mRNA product Design a-1 comprising derived and/or modified sequence from LASV(LASV221-NIG-2010;Clade II)__AIT17625__NP (opt5)
gggagagucccgcagucggcguccagcggcucugcuuguucgugugugugucguugcaggccuuauucaagcuuaccaugagcgccuccaaggaggugaaaucuuuccuguggacccagagccucagacgggaacuguccggcuacugcucuagcaucaaacuucaagucguuaaggacgcucaggcccugcuccacgggcuggauuuuuccgaggugucuaacgugcagcgccuuaugagaaagcagcggcgcgacgauagcgaccugaaaagacuccgggaucugaaucaagcggucaacaaucugguggaacucaaguccacacagcaaaagagcauucugcgcguuggaacgcuuaccucugacgaucugcucacacuggcugccgaccuugagaaacugaaguccaaagugaucagaaccgaacggccccucagcucuggcgucuauauggggaaccuguccacacagcagcuggagcagcgcagagcccuccugaauaugauuggaauggugggcggggcucagggaacccagccuggccgggauggcguugugcgcgucugggacgugaagaacccggaucuucugaauaaccaauucgggacaaugcccagccucacccuggccugucuuacgaaacagggacagguggaccugaaugaugcuguccucgcccugaccgaccugggccucaucuacacagcgaaguauccuaacucuuccgaccuggauagacuuagccaaucccaucccauucugaauaugguugacaccaagaaaucuagccucaacaucuccggguacaauuuuagccugggagccgcugugaaggccggcgcuugcaugcuugaugggggaaacaugcuggagacaaucaaagugaccccucagacggucgacggcauucucaagucuauccugaaagugaagcggucccugggcauguucguuagcgauacacccggggaacgcaauccuuaugagaacauucucuacaaaaucugucugucuggagacggcuggccguauauugccagcagaaccuccaucguggggcgggcgugggaaaacacaaccgucgaucuugagucugacggaaagccccagaaggugggcaccgccgggagcaauaaaucccugcagagcgcuggauuuccuacaggccucacguacucucaacugaugacccugaaggauuccaugaugcagcuugaccccagcgccaaaacauggauugauaucgagggcagaccugaagaccccguugagaucgcucucuaccagccgaugucugggugcuauauucacuucuuucgcgaaccuaccgaccugaagcaguucaaacaagaugccaaguacucccauggaaucgacguggccgaucuguuucccgcucagccuggccucacaagcgcggucauugaggcccugccccggaacauggugcuuaccugucagggguccgacgauaucaagagacugcucgacucucagggacgccgggauauuaaacugaucgacaucgcucugagcaaggccgauuccagaaaauucgaaaaugccgucugggaccaaugcaaggaucuuugucacaugcauacgggcgugguuguggagaaaaagaagcgcgggggcaaagaggaaauuacaccccacugcgcucucauggacuguaucauguaugaugccgcggucucuggaggccugaacauuccugugcugcgggcuguucucccgagagacaugguguuucgcaccagcucccccaaggucgugcugugaggacuagucccuguucccagagcccacuuuuuuuucuuuuuuugaaauaaaauagccugucuuucagaucuaaaaaaaaaaaaaaaaaaaaaaaaaaaaaaaaaaaaaaaaaaaaaaaaaaaaaaaaaaaaaaaaugcaucccccccccccccccccccccccccccccccaaaggcucuuuucagagccaccagaauu

SEQ ID NO: 9994 - RNA, 1986 nt, Artificial Sequence
  mRNA product Design a-1 comprising derived and/or modified sequence from LASV(LASV237-NIG-2010;Clade II)__AIT17639__NP (opt5)
gggagagucccgcagucggcguccagcggcucugcuuguucgugugugugucguugcaggccuuauucaagcuuaccaugagcgccuccaaggaggugaaaucuuuccuguggacccagagccucagacgggaacuguccggcuacugcucuaacaucaaacuucaagucguuaaggacgcucaggcccugcuccacgggcuggauuuuagcgagguguccaaugugcagcgccuuaugagaaagcagaaacgggacgauucugaccugaagcgccucagagaucugaaccaagcggucaauaaccugguggaacucaagagcacacagcagaaauccauucugcggguuggaacgcuuaccagcgacgaucugcucacacuggcugccgaccuugagaagcugaaaucuaaggugauccgcaccgaaagaccccucuccagcggcgucuauauggggaaucugucuacacagcaacuggagcagcggcgcgcccuccugaacaugauuggaauggugggcggggcucagggaacccagccuggcagagauggcguugugcgggucugggacgugaaaaauccggaucuucugaacaaucaauucgggacaaugcccucccucacccuggccugucuuacgaagcagggacagguggaccugaacgaugcuguccucgcccugaccgaccugggccucaucuacacagcgaaguauccuaauagcucugaccuggaucgccuuucccaaagccaucccauucugaacaugguugacaucaaaaaguccucucucaauaucagcggguacaacuuuucccugggagccgcugugaaagccggcgcuugcaugcuugaugggggaaauaugcuggagaccauuaaggugacaccucagaccauggacggcauccucaaaagcauucugaaggucaaaagaucucugggcauguucguguccgauacgcccggggaacggaacccuuaugagaacauccucuacaagauuugucugagcggagacggcuggccguauaucgccucucgcacaagcauuguugggagagcgugggaaaauaccacaguggaucuugaguccgacggaaagccccagaaagucggcucugccgggagcaacaagucccugcagagcgcuggauuuccuaccggccucaccuacucucaacugaugacacugaaagauuccaugaugcagcuugaccccagcgccaagacguggaucgauaucgagggccggccugaagaccccguggagauugcucucuaccagccgaugucugggugcuauauccacuucuuuagagaaccuaccgaccugaaacaguucaagcaagaugccaaguacucccauggaauugacguugccgaucuguuucccgcucagccuggccucacaagcgcggugaucgaggcccugccccgcaauaugguccuuaccugucagggguccgacgauauuaaacggcugcucgacucucagggaagacgcgauaucaagcugaucgacauugcucugagcaaagccgauucccggagauucgaaaacgccgugugggaccaaugcaaggaucuuugucacaugcauacaggcgucgugguugagaaaaagaagcgcgggggcaaagaggaaaucacgccccacugcgcucucauggacuguauuauguaugaugccgcggugucuggaggccugaauaucccuguccugcgggcugugcucccgagagacaugguuuuucgcaccagcucccccaaggugguccugugaggacuagucccuguucccagagcccacuuuuuuuucuuuuuuugaaauaaaauagccugucuuucagaucuaaaaaaaaaaaaaaaaaaaaaaaaaaaaaaaaaaaaaaaaaaaaaaaaaaaaaaaaaaaaaaaaugcaucccccccccccccccccccccccccccccccaaaggcucuuuucagagccaccagaauu

SEQ ID NO: 9995 - RNA, 1986 nt, Artificial Sequence
  mRNA product Design a-1 comprising derived and/or modified sequence from LASV(LASV253-NIG-2011;Clade II)__AIT17671__NP (opt5)
gggagagucccgcagucggcguccagcggcucugcuuguucgugugugugucguugcaggccuuauucaagcuuaccaugagcgccuccaaggaggugaaaucuuuccuguggacccagagccucagacgggaacuguccggcuacugcucuagcaucaaacuucaagucguuaaggacgcucaggcccugcuccacgggcuggauuuuuccgaggugucuaacgugcagcgccuuaugagaaagcagaaacgggacgauagcgaccugaagcgccucagagaucugaaucaagcggucaacaaucugguggaacucaaguccacccagcagaaaagcguucugcgggugggaacgcuuaccucugacgaucugcucacacuggcugccgaccuugagaagcugaaauccaaggucauucgcaccgaaagaccccucagcucuggcguguauauggggaaccuguccacacagcaacuggagcagcggcgcgcccuccugaauaugaucggaaugguuggcggggcucagggaacccagccuggcagagauggcgugguccgggugugggacgugaaaaacccggaucuucugaauaaccaauucgggacaaugcccagccucacccuggccugucuuacgaagcagggacaggucgaccugaaugauguugugcucgcucugaccgaccugggccucauuuacacagccaaguauccuaacucuuccgaccuggaucgccuuagccaaucccaucccauccugaauaugguggacaccaaaaagucuagccucaacauuuccggguacaauuuuagccugggagcggccgucaaagcuggcgccugcaugcuugaugggggaaacaugcuggagacaaucaaggugaccccucagacgauggacggcauccucaaaucuauucugaagguuaaaaagucccugggcauguucgugagcgauacacccggggaaagaaauccuuaugagaacauccucuacaagauuugucugucuggagacggcuggccguauaucgcuagccggaccuccauugucgggcgcgccugggaaaacacaaccguggaucuugagucugacggaaaaccccagaagguuggcaccgcggggagcaauaaaucccugcagagcgccggauuuccuacaggccucacguacucucaacugaugacccugaaggauuccaugaugcagcuugaccccagcgcuaaaacauggaucgauauugagggcagaccugaagaccccguggagaucgcccucuaccagccgaugucugggugcuauauccacuucuuucgggaaccuaccgaccugaagcaguucaagcaagaugcuaaauacucccauggaauugacgucacagaucuguuucccgcccagccuggccucaccagcgccgugaucgaggcucugcccagaaacaugguccuuacgugucagggguccgacgauauuaagcgccugcucgacucucagggacggagagauaucaaacugauugacaucgcgcugagcaaggccgauucccgccgguucgaaaaugcugugugggaccaaugcaaagaucuuugucacaugcauacaggcguuguggucgagaagaagaaaagagggggcaaggaggaaaucacaccccacugcgcccucauggacuguauuauguaugaugccgcugugucuggaggccugaacaucccuguucugcgcgccgugcucccgcgggacauggucuuuagaaccagcucccccaaaguggugcugugaggacuagucccuguucccagagcccacuuuuuuuucuuuuuuugaaauaaaauagccugucuuucagaucuaaaaaaaaaaaaaaaaaaaaaaaaaaaaaaaaaaaaaaaaaaaaaaaaaaaaaaaaaaaaaaaaugcaucccccccccccccccccccccccccccccccaaaggcucuuuucagagccaccagaauu

SEQ ID NO: 9996 - RNA, 1986 nt, Artificial Sequence
  mRNA product Design a-1 comprising derived and/or modified sequence from LASV(LASV254-NIG-2011;Clade II)__AIT17675__NP (opt5)
gggagagucccgcagucggcguccagcggcucugcuuguucgugugugugucguugcaggccuuauucaagcuuaccaugagcgccuccaaggaggugaaaucuuuccuguggacccagagccucagacgggaacuguccggcuacugcucuagcaucaaacuucaagucguuaaggacgcucaggcccugcuccacgggcuggauuuuuccgaggugucuaacgugcagcgccuuaugagaaagcagaaacgggacgauagcgaccugaagcgccucagagaucugaaucaagcggucaacaaucugguggaacucaaguccacacagcagaaaagcguucugcgggugggaacgcuuaccucugacgaucugcucacacuggcugccgaccuugagaagcugaaauccaaggucauucgcaccgaaagaccccucagcucuggcguguauauggggaaccuguccacacagcaacuggagcagcggcgcgcccuccugaauaugaucggaaugguuggcggggcucagggaacccagccuggcagagauggcgugguccgggugugggacgugaaaaacccggaucuucugaauaaccaauucgggacaaugcccagccucacccuggccugucuuacgaagcagggacaggucgaccugaaugaugcuguucucgcccugaccgaccugggccucauuuacacagcgaaguauccuaacucuuccgaccuggaucgccuuagccaaucccaucccauccugaauaugguggacaccaaaaagucuagccucaacauuuccggguacaauuuuagccugggagccgcugugaaagccggcgcuugcaugcuugaugggggaaacaugcuggagacaaucaaggucaccccucagacgauggacggcauccucaaaucuauucugaaggugaaaaagucccugggcauguucguuagcgauacacccggggaaagaaauccuuaugagaacauccucuacaagauuugucugucuggagacggcuggccguauaucgccagccggaccuccauuguggggcgcgcgugggaaaacacaaucgucgaucuugagucugacggaaaaccccagaaggugggcaccgccgggagcaauaaaucccugcagagcgcuggauuuccuaccggccucacauacucucaacugaugacgcugaaggauuccaugaugcagcuugaccccagcgccaaaaccuggauugauaucgagggcagaccugaagaccccguugagaucgcucucuaccagccgaugucugggugcuauauucacuucuuucgggaaccuacagaccugaagcaguucaagcaagaugccaaauacucccauggaaucgacguggccgaucuguuucccgcucagccuggccucaccagcgcggucauugaggcccugcccagaaacauggugcuuacaugucagggguccgacgauaucaagcgccugcucgacucucagggacggagagauauuaaacugaucgacaucgcucugagcaaggccgauucccgccgguucgaaaaugccgucugggaccaaugcaaagaucuuugucacaugcauaccggcgugguuguggagaagaagaaaagagggggcaaggaggaaauuacgccccacugcgcucucauggacuguaucauguaugaugccgcggucucuggaggccugaacauuccugugcugcgcgcuguucucccgcgggacaugguguuuagaacaagcucccccaaagucgugcugugaggacuagucccuguucccagagcccacuuuuuuuucuuuuuuugaaauaaaauagccugucuuucagaucuaaaaaaaaaaaaaaaaaaaaaaaaaaaaaaaaaaaaaaaaaaaaaaaaaaaaaaaaaaaaaaaaugcaucccccccccccccccccccccccccccccccaaaggcucuuuucagagccaccagaauu

SEQ ID NO: 9997 - RNA, 1986 nt, Artificial Sequence
  mRNA product Design a-1 comprising derived and/or modified sequence from LASV(Nig08-04;Clade II)__ADU56611__NP (opt5)
gggagagucccgcagucggcguccagcggcucugcuuguucgugugugugucguugcaggccuuauucaagcuuaccaugagcgccuccaaggaggugaaaucuuuccuguggacccagagccucagacgggaacuguccggcuacugcucuaacaucaaacuucaagucguuaaggacgcucaggcccugcuccacgggcuggauuuuagcgagguguccaaugugcagcgccuuaugagaaagcagaaacgggacgauggagaccugaagcgccucagagaucugaaccaagcggucaauaaccugguggaacucaagucuacccagcagaaaagcguucugcgggugggcacgcuuaccuccgacgaucugcucacacuggcugccgaccuugagaagcugaaaagcaaggucauucgcaccgaaagaccccucucuuccgggguguauaugggaaaucugagcacacagcaacuggagcagcggaaagcccuccugucuaugaucggcaugguugggggagcucagggcacccagccuggccgcgaugggguggucagagugugggacgugaagaacccggaucuucugaauaaccaauucggaacaaugcccucccucacccuggccugucuuacgaagcagggccaggucgaccugaaugaugcuguucucgcccugaccgaccuggggcucauuuacacagcgaaauauccuaacagcucugaccuggaucggcuuucccaaagccaucccauccugaauaugguggacaccaagaaauccucucucaacauuagcggauacaauuuuucccugggcgccgcugugaaggccggggcuugcaugcuugauggaggcaacaugcuggagacaaucaaagucaccccucagacgauggacggcauccucaagagcauucugaaagugaagcgcucucuggggauguucguuuccgauacacccggagaaagaaauccuuaugagaacauccucuacaagauuugucugagcggcgacggguggccguauaucgccucucggaccagcauugugggacgcgcgugggaaaacacaaccgucgaucuugaguccgacggcaaaccccagaagguggggaccgccggaucuaauaaaagccugcaguccgcuggcuuuccuacaggccucacguacagccaacugaugacccugaaggauucuaugaugcagcuugaccccuccgccaaaacauggaucgauauugaggggagaccugaagaccccguugagaucgcucucuaccagccgaugagcggaugcuauauccacuucuuucgggaaccuaccgaccugaagcaguucaagcaagaugccaaauacucucauggcauugacgugacagaucuguuuuccgcccagcccgggcucaccagcgcugucaucgaggcgcugccuagaaacauggugcuuacgugucagggauccgacgauauuaagaaacugcucgacucucagggccgccgggauaucaagcugauugacaucagccugaauaaagccgauuccagacgcuucgaaaacgcugucugggaccaaugcaaggaucuuugucacaugcauacaggggugguuguggagaagaaaaagcggggcggaaaagaggaaaucacaccccacugcgcccucauggacuguauuauguuugaugccgcugucucuggcgggcugaauauccccauucugagagccgugcucccucgcgacaugguuuuccggaccagcuccccgaaggugguccugugaggacuagucccuguucccagagcccacuuuuuuuucuuuuuuugaaauaaaauagccugucuuucagaucuaaaaaaaaaaaaaaaaaaaaaaaaaaaaaaaaaaaaaaaaaaaaaaaaaaaaaaaaaaaaaaaaugcaucccccccccccccccccccccccccccccccaaaggcucuuuucagagccaccagaauu

SEQ ID NO: 9998 - RNA, 1989 nt, Artificial Sequence
  mRNA product Design a-1 comprising derived and/or modified sequence from LASV(GA391;Clade III)__AAA46284__NP (opt5)
gggagagucccgcagucggcguccagcggcucugcuuguucgugugugugucguugcaggccuuauucaagcuuaccaugagcgccuccaaggaggugagaucuugccuguggacccagagccuccggcgcgaacuguccggcuacuguucuaacaucaaacuucaagucguuaaggacgcucaggcccugcuccacgggcuggauuucagcgagguguccaaugugcagagacuuaugcggaaacagaagcgcgacgauggagaccugaaaagacuccgggaucugaaccaagcggucaauaaccugguggaacucaagucuacacagcagaaaagcguucugcgcgugggcacgcuuuccagcgacgaucugcucauucuggcugccgaccuugagaaacugaagucuaaagucaccagaacagaacggccccucuccagcgggguguauaugggaaaucugucuucccagcaacuggaucagcgcagagcccuccugaacaugaucggcaugaccgggguuagcggaggcggcaagggggcuucuaauggaauugugcgggucugggacgugaaaaacgccgagcuucugaauaaccaguuuggcacaaugccuucccucacccuggcuugccuuacaaagcaggggcaaguggaucugaaugacgccguccaggcgcucaccgaucugggacugaucuacacggccaaguauccgaacagcuccgaccucgaccgccugucucagagccaucccauucuuaauaugaucgauaccaaaaaguccagccugaacaucucuggcuacaauuucucccucggggcugccguuaaagcuggagccuguaugcuggacggcggcaacaugcuugagacaauuaaggugagcccucaaaccauggaugggauccugaaaucuauucucaaggugaaaaagagccugggaauguuugucuccgacacacccggcgaaagaaacccuuaugagaauauccuguacaagauuugccucucuggggauggauggagcuauaucgcgucccggaccagcauugugggccgcgccugggaaaacacgguuguggaccuggagcaggauaauaaaccccagaagaucgggaacggaggcucuaauaaaucccuucagagcgcuggcuucgccgcugggcugaucuacucucaacucaugacacugaaggacuuuaaauguuucaaccugauuccuaaugccaagaccuggauggauaucgagggaagaccggaagaccccgucgagauugcccuuuaccagccuuccagcggcugcuaugugcacuuuuuccgggaacccacagaucucaagcaguuuaaacaggacgcuaaguacucccaugggagagacguuaccgaucuguucgcggcccaaccuggacugaccucugcugugaucgaggcccucccccgcaacauggucauuacaugucagggcagcgaagacauccggaaacugcuugagucccaggggagacgcgauaucaagcugauugacaucacgcucucuaaagccgauagccggaaguuugagaaugcugugugggaccaguucaaggaucugugccacaugcauaccggcgucgugguugaaaagaagaaaagaggaggcaaggaggaaauuacaccgcacugugcccugauggacugcaucauguuugaugcggcuguguccgggggacuugacgccaaaguccuccgcgugguucugccucgggauaugguguucagaaccagcacacccaaggucgugcugugaggacuagucccuguucccagagcccacuuuuuuuucuuuuuuugaaauaaaauagccugucuuucagaucuaaaaaaaaaaaaaaaaaaaaaaaaaaaaaaaaaaaaaaaaaaaaaaaaaaaaaaaaaaaaaaaaugcaucccccccccccccccccccccccccccccccaaaggcucuuuucagagccaccagaauu

SEQ ID NO: 9999 - RNA, 1986 nt, Artificial Sequence
  mRNA product Design a-1 comprising derived and/or modified sequence from LASV(Nig08-A19;Clade III)__ADU56619__NP (opt5)
gggagagucccgcagucggcguccagcggcucugcuuguucgugugugugucguugcaggccuuauucaagcuuaccaugagcgccuccaaggaggugaaaucuuuccuguggacccagagccucagacgggaacuguccggcuacugcucuaacaucaaacuucaagucguuaaggacgcucaggcccugcuccacgggcuggauuuuagcgagguguccaaugugcagcgccuuaugagaaagcagaaacgggacgauggagaccugaagcgccucagagaucugaaccaagcggucaauaaccugguggaacucaagucuacacagcagaaaagcguucugcgggugggcacgcuuuccagcgacgaucugcucguccuggcugccgaccuugagaagcugaaaucuaaggugguucgcaccgaaagaccccucuccagcgggauuuauaugggaaaucugucuucccagcaacuggaucagcggaaagcccuccugaacaugaucggcaugacagggggaaauggcggccgcaacaccacaagcgacgggauugugagagucugggaugugaagaaugcugagcuucugaacaaucaguucggaaccaugccuucucucacacuggccugucuuaccaagcagggccaaguggaccugaacgaugcuguccaggcccucacggaccuggggcugaucuacaccgcgaaauaucccaauuccagcgaccucgaucggcuggcccagucccauccgauucuuaacaugaucgacacaaagaaaucuagccugaauaucuccggauacaacuuuagccucggcgcugccguuaaggcuggggccugcaugcuggauggaggcaacaugcuugagaccauuaaagugucuccucaaacaauggacggcauccugaaguccauucucaaagugaagcgcagccuggggauguucaucucugauacccccggagaaagaaauccuuaugagaacauucuguacaagaucugucucagcggcgacggguggcccuauauugcgucccggacgucuaucgucggacgcgccugggaaaauacagugguugaucuggagagcgacaacaaaccucagaagaccggcaaugggggauccaacaaaagccuucagucugcuggcuuugccgcuggccugacauacucccagcucaugacccugaaggauagcaugcugcaacuugacccgaaugccaaaaccuggauggauaucgaggggagacccgaagacccuguggagauugcccucuaccagcccucuuccggaugcuauauccacuucuuucgggaaccuacagaccugaagcaguucaagcaggaugcuaaauacagccauggcauugacgucacggaucuguuugcggcccaacccgggcucaccuccgcugugaucgaggcccugccgagaaacaugguuauuacaugucagggaucugaagacauccgcaaacuucuggagagccagggccggagagauaucaagcucauugacaucucccugucuaagguggauagccgcaaauucgagaaugccgucugggaccaguuuaaggaucugugccacaugcauaccgggauuguggucgaaaagaaaaagcggggcggaaaagaggaaaucacaccucacugugcucuuauggacugcauuauguucgaugccgcgguguccggcgggguugacgcuaaggugcucagagccguccugccccgcgauaugguguuucggaccagcacgccuaaaguugugcugugaggacuagucccuguucccagagcccacuuuuuuuucuuuuuuugaaauaaaauagccugucuuucagaucuaaaaaaaaaaaaaaaaaaaaaaaaaaaaaaaaaaaaaaaaaaaaaaaaaaaaaaaaaaaaaaaaugcaucccccccccccccccccccccccccccccccaaaggcucuuuucagagccaccagaauu

SEQ ID NO: 10000 - RNA, 1986 nt, Artificial Sequence
  mRNA product Design a-1 comprising derived and/or modified sequence from LASV(G1180-SLE-2010;Clade IV)__AIT17169__NP (opt5)
gggagagucccgcagucggcguccagcggcucugcuuguucgugugugugucguugcaggccuuauucaagcuuaccaugagcgccuccaaggagaucaaaucuuuccuguggacccagagccucagacgggaacuguccggcuacugcucuaacauuaagcugcaaguggucaaagacgcucaggcccugcuccacgggcuggauuuuagcgagguuuccaaugugcagcgccuuaugagaaaggaacggcgcgacgauaacgaccugaaaagacuccgggaucugaaucaggcggugaacaaucuggucgagcucaagucuacacaacaaaagagcauccugcgcgugggaacgcuuaccuccgacgaucugcucauucuggcugccgaccuugaaaaacuuaagagcaaaguuaucagaacagagcggccccucucugccggcguguauauggggaaccuguccagccagcagcuggaucagcgcagagcucuccugucuaugauuggaauguccagcggcaaucagcgggcccaggcugggcgcgacggagucgugagaguuugggaugugaagaacgucgagcuucugaauaaccaguucggcaccaugccuucucucacacuggccugucuuaccaaacaaggccagguggaccugaaugaugcggugcaggcccucacagaccuggggcugaucuacaccgcuaaguauccgaacacguccgaccucgaucggcugacccaaagccaucccauccuuaauaugauugacacaaagaaauccucucugaacaucagcggauacaauuuuucccucggcgccgcugucaaggccggggcgugcaugcuggauggaggcaacaugcuugaaaccauuaaaguuagcccucagacaauggacgggauccugaagucuauucucaaagugaagaaagcccugggaauguucaucuccgauacccccggcgagcgcaacccuuaugaaaauauucuguacaagaucugucucagcggcgacggguggcccuauaucgcuucuagaacgagcauuacaggacgggccugggagaacaccguggucgaucuggaguccgacggcaagccucagaaagcugggucuaauaacagcaauaagucccuucagagcgugggauuuacagccggccugaccuacucucaacucaugacccugaaagaugccaugcugcagcuugacccgaacgcuaagacauggauggauaucgaagggagacccgaggacccuguugaaauugcgcucuaccagcccuccagcggaugcuauauccacuucuuucgcgagccuacggaccugaaacaguucaagcaagaugccaaguacucucauggcauugacgugaccgaucuguuugcugcccagcccggccucacauccgccgucaucgacgcucugccgcggaauauggugaucaccugucaggggagcgaugacauuagaaaacuucuggaaucccagggacgcaaggauaucaaacucauugacaucgcccugucuaagacagauagccggaaauaugagaacgcgguuugggaccaauacaaggaucugugccacaugcauaccggcguggucguggagaagaaaaagagagggggaaaagaagagauuacgccucacugugcucuuauggacugcaucauguucgaugccgccgucuccggcgggcucaauacaucugugcugcgcgcuguucugccccgggacaugguguuuagaaccagcaccccucgcgucgugcucugaggacuagucccuguucccagagcccacuuuuuuuucuuuuuuugaaauaaaauagccugucuuucagaucuaaaaaaaaaaaaaaaaaaaaaaaaaaaaaaaaaaaaaaaaaaaaaaaaaaaaaaaaaaaaaaaaugcaucccccccccccccccccccccccccccccccaaaggcucuuuucagagccaccagaauu

SEQ ID NO: 10001 - RNA, 1986 nt, Artificial Sequence
  mRNA product Design a-1 comprising derived and/or modified sequence from LASV(G1442-SLE-2011;Clade IV)__AIT17181__NP (opt5)
gggagagucccgcagucggcguccagcggcucugcuuguucgugugugugucguugcaggccuuauucaagcuuaccaugagcgccuccaaggaggugaaaucuuuccuguggacccagagccucagacgggaacuguccggcuacugcucuaacaucaaacuucaagucguuaaggacgcucaggcccugcuccacgggcuggauuuuagcgagguguccaaugugcagcgccuuaugagaaagcagcggcgcgacgauaacgaccugaaaagacuccgggaucugaaucaagcggucaacaaucugguggaacucaagucuacacagcaaaagagcguucugcgcgugggaacgcuuaccuccgacgaucugcucguccuggcugccgaccuugagaaacuuaagagcaaagugauuagaacagaacggccccucucugccggcguuuauauggggaaccuguccagccagcagcuggaucagcgcagagcucuccugaauaugaucggaaugucuggcgggauucagggaacccggacaggccgcgacggcguggucagagugugggaugugaagaacgccgaccuucugaauaaccaguucgggaccaugccuucccucacacuggcuugucuuaccaaacaaggacaggucgaucugaaugacguugugcaggcccucacggaccugggccugaucuacaccgcgaaguauccgaacgccagcgaucucgaccggcugacacaaucucaucccauucuuaauaugaucgauaccaagaaauccagccugaacaucuccggguacaauuuuucucucggagcugccgugaaggcuggcgccugcaugcuggacgggggaaacaugcuugagacaauuaaagucagcccucagaccauggauggcauccugaaguccauucucaaagugaagaaaacgcugggcauguucaucagcgacacacccggggagcgcaacccuuaugaaaauauucuguacaagaucugucucucuggagauggcuggcccuauauugcguccagaaccagcaucacagggcgggccugggagaacaccguuguggaccuggaaucugauggaaagccucagaaagcuggcagcaauaacuccaauaagucucuucagagcgccggguuugcugccggacugaccuacucccaacucaugacacugaaagacgccaugcugcagcuugauccgaacgcuaagacguggauggacaucgagggcagacccgaggacccugucgaaauugcgcucuaccagcccagcucuggcugcuauauccacuucuuucgcgagccuaccgaucugaaacaguucaagcaagacgccaaguacucccaugggauugaugugacagaccuguuugcugcccagcccggacucaccagcgccguuaucgaagcucugccgcggaauauggugauuacaugucagggcucugaugacaucaaaaagcugcuggagucccaggggagaaaagauaucaagcucauugacaucgcccugagcaaaaccgauucccgcaaguaugaaaacgcggucugggaccaauacaaggaucugugccacaugcauacgggaguggucguggagaaaaagaaacggggcgggaaggaggaaauuacaccucacugugcucuuauggacugcaucauguucgaugccgccguuucuggcggacucaauacccuggugcugagagcuguccucccccgcgacaugguguuucggaccagcacaccuagaguugugcugugaggacuagucccuguucccagagcccacuuuuuuuucuuuuuuugaaauaaaauagccugucuuucagaucuaaaaaaaaaaaaaaaaaaaaaaaaaaaaaaaaaaaaaaaaaaaaaaaaaaaaaaaaaaaaaaaaugcaucccccccccccccccccccccccccccccccaaaggcucuuuucagagccaccagaauu

SEQ ID NO: 10002 - RNA, 1986 nt, Artificial Sequence
  mRNA product Design a-1 comprising derived and/or modified sequence from LASV(G3010-SLE-2013;Clade IV)__AIT17345__NP (opt5)
gggagagucccgcagucggcguccagcggcucugcuuguucgugugugugucguugcaggccuuauucaagcuuaccaugagcgccuccaaggagaucaaaucuuuccuguggacccagagccucagacgggaacuguccggcuacugcucuaacauuaaacuucaaguggucaaagacgcucaggcccugcuccacgggcuggauuuuagcgagguuuccaaugugcagcgccuuaugagaaaggaacggcgcgacgauaacgaccugaaaagacuccgggaucugaaucaggcggugaacaaucuggucgagcucaagucuacacaacaaaagagcauccugcgcgugggaacgcuuaccuccgacgaucugcucauucuggcugccgaccuugaaaaacuuaagagcaaaguuacaagaaccgagcggccccucucugccggcguguauauggggaaccuguccagccagcagcuggaucagcgcagagcucuccugucuaugaucggaauguccagcggcguccagggggcccgggcuggacgcgacggcgugguuagagugugggaugucaagaaugccgagcuucugaacaaucaguucggcacaaugccuucucucacccuggcgugucuuacaaaacaggggcaaguggaccugaacgaugugguccaggcccucaccgaccugggacugauuuacacggcuaaguauccgaauaccuccgaccucgaucggcugacacagagccaucccauccuuaacaugaucgacaccaagaaauccucucugaauauuagcggcuacaacuuuucccucggggccgcuguuaaggccggagcgugcaugcuggauggcgggaauaugcuugaaacaaucaaagugagcccucaaaccauggacggcauucugaagucuauccucaaagugaagaaagcccugggaauguucauuuccgagacgcccggcgaacgcaacccuuaugagaacauccuguacaagauuugucucagcggggauggauggcccuauaucgcuucuagaacaagcaucaccggccgggccugggagaauacagucguggaccuggaauccgaugggaagccucagaaagcuggaucuaacaauagcaacaagucccuucagagcgccggcuuuaccgccgggcugaccuacucucagcucaugacacugaaagacgcuaugcugcaacuugauccgaaugcgaagacguggauggacauugagggaagacccgaagauccuguugagguggcccucuaccagcccuccagcggcugcuauauccacuucuuucgcgaaccuaccgaccugaaacaguucaagcaggacgcuaaguacucucauggcauugaugucacagaccuguuugccgcccaacccgggcucaccuccgcugugaucgaugcccugccgcggaacaugguuauuacaugucagggaagcgacgauaucaaaaagcugcuggagucccagggcagaaaagacaucaagcucauugauaucgcgcugucuaaaaccgacagccgcaaguaugagaaugcugugugggaucaguacaaggaccugugccacaugcauacgggggucguggucgaaaagaagaaacggggaggcaaggaggaaauuacaccucacugugcccuuauggauugcaucauguucgacgccgcuguguccgggggccucaacaccucuguucugagagccgugcugccccgcgauauggucuuucggaccagcacaccuagagugguucucugaggacuagucccuguucccagagcccacuuuuuuuucuuuuuuugaaauaaaauagccugucuuucagaucuaaaaaaaaaaaaaaaaaaaaaaaaaaaaaaaaaaaaaaaaaaaaaaaaaaaaaaaaaaaaaaaaugcaucccccccccccccccccccccccccccccccaaaggcucuuuucagagccaccagaauu

SEQ ID NO: 10003 - RNA, 1986 nt, Artificial Sequence
  mRNA product Design a-1 comprising derived and/or modified sequence from LASV(G502-SLE-2009;Clade IV)__AIT17127__NP (opt5)
gggagagucccgcagucggcguccagcggcucugcuuguucgugugugugucguugcaggccuuauucaagcuuaccaugagcgccuccaaggagaucaaaucuuuccuguggacccagagccucagacgggaacuguccggcuacugcucuaacauuaagcugcaaguggucaaagacgcucaggcccugcuccacgggcuggauuuuagcgagguuuccaaugugcagcgccuuaugagaaaggaacggcgcgacgauaacgaccugaaaagacuccgggaucugaaucaggcggugaacaaucuggucgagcucaagucuacacaacaaaagagcauccugcgcgugggaacgcuuaccuccgacgaucugcucauucuggcugccgaccuugaaaaacuuaagagcaaaguuaucagaacagagcggccccucucugccggcguguauauggggaaccuguccagccagcagcuggaucagcgcagagcucuccugucuaugauuggaauguccggcgggaaucagggaguccgggccggcaaggacggcgugguucgcgugugggaugucaaaaacgcugagcuucugaauaaccaguucgggaccaugccuagccucacacuggccugucuuaccaagcagggacaaguggaccugaaugaugcggugcaggcccucacagaccugggccugaucuacaccgcuaaguauccgaacacgucugaccucgauagacugacccagucccaucccauccuuaauaugauugacaccaaaaagagcucccugaacaucucuggguacaauuuuagccucggagccgcugucaaagccggcgcgugcaugcuggaugggggaaacaugcuugaaacaauuaagguuuccccucaaacaauggacggcauccugaaaagcauucucaaggugaaaaaggcccugggcauguucaucucugauacccccggggagcggaacccuuaugaaaauauucuguacaagaucugucucuccggagacggcuggcccuauaucgcuagccgcacgucuauuacagggagagccugggagaacaccguggucgaucuggagagcgacggaaaaccucagaaggcuggcuccaauaacucuaauaaaagccuucaguccgccggguuuacagccggacugaccuacagccagcucaugacccugaaggaugcuaugcugcaacuugacccgaacacaaaaacguggauggauaucgaaggccggcccgaggacccuguggaaauugcgcucuaccagcccucuuccggcugcuauauccacuucuuuagagagccuaccgaccugaagcaguucaagcaggaugccaaauacagccaugggauugacguuacagaucuguuugcugcccaacccggacucaccucugccgugaucgacgcucugccgcgcaauauggucaucacaugucagggcuccgaugacauucggaaacuucuggaaagccaggggagaaaggauaucaagcucauugacaucgcccugaacaaaaccgauucccgcaaguaugagaaugcggugugggaccaguacaaggaucugugccacaugcauacgggaguuguggucgagaaaaagaaacggggcgggaaggaagagauuacaccucacugugcucuuauggacugcaucauguucgaugccgccgugucuggcggacucaacaccagcguccugagagcugugcugccccgcgacaugguuuuucggaccuccacaccuagagugguccucugaggacuagucccuguucccagagcccacuuuuuuuucuuuuuuugaaauaaaauagccugucuuucagaucuaaaaaaaaaaaaaaaaaaaaaaaaaaaaaaaaaaaaaaaaaaaaaaaaaaaaaaaaaaaaaaaaugcaucccccccccccccccccccccccccccccccaaaggcucuuuucagagccaccagaauu

SEQ ID NO: 10004 - RNA, 1986 nt, Artificial Sequence
  mRNA product Design a-1 comprising derived and/or modified sequence from LASV(G733-SLE-2010;Clade IV)__AIT17155__NP (opt5)
gggagagucccgcagucggcguccagcggcucugcuuguucgugugugugucguugcaggccuuauucaagcuuaccaugagcgccuccaaggagaucaaaucuuuccuguggacccagagccucagacgggaacuguccggcuacugcucuaacauuaagcugcaaguggucaaagacgcucaggcccugcuccacgggcuggauuuuagcgagguuuccaaugugcagcgccuuaugagaaaggaacggcgcgacgauaacgaccugaaaagacuccgggaucugaaucaggcggugaacaaucuggucgagcucaagucuacacaacaaaagagcgugcugcgcguuggaacgcuuaccuccgacgaacugcucgugcuggcugccgaucuugagaaacuuaagagcaaagucaucagaacagagcggccccucucugccggcguguauauggggaaccuguccagccagcagcuggaccagcgcagagcucuccugucuaugauuggaauguccggcgggaaucagggagcccggaccggccgcgauggcguugugagagucugggacgugaagaacgcugaacuucugaauaaccaguucgggacaaugccuagccucacccuggccugucuuacaaaacagggacaaguggaucugaaugacgcgguccaggcccucaccgaucugggccugaucuacacggcuaaguauccgaacaccucugaccucgaccggcugacacagucccaucccauucuuaauaugaucgauaccaagaaaagcucccugaacaucucuggguacaauuuuagccucggagccgcuguuaaggccggcgcgugcaugcuggacgggggaaacaugcuugagacaauuaaaguguccccucaaaccauggauggcauccucaagagcauucugaaagugaagaaagcccugggcauguucaucucugacacgcccggggaacgcaacccuuaugagaauauucuguacaagaucugucucuccggagauggcuggcccuauauugcuagcagaacaucuaucaccgggcgggccugggagaacacagucguggaccuggaaagcgauggaaagccucagaaagcuggcuccaauaacucuaauaagagccuucaguccgccggguuuaccgccggacugaccuacagccagcucaugacacugaaagacgcuaugcugcaacuugauccgaacgcgaagacguggauggacaucgagggcagacccgaagauccuguugagauugcccucuaccagcccucuuccggcugcuauauccacuucuuucgcgaaccuaccgaccugaaacaguucaagcaggacgcuaaguacagccaugggauugaugugacagaccuguuugccgcccaacccggacucaccucugcugucaucgaugcccugccgcggaauauggugauuacaugucagggcuccgacgauaucagaaaacuucuggagagccaggggcgcaaggacaucaaacucauugauaucgcgcuguccaagauugacucucggaaauaugagaacgcuguuugggaucaguacaaggaccugugccacaugcauaccggaguggucguggaaaagaaaaagagaggcgggaaagaggaaaucacgccucacugugcccuuauggauugcauuauguucgacgccgcugucagcggcggacucaauucccuggugcugcgcgccguucucccccgggauaugguguuuagaacaucuaccccucgcgucgugcugugaggacuagucccuguucccagagcccacuuuuuuuucuuuuuuugaaauaaaauagccugucuuucagaucuaaaaaaaaaaaaaaaaaaaaaaaaaaaaaaaaaaaaaaaaaaaaaaaaaaaaaaaaaaaaaaaaugcaucccccccccccccccccccccccccccccccaaaggcucuuuucagagccaccagaauu

SEQ ID NO: 10005 - RNA, 1986 nt, Artificial Sequence
  mRNA product Design a-1 comprising derived and/or modified sequence from MOPV/LASV reassortant(IGS-1;Clade IV)__AFY05578__NP (opt5)
gggagagucccgcagucggcguccagcggcucugcuuguucgugugugugucguugcaggccuuauucaagcuuaccaugagcgccuccaaggagaucaaaucuuuccuguggacccagagccucagacgggaacuguccggcuacugcucuaacauuaaacuucaaguggucaaggacgcucaggcccugcuccacgggcuggauuuuagcgagguuuccaaugugcagcgccuuaugagaaaggaacggcgcgacgauaacgaccugaaaagacuccgggaucugaaucaggcggugaacaaucuggucgagcucaagucuacacaacaaaagagcauccugcgcgugggaacgcuuaccuccgacgaucugcucauucuggcugccgaccuugaaaaacugagaagcaagguuauccggacagagcgcccccucucugccggcguguauauggggaaccuguccagccagcagcuggaucagagacgggcucuccugaauaugauuggaaugucuggcgggaaccagggagcccgcgcuggcagagacggcgucgugcggguuugggaugugaaaaaugccgagcuucuguccaaccaguucgggaccaugccuagccucacacuggcgugucuuaccaagcagggacaagucgaccugaaugaugccgugcaggcucucacagaccugggccugaucuacaccgccaaauauccgaacacgucugaccucgaucgccugacccagucccaucccauccuuaauaugauugacacaaagaaaagcucccugaacaucucuggguacaauuuuagccucggagcugccgugaaggcgggcgccugcaugcuggaugggggaaacaugcuugaaaccauuaaggucuccccucaaacaauggacggcauccugaaaagcauucucaagguuaaaaaggcucugggcauguucaucucugauacccccggggagagaaacccuuaugaaaauauucuguacaaaaucugucucuccggagacggcuggcccuauaucgccagccggacgucuauuacagggagagcuugggagaacaccgugguggaucuggagagcgacggaaagccucagaaggccgauuccaauaacucuagcaaaucccuucagagcgccggcuuuacagcugggcugaccuacucucagcucaugacccugaaggacgcgaugcugcaacuugauccgaaugccaaaacauggauggacaucgaaggacgccccgaggacccugucgaaauugcucucuaccagcccuccagcggcugcuauauccacuucuuucgggagccuacggaucugaagcaguucaaacaggacgccaaguacucucauggcauugaugugaccgaccuguuugccacacaacccgggcucaccuccgcuguuaucgaugcccugccgagaaacauggugaucacaugucagggaagcgacgauauucgcaaacuucuggaaucccagggccggaaggacaucaagcucauugauaucgaccugucuaaaaccgauagcagaaaguaugagaaugcggucugggaccaguacaaagaucugugccacaugcauacgggggugguuguggagaagaagaaacgcggaggcaaggaagagauuacaccucacugugcucuuauggacugcaucauguucgacgccgccgucuccgggggccucaacaccucugugcugcgggcuguccugcccagagauaugguguuucgcaccagcacaccucggguugugcucugaggacuagucccuguucccagagcccacuuuuuuuucuuuuuuugaaauaaaauagccugucuuucagaucuaaaaaaaaaaaaaaaaaaaaaaaaaaaaaaaaaaaaaaaaaaaaaaaaaaaaaaaaaaaaaaaaugcaucccccccccccccccccccccccccccccccaaaggcucuuuucagagccaccagaauu

SEQ ID NO: 10006 - RNA, 1986 nt, Artificial Sequence
  mRNA product Design a-1 comprising derived and/or modified sequence from LASV(LM765-SLE-2012;Clade IV)__AIT17815__NP (opt5)
gggagagucccgcagucggcguccagcggcucugcuuguucgugugugugucguugcaggccuuauucaagcuuaccaugagcgccuccaaggagaucaaaucuuuccuguggacccagagccucagacgggaacuguccggcuacugcucuaacauuaagcugcaaguggucaaagacgcucaggcccugcuccacgggcuggauuuuagcgagguuuccaaugugcagcgccuuaugagaaaggaacggcgcgacgauaacgaccugaaaagacuccgggaucugaaucaggcggugaacaaucuggucgagcucaagucuacacaacaaaagagcauccugcgcgugggaacgcuuaccuccgacgaucugcucauucuggcugccgaccuugaaaaacuuaagagcaaaguuacaagaaccgagcggccccucucugccggcguguauauggggaaccuguccagccagcagcuggaucagcgcagagcucuccuggacaugaucggaaugucuggcuccaaucagggggcccgggcuggacgcgauggcgucgugagaguuugggacgugaagaacgccgagcuucugaauaaccaguucggcacaaugccuagccucacccuggcgugucuuacaaaacaggggcaagucgaucugaaugacgccgugcaggcucucaccgaccugggacugauuuacacggccaaguauccgaacaccucugaucucgaccggcugacacagucccaucccauccuuaauaugaucgauaccaagaaaagcucccugaacauuucuggcuacaauuuuagccucggggcugccgugaaggcgggagccugcaugcuggacggcgggaacaugcuugaaacaaucaaagucuccccucaaaccauggauggcauucucaagagcauccugaaaguuaagaaagcucugggaauguucauuucugacgcccccggcgagcgcaacccuuaugaaaauauccuguacaagauuugucucuccggggauggauggcccuauaucgcuagcagaacgucuaucacaggccgggccugggagaacaccgugguggaccuggagagcgaugggaagccucagaaagccggauccaauggcucuaacaagagccuucaguccgcuggguuuacagcgggacugaccuacagccagcucaugacccugaaagacgccaugcugcaacuugauccgaaugcuaagacauggauggacauugaaggcagacccgaggacccugucgaaaucgcccucuaccagcccucuuccggcugcuauauucacuucuuucgcgagccuacggaucugaaacaguucaagcaggacgccaaguacagccaugggaucgaugugaccgaccuguuugcugcccaacccggacucacaucugcgguuauugaugcucugccgcggaacauggugaucaccugucagggcuccgacgauaucagaaaacuuuucgaaagccaggggcgcaaggacauuaaacugaucgauauugcccucuccaagacagacucucggaaauaugagaaugccgucugggaucaguacaaggaccugugccacaugcauaccggaaucgugguugagaagaaaaagagaggcgggaaagaagagauuacgccucacugugcucugauggauugcaucauguuugacgccgcugugagcggcggacuuaacacauccguccuccgcgccgugcugccccgggacauggucuucagaaccucuaccccucgcgugguucugugaggacuagucccuguucccagagcccacuuuuuuuucuuuuuuugaaauaaaauagccugucuuucagaucuaaaaaaaaaaaaaaaaaaaaaaaaaaaaaaaaaaaaaaaaaaaaaaaaaaaaaaaaaaaaaaaaugcaucccccccccccccccccccccccccccccccaaaggcucuuuucagagccaccagaauu

SEQ ID NO: 10007 - RNA, 1986 nt, Artificial Sequence
  mRNA product Design a-1 comprising derived and/or modified sequence from LASV(LM776-SLE-2012;Clade IV)__AIT17825__NP (opt5)
gggagagucccgcagucggcguccagcggcucugcuuguucgugugugugucguugcaggccuuauucaagcuuaccaugagcgccuccaaggagaucaaaucuuuccuguggacccagagccucagacgggaacuguccucuuacugcagcaacauuaaacuucaaguggucaaggacgcucaggcccugcuccacggccuggauuuuuccgagguuucuaaugugcagcgccuuaugagaaaggaacggcgcgacgauaacgaccugaaaagacuccgggaucugaaucaggcggugaacaaucuggucgagcucaagagcacacaacagaaguccauccugcgcguggggacgcuuaccagcgacgaucugcucauucuggcugccgaccuugaaaaacugaagucuaaaguuacaagaaccgagcggccccucuccgccggaguguauaugggcaaccugagcucucagcagcuggaucaacgcagagcucuccuguccaugaucgggaugagcggaucuaaucagggcgcccgggcugggcgcgacggagucgugagaguuugggaugugaagaacgccgagcuucugaauaaccaguucggcacaaugccuucccucacccuggcgugucuuacaaaacagggccaagucgaccugaaugaugccgugcaggcucucaccgaccuggggcugauuuacacggccaaguauccgaacaccagcgaccucgaucggcugacacagucccaucccauccuuaauaugaucgacaccaagaaaucuagccugaacauuuccggauacaauuuuagccucggcgcugccgugaaggcgggggccugcaugcuggauggaggcaacaugcuugaaacaaucaaagucucuccucaaaccauggacgggauucugaaguccauccucaaaguuaagaaagcucugggaauguucauuagcgauacgcccggcgagcgcaacccuuaugaaaauauccuguacaagauuugucucucuggcgacggguggcccuauaucgccagcagaacauccaucaccggacgggcuugggagaacacagugguggaucuggagucugacggcaagccucagaaagccgggagcaauaacuccaauaagagccuucagucugccggauuuaccgcuggccugaccuacucccagcucaugacacugaaagaugcgaugcugcaacuugacccgaacgccaagacguggauggauauugaagggagacccgaggacccugucgaaguggcucucuaccagcccagcucuggaugcuauauccacuucuuucgcgagccuaccgaccugaaacaguucaagcaggaugccaaguacucccauggcauugacguuacagaucuguuugccgcucaacccggccucaccagcgccgugaucgacgcgcugccgcggaauauggucauuacaugucagggguccgaugacaucagaaaacuucuggaaucucagggacgcaaggauaucaaacucauugacaucgcucugagcaagaccgauucccggaaauaugagaacgccgugugggaccaguacaaggaucugugccacaugcauacgggcguuguggucgagaagaaaaagagagggggaaaagaagagauuacaccucacugugcccuuauggacugcaucauguucgaugcugccgugucuggcgggcucaauaccagcguccugcgcgcugugcugccccgggacaugguuuuuagaaccuccacaccucgcgugguccucugaggacuagucccuguucccagagcccacuuuuuuuucuuuuuuugaaauaaaauagccugucuuucagaucuaaaaaaaaaaaaaaaaaaaaaaaaaaaaaaaaaaaaaaaaaaaaaaaaaaaaaaaaaaaaaaaaugcaucccccccccccccccccccccccccccccccaaaggcucuuuucagagccaccagaauu

SEQ ID NO: 10008 - RNA, 1986 nt, Artificial Sequence
  mRNA product Design a-1 comprising derived and/or modified sequence from LASV(Mad39;Clade IV)__ANH09723__NP (opt5)
gggagagucccgcagucggcguccagcggcucugcuuguucgugugugugucguugcaggccuuauucaagcuuaccaugagcgccuccaaggagaucaaaucuuuccuguggacccagagccucagacgggaacuguccggcuacugcucuaacauuaagcugcaaguggucaaagacgcucaggcccugcuccacgggcuggauuuuagcgagguuuccaaugugcagcgccuuaugagaaagcagcggcgcgacgauaacgaccugaaaagacuccgggaucugaaucaagcggugaacaaucuggucgaacucaagucuacacagcaaaagagcgugcugcgcguuggaacgcuuaccuccgacgaucugcucacacuggcugccgaccuugagaaacuuaagagcaaagugaccagaacagaacggccccucaccgccggcgucuauauggggaaccugucuucccagcagcuggaucagcgcagagcucuccugaauaugaucggaaugagcggcgggaaccagggagcccggacaggccgcgacggcgugguuagagugugggaugucaagaaugcugagcuucugaacaaucaguucgggaccaugccuucucucacgcuggccugucuuaccaaacaaggacagguggaccugaacgaugugguccaggcgcucacagaccugggccugauuuacaccgccaaguauccgaauacauccgaccucgaucggcugacccaaagccaucccauccuuaacaugauugacacgaauaagucuucccugaacaucagcggguacaacuuuucccucggagcugccguuaaagcuggcgccugcaugcuggaugggggaaauaugcuugagacaaucaaggugucuccucagaccauggacggcauucugaaaagcauccucaaggugaaaaagucccugggcauguucauuagcgauacacccggggaacgcaacccuuaugagaauauccuguacaaaauuugucucucuggagacggcuggcccuauaucgcguccagaaccagcauuaccgggcgggccugggaaaacacagucguggaucuggagucuggaggcaagccucagaaggcugggagcaauaacuccaauaaaucucuucagagcgccggauuugcugccggccugacguacucccaacucaugacccugaaggacgccaugcugcagcuugauccgaacgcuaaaacauggauggacaucgagggcagacccgaagauccuguugagaucgcgcucuaccagcccauuagcgggugcuauauccacuucuuucgcgaaccuaccgaccugaagcaguucaaacaagacgccaaguacucucauggaauugaugugacagaccuguuugcugcccagcccggccucaccuccgccgucaucgaggcucugccgcggaauauggugauuacgugucaggggagcgaugacaucagaaaacuuuucgaaucucagggacgcaaggauaucaagcugauugacaucgcccucuccaaaacagauagccggaaguaugagaacgcgguuugggaccaauacaaagaucugugccacaugcauaccggcguggucguggagaagaagaaaaagggcgggaaagaagagauuaccccucacugugcucugauggacugcaucauguuugaugccgccgucuccggaggccuuaauacacucgugcugagagcuguucugccccgcgacaugguguuccggaccucuacaccuaaggucgugcucugaggacuagucccuguucccagagcccacuuuuuuuucuuuuuuugaaauaaaauagccugucuuucagaucuaaaaaaaaaaaaaaaaaaaaaaaaaaaaaaaaaaaaaaaaaaaaaaaaaaaaaaaaaaaaaaaaugcaucccccccccccccccccccccccccccccccaaaggcucuuuucagagccaccagaauu

SEQ ID NO: 10009 - RNA, 1986 nt, Artificial Sequence
  mRNA product Design a-1 comprising derived and/or modified sequence from LASV(Z0947-SLE-2011;Clade IV)__AIT17841__NP (opt5)
gggagagucccgcagucggcguccagcggcucugcuuguucgugugugugucguugcaggccuuauucaagcuuaccaugagcgccuccaaggagaucaaaucuuuccuguggacccagagccucagacgggaacuguccggcuacugcucuaacauuaagcugcaaguggucaaagacgcucaggcccugcuccacgggcuggauuuuagcgagguuuccaaugugcagcgccuuaugagaaaggaacggcgcgacgauaacgaccugaaaagacuccgggaucugaaucaggcggugaacaaucuggucgagcucaagucuacacaacaaaagagcauccugcgcgugggaacgcuuaccuccgacgaucugcucauucuggcugccgaccuugaaaaacuuaagagcaaaguuacaagaaccgagcggccccucucugccggcguguauauggggaaccuguccagccagcagcuggaucagcgcagagcucuccugaauaugaucggaaugucuggcuccaaccagggggcccggacaggacgcgacggcgucgugagaguuugggaugugaagaaugcugagcuucugaacaaucaguucggcaccaugccuagccucacacuggccugucuuaccaaacaggggcaagucgaccugaacgaugcggugcaggcccucacggaccugggacugauuuacaccgcuaaguauccgaauacaucugaccucgaucggcugacccagucccaucccauccuuaacaugaucgacacaaagaaaagcucccugaauauuucuggcuacaacuuuagccucggggccgcugugaaggccggagcgugcaugcuggauggcgggaacaugcuugaaaccaucaaagucuccccucaaacgauggacggcauucucaagagcauccugaaaguuaagaaagcccugggaauguucauuucugaugcucccggcgagcgcaauccuuaugaaaacauccuguacaagauuugucucuccggggacggauggcccuauaucgccagcagaacaucuaucaccggccgggcuugggagaauacagugguggaucuggagagcgacgggaagccucagaaagccggauccaacggcucuaauaagagccuucaguccgccggguuuaccgcuggacugaccuacagccagcucaugacacugaaagaugcgaugcugcaacuugacccgaacgccaagacguggauggauauugaaggcagacccgaggacccugucgaaaucgcucucuaccagcccucuuccggcugcuauauucacuucuuucgcgagccuaccgaccugaaacaguucaagcaggaugccaaguacagccaugggaucgacgugacagaucuguuugccgcucaacccggacucaccucugccguuauugacgcgcugccgcggaauauggugaucacaugucagggcuccgaugacaucagaaaacuuuucgaaagccaggggcgcaaggauauuaaacugaucgacauugcucucuccaagaccgauucucggaaauaugagaacgccgucugggaccaguacaaggaucugugccacaugcauacgggaaucgugguugagaagaaaaagagaggcgggaaagaagagauuacaccucacugugcccugauggacugcaucauguuugaugcugccgugagcggcggacuuaauaccuccguccuccgcgcugugcugccccgggacauggucuucagaaccucuacaccucgcgugguucugugaggacuagucccuguucccagagcccacuuuuuuuucuuuuuuugaaauaaaauagccugucuuucagaucuaaaaaaaaaaaaaaaaaaaaaaaaaaaaaaaaaaaaaaaaaaaaaaaaaaaaaaaaaaaaaaaaugcaucccccccccccccccccccccccccccccccaaaggcucuuuucagagccaccagaauu

SEQ ID NO: 10010 - RNA, 1986 nt, Artificial Sequence
  mRNA product Design a-1 comprising derived and/or modified sequence from LASV(Josiah;Clade IV)__NP_694869__NP (opt6)
gggagagucccgcagucggcguccagcggcucugcuuguucgugugugugucguugcaggccuuauucaagcuuaccaugagugcaucaaaagaaauaaaaucauuccuauggacacaaagccuaagaagggaacuaucaggcuauugcucaaacauaaaauuacaaguagucaaagacgcacaagcucucuuacacggucuagauuuuagugaaguaucaaacguucaaagauuaaugagaaaagagagacgagaugauaacgaccuaaaaagacuaagagaucuaaaucaagcaguaaacaaccuuguagaacuaaaaagcacacaacaaaaauccauccuacguguaggaacauuaacaagugaugacuuauuaauccuagcagcagaucuagaaaaacuuaaaagcaaagucauaagaacugaacgaccgcucagugcagguguauauaugggaaaucucucgucgcaacaauuagaucaaagaagagcacuacuuaauaugauaggaaugucaggaggaaaucaaggugcacgcgcaggaagagacggaguagugagaguaugggacguaaaaaacgcagaauuauuaaauaaccaauuuggaacaaugccauccuuaacuuuagccugucuaaccaaacaaggacaaguagaccuaaaugacgcaguacaagcacuaacugacuuaggacuuauauauacagccaaauauccaaauacaucagauuuagacagacucacacaaucacaccccauacuaaacaugauagacacaaaaaaaagcaguuuaaauauaucagguuacaauuuuucacuuggagcagcgguaaaagcaggcgccuguauguuagacggcgguaacauguuagaaacaauaaagguaagcccucaaacaauggauggaauacuaaaaaguauauuaaaaguaaaaaaagcacuaggaauguuuauaagugauaccccaggagaaagaaacccauacgaaaauauauuauacaaaauauguuuaaguggagauggauggccauauauagcauccagaaccagcauaacaggaagagcaugggaaaauaccguaguagaucuagaaucagauggaaaaccacaaaaagcagauucaaacaauaguaguaaaagccuccaaucagcagguuuuacagcaggacuaacauauagucaacuaaugacacuuaaagaugcaaugcuacaacuagauccaaaugcaaaaacauggauggauauagaaggacgaccagaagacccgguagaaauagcacuauaucaacccaguagcggaugcuacauucauuuuuuuagagaaccaacagaucuaaaacaauucaaacaagaugcaaaauauagucacggcauugacguaacagauuuauuugcaacacaaccaggauuaacaagugccgucauagaugcauuaccaagaaacaugguaauaacaugccaaggaagcgaugacauuagaaaacuacuagaaagucaaggaagaaaagacaucaaacugauagauaucgcguuaucaaaaacggacucacgaaaauaugaaaaugcaguuugggaccaauauaaagauuuaugccacaugcauacaggaguaguuguagaaaaaaaaaagagaggaggaaaagaagaaauaacaccacauugcgcauuaauggauugcauaauguuugaugccgcaguaagcggcggacuaaauacuucaguacuacgagcaguacuaccaagagauaugguauuucgaaccucuaccccaaggguaguauuauaaggacuagucccuguucccagagcccacuuuuuuuucuuuuuuugaaauaaaauagccugucuuucagaucuaaaaaaaaaaaaaaaaaaaaaaaaaaaaaaaaaaaaaaaaaaaaaaaaaaaaaaaaaaaaaaaaugcaucccccccccccccccccccccccccccccccaaaggcucuuuucagagccaccagaauu

SEQ ID NO: 10011 - RNA, 1986 nt, Artificial Sequence
  mRNA product Design a-1 comprising derived and/or modified sequence from LASV(LP;Clade I)__AAF86702__NP (opt6)
gggagagucccgcagucggcguccagcggcucugcuuguucgugugugugucguugcaggccuuauucaagcuuaccaugucaaauagcaaagaaaucaaaucauuucuuuggacacaaucauuaagaagagaauuaucaggauauugcucaaacauaaaacuacaaguuguaaaagacgcucaagcacuacuucacggacuagacuucucugaaguaucaaauguacaaagauuaaugcgaaaacaaaaacgagaugaugcagaccuaaaaagacuaagagaccuaaaucaagcaguaaauaauuuaguagaacuaaaaucaacccaacagaaaaaugucuuaagagugggaaccuuaagcucagaugauuuaauaacacuagcagcagaccuagaaaaacuuaaaucaaaagucauaagaacagaacggccacuguccucaggaguauauauggguaauuuaucaucacaacaacuugaucagaggagagcccuacuaucaaugauuggaaugaguggagguccacaaggaaacagaacaggcggugacggcguaguuagaguaugggauguuaaaaacgcagaauuauuaaauaaucaauucggcaccaugccaagucuaacucuagcaugccuuacaaaacaaggacaaguagacuuaaacgaugcaguacaagcucuaacugaccugggcuuaauauauacagcaaaauauccuaauucaagcgacuuagacauguuaacacaaagccacccuauacuaggaaugguagacaccaagaaaaguaguuuaaacauaaguggauacaauuuuucacuuggggcggcagugaaagcaggggcauguaugcuugacggaggcaacaugcuagaaacgauaaaaguaucaccacaaacuauggauggcauucuaaaaagcauacuaaaaguaaaaagaagucuaggaauguuuauaucagacacgccaggagaaagaaauccauacgaaaauauacuauauaaaauaugcuuaucaggagaagguuggccauauaucgcuucaagaacaucaauaacagguagagcaugggaaaacacucuaguagaucuugaaagugacaauaaaccaccaaaacuuaauucagcaggaagcaauaaaucacuacaagcagcuggcuuaaaugccggacuaacauauucacaauuaaugacauuaaaagauugcauguuacaacuagauccuaguucaaaaaccuggaucgacaucgaaggaagaccagaagacccagucgaaaucgcacuauuucaaccaucaaguggaugcuacauucacuucuuuagagaaccaacagauuuaaaacaauucaaacaagacgcuaaauacagucacggaauagauguaacagaccuuuucagcacacaacccggauuaacaagugcaguuauagaagcacuacccagaaacaugguauuaacaugucaagguucagaugauaucaagaaacuauuagagucacaaggaagaagagauaucaaauuaauagauauaaguuuaaguaaagcagacucuagaaaauucgaaaacgcaguaugggaucaauacaaagaccuaugccacaugcauacaggaguuguaguagagaaaaagaaaagaggaggaaaagaagaaauaacaccacauugugcucuacuagacugcauaauguucgacgcagcaacuacuggaucacuaaacaucacaacacuaagagcaguccuacccagagauaugguauucagaacaagcacaccuaaaguaguacuauaaggacuagucccuguucccagagcccacuuuuuuuucuuuuuuugaaauaaaauagccugucuuucagaucuaaaaaaaaaaaaaaaaaaaaaaaaaaaaaaaaaaaaaaaaaaaaaaaaaaaaaaaaaaaaaaaaugcaucccccccccccccccccccccccccccccccaaaggcucuuuucagagccaccagaauu

SEQ ID NO: 10012 - RNA, 1986 nt, Artificial Sequence
  mRNA product Design a-1 comprising derived and/or modified sequence from LASV(803213;Clade II)__AAF86704__NP (opt6)
gggagagucccgcagucggcguccagcggcucugcuuguucgugugugugucguugcaggccuuauucaagcuuaccauguccgcaucaaaagaagucaaaaguuuccuauggacacaaagccucagaagagaacuaucaggauacugcucaaacauuaaacuacagguaguaaaagaugcucaagcccuucuacacggacuagauuucucagaaguaaauaacguacaaagacuaaugagaaaacaaaaacgagacgauggggauuuaaaaagauuaagagaucuaaaccaagccguaaacaaucuaguagaauuaaaaucaacacaacaaaaaucuauauuaagaguaggaacacuaacuucagaugaccuauuaacacucgcagcagaucucgaaaaacucaaaucaaaaguaauaagaacugaaaggccacuaucuuccggcguuuacaugggaaaucuaucaacucaacaauuagaacaaagacgagcauuacuaaauaugaucggaauggucggcggagcacaaggaacucaaccuggaagggacgguguuguccgaguaugggacguaaaaaacccagauuuacucaauaaccaauuuggaacaaugccaagccucacacuagcuugccuaacgaagcaaggucaaguggacuuaaaugaugcaguauuagcacuaacugacuuaggauuaauauacacugccaaauauccuaacucaucagacuuagacagauuaucacaaagccacccgauauuaaacaugguagauacaaaaaaaucaaguuuaaacauuagcggcuacaacuucucacuaggugccgccguaaaagcaggugcaugcaugcuugauggaggaaauaugcuagaaacaauaaaagucacaccccaaacaauggacggaauacuaaaaaguauauuaaaaguaaaaagaucgcuaggaauguucguaagcgauacaccuggagaaagaaauccauaugaaaauauuuuauauaaaauaugccucaguggagauggauggccauauauagcaucgagaacaucuauaguaggacgagcuugggaaaauacaacaguagaucuagaaucagacggaaaaccacaaaaaguaggaacagcaggcucaaauaagucccuacaaucagcaggauucccaacaggauuaacauauagccaacuaaugacccuaaaagauucaaugaugcaauuggauccaucugcaaaaacuuggauagacauagaaggaagaccagaagaucccguagaaauugcauuauaucaaccaaugucaggauguuauauacacuucuuuagagaaccaacugaccuaaaacaauuuaaacaagaugcuaaauacucacauggaauagacguugcagauuuauuuccagcacaacccggcuuaacaucugcaguaauagaggccuuaccacgaaauaugguauuaacaugucaaggaucggaugauauaaaaaaacuucuagacucucaaggaagaagagacauaaaacuaauagauauauccuuaaguaaagucgauagccgaaaauuugaaaaugcuguaugggaccaaugcaaagacuuaugucacaugcauacaggaguuguuguagaaaaaaaaaaaagagguggaaaagaagaaauaacaccacauugugcacuuauggauuguauaauguuugacgcugccguaagcggaggauuaaauauuccuguauuacgagcuguguuaccaagagacaugguuuucagaacaucaucaccaaaaguaguauuauaaggacuagucccuguucccagagcccacuuuuuuuucuuuuuuugaaauaaaauagccugucuuucagaucuaaaaaaaaaaaaaaaaaaaaaaaaaaaaaaaaaaaaaaaaaaaaaaaaaaaaaaaaaaaaaaaaugcaucccccccccccccccccccccccccccccccaaaggcucuuuucagagccaccagaauu

SEQ ID NO: 10013 - RNA, 1989 nt, Artificial Sequence
  mRNA product Design a-1 comprising derived and/or modified sequence from LASV(GA391;Clade III)__CAA36646__NP (opt6)
gggagagucccgcagucggcguccagcggcucugcuuguucgugugugugucguugcaggccuuauucaagcuuaccaugucagcauccaaagaaguaagaucauucuuauggacacaaucacuaagacgcgaacuaaguggauauugcaguaacauaaaacuacaaguuguaaaagaugcacaagcucuacuacacggccucgauuucucagaaguaucaaauguccaacguuuaaugagaaaacaaaaacgagaugacggagauuuaaaaagauuaagagaucuaaaccaagcaguuaauaaccuuguagaacucaaauccacacaacaaaaaucaguauuaagaguaggaacacuaucaucagaugacuuguuaauucuagcagcagaccuagaaaaacuaaaaucaaaaguaaccagaacagaaagaccacuaaguagcggaguauauaugggaaaccuaucaucucaacaacuagaucaaagacgagcauuacuaaacaugauugguaugacaggaguaagcggcggaggaaaaggugcuucagacggaauuguaagaguaugggacgucaaaaacgcagaauuauuaaauaaucaauuuggaacuaugcccucacuuacacuagcuuguuugacaaaacaaggacaaguagacuuaaaugaugcaguacaagcacuaacggaucuagguuuaauauauacagcgaaauauccaaacucuucagaccuagaccgauuaucucaaucacacccuauacuaaauaugauagauaccaagaaaagcucauuaaauaucagcggcuauaauuucucacuaggugcagcaguaaaagcaggggcuugcaugcuagauggaggcaauaugcucgaaacgauaaaaguaucaccacaaacaauggacggaauauuaaaaucuaucuuaaaaguaaagaaaucacuaggaauguucguaagcgauacaccuggagaaagaaauccauaugaaaacauucuauauaaaaucuguuuaucuggagacggauggcccuauauagcaucucgaacuucuauaguaggcagagccugggaaaauaccguuguagaucuagaacaagauaacaaaccacagaaaauaggaaacggaggaucaaauaaaucauuacaaucugcaggauuugccgcaggauuaacauauagucaacuaaugacauuaaaagauuucaaaugcuuuaacuuaauacccaacgcgaaaacauggauggacauagaaggaagaccagaagauccaguagaaauugcucuauaccaaccaucaucaggauguuauguacauuucuuuagagaaccgacagacuuaaaacaauuuaaacaagaugcaaaauauucacacggaaucgacguaaccgacuuauuugcagcacaaccuggacuaacuucagcaguaauagaagcccucccacgaaauaugguaauaacaugucaagguucagaagauauacgaaaauuauuagaaagccaaggaaggagagacaucaaacuaauagauauaacucuaaguaaagcagacucuagaaaauuugagaaugcaguaugggaucaauuuaaagaucuaugucacaugcacacaggcguaguuguugagaaaaagaaaagaggaggaaaagaagaaauaacuccacauugcgcgcuaauggacuguauaauguuugaugcagcaguaucaggaggacuagaugcaaaaguucucagaguaguauuaccacgagacaugguuuucagaaccaguacaccaaaaguaguauuauaaggacuagucccuguucccagagcccacuuuuuuuucuuuuuuugaaauaaaauagccugucuuucagaucuaaaaaaaaaaaaaaaaaaaaaaaaaaaaaaaaaaaaaaaaaaaaaaaaaaaaaaaaaaaaaaaaugcaucccccccccccccccccccccccccccccccaaaggcucuuuucagagccaccagaauu

SEQ ID NO: 10014 - RNA, 1986 nt, Artificial Sequence
  mRNA product Design a-1 comprising derived and/or modified sequence from LASV(AV;Clade V)__CCA30315__NP (opt6)
gggagagucccgcagucggcguccagcggcucugcuuguucgugugugugucguugcaggccuuauucaagcuuaccaugagcgcauccaaagaaguaaaaucuuucuuauggacacaaucacuaagacgcgaacuaagcggauauuguucaaauaucaaauuacaagucguaaaagacgcacaagcucuacuacacggacuagacuucucagaaguaucaaauguacaaagauuaaugagaaaacaacgaagagaugauucagacuuaaaacgauuacgcgacuuaaaccaagccguaaauaauuuaguagaauuaaagaguacucaacaaaaaucaguauuaagaguaggaacacugucaagcgaugaccuuuuaacacuagcugcagaccuugaaaaauuaaaaaguaaaguaacaagaacugaaaggccacuaucgaguggaguauauaugggaaauuuaucaucccaacaauuagaucaaagaagagcauuacugaaucuaauagguaugacaaacggaucacaaggaagccaagcaggaagagacggaguagugagaguaugggaugucaaaaaugcugaauuauuaaauaaccaauucggaacaaugccaucauuaacauuagcaugccuaacaaaacaaggucaagucgauuuaaacgauguaguacaagcacuaacagaccuuggauuaauauauaccgcaaaauacccaaauacaagcgacuuagaucgacucacucaaucacacccaauacuaaacaugauagauacaaaaaaauccagcuuaaacauaucaggauacaauuuuucguuaggcgcagcuguaaaagcaggggcauguaugcuagacggaggaaauaugcucgagacaauuaaaguaucaccacaaucuauggauggaauacuuaaaaguauacuaaaaguaaaaagggcauuaggaauguucguaagugauacaccaggagaaagaaauccauacgaaaauauauuauacaaaauaugucuaagcggugaugguuggccguauauagcuagcagaacaucuauagucggaagagcaugggaaaauacaguagucgauuuagaaacagauggaaaaccacaaaaaauaggcucuggaaacucaaacaaaucacuacaaucagccggcuuuucagcaggacuuacauacucccaauugaugacauuaaaagaugcaaugcuacaacuagacccaaaugcaaaaacauggauggauauagaaggucggcccgaagacccaguagaaguagcucuauaucaaccuauaaguggauguuacauacacuucuuucgagaaccaacugacuuaaaacaauucaaacaagacgcuaaguacagucauggaauugauauagcagaucucuucgcagcacaaccaggacuaacuucagcaguaauagaagcucuaccuagaaauaugguaauaacaugccaagguucagaagacauaaaaaaacuacuagaaucucaaggaagaaaagacauuaaacuaauugauauagcacuaaguaaaauagacucaagaaaauucgaaaaugcuguuugggaccaauauaaagaccuaugucacaugcauaccggagucguuguugaaaaaaaaaaaagaggaggaaaagaagaaauaacaccacauugugcucuaauggauugcauaauguuugaugcugcagucagcggaggauuaaacacacuuguccuaagagcaguauuaccacgugauaugguauuuagaacaucaaccccccgaguaguauuauaaggacuagucccuguucccagagcccacuuuuuuuucuuuuuuugaaauaaaauagccugucuuucagaucuaaaaaaaaaaaaaaaaaaaaaaaaaaaaaaaaaaaaaaaaaaaaaaaaaaaaaaaaaaaaaaaaugcaucccccccccccccccccccccccccccccccaaaggcucuuuucagagccaccagaauu

SEQ ID NO: 10015 - RNA, 1986 nt, Artificial Sequence
  mRNA product Design a-1 comprising derived and/or modified sequence from LASV(Togo/2016/7082;Clade VI)__AMR44578__NP (opt6)
gggagagucccgcagucggcguccagcggcucugcuuguucgugugugugucguugcaggccuuauucaagcuuaccaugucuaauucaaaagaaguaaaaucauuuuuauggacucaaagucuacgaagagaacuaagcggauacugcucaaauauaaaacuacaaguaguuaaagacgcucaagccuuauuacacggucucgauuucagugaaguaucaaauguacaaagauugaugagaaaacaaaaaagagacgacggagaucuaaaacggcuaagagaucuuaaucaagcuguaaacaauuugguagaacucaaaucaguacaacaaaaaucaauacuuagaguaggaacacuaacaucagacgaccuauuaacauuagcugccgaucuagaaaaacuaaaaagcaaaguaaccagaacagaacgaccacuaucgaguggaguauacaugggaaacuuaaguagccaacaacuagaucaaagaagagcacuacuaagcaugauuggaaugucaggaggaaaccaaaauagucaaccuaaaggggauggaguaguacgagucugggacguuaaaaacgccgaccucuuaaauaaccaauucggaacaaugccaagucuaacauuagcuuguuuaaccaaacaaggacaaguagaccuaaacgaugcaguacaagcccuaacagaccuaggacuaauauauacagcaaaauauccaaauagcucagauuuagacagauuaucacaaucacacccaaucuuaaacaugauugauacaaaaaaauccagccucaacauuucaggauacaauuucucacucggcgcagcaauuaaaaccggugcaugcaugcuugauggaggaaauaugcuugaaacaauaaaaguaacaccacagacaauggacggaauccuaaaaucaauacugaaagucaaaagaucacuuggcauguucaucagugauacacccggagaaagaaauccauaugaaaacauauuauacaaaauauguuuaaguggagauggauggccauauauagcuucacgaacugcaaucauagguagagccugggaaaauacaguaguagacuuagaaucagacagcaaaccccaaaaaauaggauccaacgguucaaauaaaucacuacaaucagcaggauucgcacccggcuuaacauauucacaacuaaugacucuaaaagacucaaugcuacaacuagauccaaacgccaaaacauggaucgacauugaaggacgacccgaagacccaguugaaguagcacuauuccaaccaauaaguggcugcuauauccacuuuuuuagagaacccacagaucuaaaacaauucaaacaagacgccaaauauucccacggcauagacguaacugacuuauucgcagcacaaccaggacuaacaucagcaguaaucgaagcccuuccaagaaauaugguacuaacaugccaaggcucagaugauauaaaaaaacuacucgacucacaaggccguagagauaucaaauuaauagacguaucacuaaacaaaauagacucaaggaaauuugaaaacgcaguaugggaucaauauaaagacuuaugccacaugcauacaggaguaguagucgaaaaaaaaaaaaaagguggaaaagaagaaauaaccccacacugugcuuuacuugauuguauaauguucgaugcugcaguaaguggaggacuaaacgcaaccguacucagagcaguacugccuagagauaugguauucagaacaucaaguccaaaaguaguacuuuaaggacuagucccuguucccagagcccacuuuuuuuucuuuuuuugaaauaaaauagccugucuuucagaucuaaaaaaaaaaaaaaaaaaaaaaaaaaaaaaaaaaaaaaaaaaaaaaaaaaaaaaaaaaaaaaaaugcaucccccccccccccccccccccccccccccccaaaggcucuuuucagagccaccagaauu

SEQ ID NO: 10016 - RNA, 1986 nt, Artificial Sequence
  mRNA product Design a-1 comprising derived and/or modified sequence from LASV(KAK-428;Clade n.d. (VII))__ANH09741__NP (opt6)
gggagagucccgcagucggcguccagcggcucugcuuguucgugugugugucguugcaggccuuauucaagcuuaccaugucaaauucaaaagaaguuaaaucauuuuuauggacacaaucuuuaaggagagaauuaagcggcuauuguacaaacauuaaauuacaaguaguaaaagaugcacaagcauuauuacauggauuagauuucucagaaguaucgaacguacaacgauuaaugaggaaacagaaaagggacgauaacgaccuaaaaagacuuagagaucuaaaccaagcuguaaacaacuuagucgaacuaaaaucaguacaacaaaaaucaguacuaaaaguaggaacauuaaauagugaugauuuacucacacuagcagcugaucuagaaaaauuaaaaucaaaaguagucagaacagaaagaccauuaaguucagguguauacauggguaaucuaagcagccaacaacuagaucaaagacgagcauuauuaaacaugauaggaauggcaggaggaagccaagguaaucaaccuagcagagacgguguuguuagagucugggacgucaaaaaugcagauuuacuaaauaaucaauuuggaacaaugccaucauuaacauuagcuugucuuaccaaacaaggacaaguagacuuaaaugacguaguuuuagcauuaacggaccuaggauuaauauacacagcaaaauauccaaauuccucagaccuagacagauuaagucaaaaucauccuguauuaaacaugauagacgucaauaaaucaucacuaaauauaucaggauacaauuucucucuaggagccgcaguaaaagccggagcaugcaugcuggacggaggaaauauguuagaaacaaucaaaaucucaccgcaaacaguagaugguauauuaaaaaguauauuaaaaguaaaaagagcccuaggaauguuuguaucagacacuccaggagaaagaaauccauaugaaaacaucuuauauaaaguauguuuaucgggaaauggauggccauacauagcaucaaggacaucaaucguagguagagcaugggaaaauaccguuguugaucuagaaucaaauaaaaaucaacccaaaguagguaacaacggauccaauaaaaugcuacaaucaucaggauuugcuacaggauuaacauauagucaacuaaugacauuaagagacagcaugcuacaauuagaucccacagcaaaaacuuggauugauauagaagguagaccagaagauccaguugaacuugcacucuuccaaccaucaagcggauguuauauacacuuuuucagagagccaacagaucuaaaacaauucaaacaagacgccaaauacagccauggaauagauguaaacgacuuauucagugcacaaccugguuuaacaucagccguauuagaagcauuaccaagaaacaugguacuaacaugucaaggaagcgaugacauaagaaaacuauuagacagucaagauagaaaagacauaaaacuaauagauaucucacuaagcaaagcagacgccagaaaauucgaaaaugauguaugggaccaauucaaagacuugugccauaugcauacaggaauaguaguagaaaagaaaaagaaaggaggaaaacaagaaaugacaccacacugugcucuacuugacuguauaauguucgaugcagcuguaagcggaggauuaaauguaccaacucuacgagccguacuaccgacugacaugguauuccgaacaauaacgacaaaaguaguauuauaaggacuagucccuguucccagagcccacuuuuuuuucuuuuuuugaaauaaaauagccugucuuucagaucuaaaaaaaaaaaaaaaaaaaaaaaaaaaaaaaaaaaaaaaaaaaaaaaaaaaaaaaaaaaaaaaaugcaucccccccccccccccccccccccccccccccaaaggcucuuuucagagccaccagaauu

SEQ ID NO: 10017 - RNA, 1986 nt, Artificial Sequence
  mRNA product Design a-1 comprising derived and/or modified sequence from LASV(Pinneo-NIG-1969;Clade I)__AIT17837__NP (opt6)
gggagagucccgcagucggcguccagcggcucugcuuguucgugugugugucguugcaggccuuauucaagcuuaccauguccaacucaaaagaaauuaaaaguuuuuuauggacacaaucacuaaggagagaacuuucaggcuauugcagcaacauaaaacuucaaguaguaaaagacgcccaagcauuacuccacggacuagacuuuagugaaguaucaaauguacaacgauuaaugagaaaacaaaaacgagacgaugccgauuuaaaaagauuaagagaucuaaaucaggcaguaaauaaccucgucgaacuaaaaucaacacaacagaagaacguauuaagaguaggaacacuaucaagcgaugaucucauaacauuagcugcagaucuagaaaaacucaaaucaaaagucauaagaacagaaagaccacuauccaguggaguauauaugggaaacuuaagcucacaacaacuagaucaaagacgagcucuauuaucaaugaucggaaugucaggaggcccacaaggaaauagaacagggggagacggaguaguaaggguaugggacguaaaaaacgcugaacuacuaaauaaucaauucggcacaaugccaaguuuaacucuagcaugccuaacaaaacaagggcaaguagacuuaaacgacgcaguacaagcuuuaacagaucuagguuuaauauauacagcaaaauaucccaacucaagcgacuuagacauguuaacacaaagucacccaauacugggaaugguagacacaaaaaaaaguucacuaaacauaaguggauauaauuuuucauuaggagcagcaguaaaagcaggugcauguaugcuagauggaggaaacauguuagaaacuauaaaaguauccccacaaacaauggauggaauauuaaaaucuauccuaaaaguaaaaagaagucuaggaauguucauaucagacacaccaggcgaaagaaaucccuacgaaaauauacuauacaaaauaugccucucaggagaaggauggccauauauagcaaguagaacuucaauaacaggaagagcaugggaaaauacauuagucgauuuagaaagcgauaacaaaccaccaaaauuaaauucggcagggucuaauaaaagucuacaagcagcaggauugaaugcagguuuaacguauagucaauuaaugacauuaaaagacugcaugcuccaauuagauccaucaucaaaaacauggauagauauagaaggcagaccagaagacccaguagaaaucgcccuguuucaacccaguucuggaugcuauauacacuuuuucagagaaccaacagaccuaaaacaauucaaacaagacgccaaauauucacacggcauagauguaacagacuuauuuucuacacaaccaggccuaacuagcgcaguuauugaagcacucccaagaaacaugguucuaacaugccaagguagugaugacauuaaaaaacuuuuagaaucacaaggaagaagagacauaaaacuaauagauaucagcuuaucaaaagcagacucacgaaaauucgaaaacgcuguaugggaccaauauaaagacuuaugccauaugcacacaggaguaguaguagaaaaaaaaaaaagaggaggaaaagaagaaauaacaccccauugugcauuacuagacugcauaauguucgaugcagcaacaacaggaucacuaaacauuacaacacuacgagcaguacuaccaagagauaugguauuccgaacaucaacuccaaaaguaguacuaugaggacuagucccuguucccagagcccacuuuuuuuucuuuuuuugaaauaaaauagccugucuuucagaucuaaaaaaaaaaaaaaaaaaaaaaaaaaaaaaaaaaaaaaaaaaaaaaaaaaaaaaaaaaaaaaaaugcaucccccccccccccccccccccccccccccccaaaggcucuuuucagagccaccagaauu

SEQ ID NO: 10018 - RNA, 1986 nt, Artificial Sequence
  mRNA product Design a-1 comprising derived and/or modified sequence from LASV(ISTH0009-NIG-2011;Clade II)__AIT17405__NP (opt6)
gggagagucccgcagucggcguccagcggcucugcuuguucgugugugugucguugcaggccuuauucaagcuuaccaugucaguaucgaaagaaguuaaaucauucuuauggacucaaucacucagaagagaacuaucagguuauuguucaaacaucaaauuacaaguagucaaagacgcacaagcacuguuacacgggcucgacuuuucagaaguaucaaacguacaaagacuaaugcgcaaacagaaaagagacgauucagauuuaaaaagauuaagagaccuaaaucaagcaguuaauaacuuggucgaacuuaaaagcacucaacaaaaaucaauacuucgaguaggcacauuaacaucagaugaccuuuuaacacuagcagcagaucuagaaaaauuaaaaucaaaaguaauuaggacagaaagaccacuaucuucuggaguauacaugggaaacuuaucaacccaacaauuagaacaaagacgagcauuauuaaacaugauaggaaugguagguggagcacaaggaacacaacccggaagagacgguguagucagaguaugggaugucaaaaaccccgaccuacugaacaaucaauuuggaacaaugccuaguuuaaccuuagcaugccuaacaaaacaaggacaaguagaucuuaacgacgcaguauuagcacuaacagauuuaggauuaauauauacagcuaaauauccaaauaguagcgaccuagaccgauuaagccaaagccacccaauauuaaacaugguagauauaaagaaaucaucacuaaacauuucuggauacaauuucucuuuaggagccgcaguaaaagcaggagcauguauguuagacggaggaaacauguuagaaacuauaaaaguaacaccacaaaccauggacggaauauuaaaaucuauauuaaaaguaaaacgcucacuaggaauguuuguaagcgauacaccaggagaaagaaauccauaugaaaacauucuauacaaaauaugucuaaguggugacggauggccuuacauagcaaguagaacaucaauaguuggacgagcaugggaaaauacaacaguagauuuagaaucagauggaaaaccacaaaaaguaggauccgccggcucaaauaaaucuuuacaaagcgcaggcuuuccuacaggccuaacguauucucaacuaaugacauuaaaagacucaaugaugcaacuagacccaagugcuaaaacauggaucgacauugaagguagaccagaagacccaguagaaauagcauuauaccaaccuaugucuggauguuauauccacuucuuuagagaaccaacagauuuaaaacaauuuaaacaagacgcaaaauacucacacggaauagauguagcagacuuauuuccagcucaaccaggauuaacaagcgccguuauugaagcacuaccaagaaacaugguauuaacuugccaagguagcgacgacauaaaaagacuucuagacucacaaggacguagagacauuaaacuaaucgauauagcauuaaguaaagcagacagucgaagauuugaaaaugcuguaugggaccaauguaaggaucuaugucauaugcauacgggaguuguaguagaaaagaagaaaaggggaggaaaagaagaaauaacaccacacugugcauuaauggauuguauaauguacgacgcagccguaucaggaggccuaaacauaccaguauuaagagcaguacugccgagggauaugguauuuagaacaagcucacccaaagucguauuauaaggacuagucccuguucccagagcccacuuuuuuuucuuuuuuugaaauaaaauagccugucuuucagaucuaaaaaaaaaaaaaaaaaaaaaaaaaaaaaaaaaaaaaaaaaaaaaaaaaaaaaaaaaaaaaaaaugcaucccccccccccccccccccccccccccccccaaaggcucuuuucagagccaccagaauu

SEQ ID NO: 10019 - RNA, 1986 nt, Artificial Sequence
  mRNA product Design a-1 comprising derived and/or modified sequence from LASV(ISTH2010-NIG-2012;Clade II)__AIT17483__NP (opt6)
gggagagucccgcagucggcguccagcggcucugcuuguucgugugugugucguugcaggccuuauucaagcuuaccaugucagcuaguaaagaaguaaagagcuucuuauggacucaaagucuucgacgagaacuaucagguuauugcagcaacauaaaacuucaaguaguaaaagacgcacaagcacuauuacacggauuagacuucucagaaguaucaaauguacaaagacuaaugagaaaacagaaaagagacgacagcgaucuaaaaagauuaagagauuuaaaucaagcuguuaauaauuuaguugaacuaaaaagcacacaacaaaaaucaauauuaagaguaggaacacuaacaucagaugacuuacuaacauuagcagccgacuuagaaaaacuaaaaucaaaaguaauaagaacagaaagaccucuaucaagcggcguuuacaugggaaacuuaucaacccaacaacuagaacaaagacgagcauuauuaaaccuaauaggaaugguagguggugcacaaggaacacaaccaggaagagacggcguaguuagaguaugggacgucaaaaacccagaucuacuuaacaaccaauucggaacaaugccauccuuaacucuagcaugcuuaacaaaacaaggacaaguagaccuaaacgaugcaguauuagcucuuacagacuuaggacuaauauacacugcuaaauauccaaauucaucagauuuggacagacuaucacaaucacauccaauacuaaacauggucgauacuaagaaaaguucacuaaauauuucuggauucaauuuuucauuaggagcagccguaaaagccggagcauguaugcuagaugguggaaauaugcuagaaacaauaaaaguaacaccacaaaccauggauggaauauuaaaauccauacuaaaaguaaagaaauccuuaggaauguuuguaucagacacuccaggagaaagaaaucccuacgaaaacauucuuuacaaaauaugucuuucaggagacggcuggcccuauauagcuucaagaacaucaauaguagguagagcuugggaaaacacaacuguagaccuugaaucugacgguaaaccacauaaaguagguacagcaggaucaaacaaaaguuuacaaagugcaggauuuccaacuggacucacauacagucaacuaaugacccuaaaagacucaaugaugcaauuagauccaucagcaaaaacauggauagauaucgaaggucgaccugaagacccaguagaaaucgcguuauaucaaccaaugaguggauguuacauacacuucuucagggaaccaacggauuuaaaacaauuuaaacaagacgcuaaauacagccacggaauugacguugcagaccuuuuuccagcacaaccaggccuaacaucagcaguuauagaagcacuaccaagaaauaugguauuaacuugucaaggaucggaugacaucaaaagacuacuagacucucaggguagaagggauauaaaauuaauagauauagcacuaucuaaagcagacucaagaagauuugaaaaugcuguuugggaccaaugcaaagaccuaugccauaugcauacaggagucguaguagagaaaaagaaaagaggaggaaaagaagaaauaacaccacauugugcauuaauggauuguaucauguaugaugccgcgguaagcggaggacuaaacauaccaguauuaagagcuguauuaccuagagauaugguauucagaacaucaucgccaaaaguaguacuauaaggacuagucccuguucccagagcccacuuuuuuuucuuuuuuugaaauaaaauagccugucuuucagaucuaaaaaaaaaaaaaaaaaaaaaaaaaaaaaaaaaaaaaaaaaaaaaaaaaaaaaaaaaaaaaaaaugcaucccccccccccccccccccccccccccccccaaaggcucuuuucagagccaccagaauu

SEQ ID NO: 10020 - RNA, 1986 nt, Artificial Sequence
  mRNA product Design a-1 comprising derived and/or modified sequence from LASV(Lassa virus/H.sapiens-wt/NGA/2015/ISTH_0543;Clade II)__AVO03640__NP (opt6)
gggagagucccgcagucggcguccagcggcucugcuuguucgugugugugucguugcaggccuuauucaagcuuaccaugagugcaucaaaagaaguaaaaagcuuucuauggacacaaucauuaagaagagaauuaaguggauauugcucaaauauaaaauuacaagucguaaaagaugcacaagcacuacuacacggauuagauuucucagaaguaagcaauguacagcgacucaugagaaaacaaaaaagagacgacucagacuuaaaaagacuaagagaucucaaccaagccguaaauaauuuagucgaacuaaaaagcacucaacaaaaaucaauauuaagaguaggcacacuaacaagcgacgacuuacuaacacucgcagcagaucuugaaaaacuaaaaagcaaaguaauaagaacagaaagaccauuauccucagguguauacauggguaaccuuucaacacaacaacuagaacaaagaagagcacuacucaacaugauaggaaugguaggcggagcacaaggaacacaaccaggaagagacggaguaguaagaguaugggauguaaagaacccagauuuacuuaauaaccaauuuggaacaaugccaucauuaacauuagcaugcuuaacuaaacaaggccaaguagacuuaaaugaugcaguacuggcauuaacagacuuagguuuaaucuauacagcaaaauauccaaauucaucagauuuagacagacucucacaaucacacccaauuuuaaacauggucgacacaaaaaaaucaucucuaaauauuucaggauauaacuucucauuaggagcagcgguaaaagcaggagcauguaugcuagacgguggaaauauguuagaaacaauaaaaguaacaccacaaacaauggauggaauacugaaaucaauacuuaaaguaaaaaagagccuaggcauguucguaucagauacaccaggagaaaggaacccauaugaaaacauacuuuacaaaauaugcuuaucuggugacggauggccauauauagcuucaagaacaucuauaguagggagagcaugggaaaauaccacaguagaucucgaaucugacggaaaaccccaaaaaguagguucagcagguucaaauaaaaguuuacaaucagcuggauuuccaacaggacuaacuuauucacaacuaaugacauuaaaagauucaaugaugcaauuagauccaucagcaaaaacauggauagauaucgagggaagaccugaggauccuguagaaauagcauuauaucaacccaugucagguugcuauauacauuuuuucagagaaccaacagaucuaaaacaguucaaacaagacgcaaaauacagccacggaauagacguagcagaccuauuuccagcacaaccaggacuaacaagcgcuguaauagaggcacuaccuagaaacauggucuuaacaugccaaggaagugacgacauuaaaagacuacuagauagccaagguagaaaagacauuaaacuuauagacaucgcauuaucaaaagcagacucgagaagauuugagaacgcaguaugggaccaaugcaaagauuuaugccauaugcauaccgguguaguaguugagaaaaaaaaaagaggagguaaagaagaaauaacgccacacugugcacuaauggauugcauaauguaugacgcagcaguaucaggaggauuaaacauacccguauuaagagccguacuaccacgcgauaugguuuucagaacaagcucgcccaaaguaguauuauaaggacuagucccuguucccagagcccacuuuuuuuucuuuuuuugaaauaaaauagccugucuuucagaucuaaaaaaaaaaaaaaaaaaaaaaaaaaaaaaaaaaaaaaaaaaaaaaaaaaaaaaaaaaaaaaaaugcaucccccccccccccccccccccccccccccccaaaggcucuuuucagagccaccagaauu

SEQ ID NO: 10021 - RNA, 1986 nt, Artificial Sequence
  mRNA product Design a-1 comprising derived and/or modified sequence from LASV(Lassa virus/H.sapiens-wt/NGA/2016/ISTH_0009;Clade II)__AVO03572__NP (opt6)
gggagagucccgcagucggcguccagcggcucugcuuguucgugugugugucguugcaggccuuauucaagcuuaccaugucugcaagcaaagaaguuaaaucuuuuuuauggacacaaucauuaagaagagaauuaagcggauacuguagcaacauaaaauuacaaguaguaaaagaugcacaagcacuguuacauggauuagauuucagcgaaguuucaaacguacaaagacuaaugaggaaacaaaaaagagaugauagcgaucuaaaacgguuaagagaucuaaaucaagcaguaaauaauuuaguagaauuaaaaagcacacaacaaaaaaguauauuaagaguaggaacccuaacaucagaugauuuauuaacguuagcagcagaccuugaaaaacuuaaaucuaaaguaauaagaacagaaagaccauuaagcaguggagucuauaugggaaaucuaagcacacaacaauuagaacaacgucgagcacuauuaaauaugaucggaaugguaggaggagcacaaggcacacaaccaggaagagacgggguaguaagagucugggacguaaaaaauccagauuugcuaaacaaccaauucggaacaaugccgagucucacauuggcuugcuuaacaaaacaaggucaaguagaccuaaacgacgcaguucuagcacuaacagaccuaggacuuauuuauacagcuaaauauccaaauucuucagacuuagauagacuaucccaaucccaccccauacugaauaugguagauacaaaaaaaucaucauugaauauuucaggcuauaauuucagucuaggagcagcaguaaaagcuggagccuguaugcuagacggugguaauaugcuagaaacaauaaaaguaacaccccaaacaauggacggaauacuaaaaucaaucuuaaaaguuaaaaaaagccuuggaauguucguaagugauaccccaggcgaaagaaacccuuacgaaaauauacuauauaaaauaugucuaucaggagacggauggccuuauauagccuccagaaccucuauaguuggaagggcaugggaaaauacaacaguagaucucgaaucagacggaaaaccacaaaaaguagggagcgccgguaguaacaagagucuacaaagcgcuggauucccaacaggcuuaacauauagucaauuaaugacuuuaaaagauaguaugaugcaacuagauccauccgccaaaaccuggauagauauagaaggaagaccagaagacccaguagaaauagcacuauaucaaccuaugucaggaugcuacauacacuuuuucagagaaccaacagauuuaaaacaauucaaacaggacgcaaaauauucacacggcauugauguagcagauuuauuuccagcacaaccaggauuaacaucagcaguaauagaagcucuaccaagaaacaugguacuaacaugucaaggaucagaugacauaaaaagacuauuagacagccaaggacgaagagauauaaaauuaauagauauagcuuuaagcaaagcugacucaagaagauucgaaaacgcgguaugggaccaaugcaaagaccugugccauaugcacaccggaguaguaguagaaaaaaaaaaaagaggaggaaaagaagaaauaacaccacauugugcuuuaauggauuguauaauguaugacgcagcaguaucaggaggacuaaauauuccuguacuacgagcuguacuaccacgagacaugguauuuagaacaagcucuccgaaaguaguacuauaaggacuagucccuguucccagagcccacuuuuuuuucuuuuuuugaaauaaaauagccugucuuucagaucuaaaaaaaaaaaaaaaaaaaaaaaaaaaaaaaaaaaaaaaaaaaaaaaaaaaaaaaaaaaaaaaaugcaucccccccccccccccccccccccccccccccaaaggcucuuuucagagccaccagaauu

SEQ ID NO: 10022 - RNA, 1986 nt, Artificial Sequence
  mRNA product Design a-1 comprising derived and/or modified sequence from LASV(Lassa virus/H.sapiens-wt/NGA/2016/ISTH_0017;Clade II)__AVO03568__NP (opt6)
gggagagucccgcagucggcguccagcggcucugcuuguucgugugugugucguugcaggccuuauucaagcuuaccaugucagccaguaaagaaguaaaaagcuuucuauggacacaaaguuuacgaagagaauuaucuggauacugcaguucaauuaaacuucaaguaguaaaagaugcucaagcauuacuacacggacuggauuucucagaaguaagcaauguacaaagacuaaugcgcaaacaaaaacgagacgauucagaucuaaaaagauuaagagaccuaaaccaagcaguaaauaacuuaguagagcuaaaaucaacacaacaaaaaucaauauugagaguaggaacauuaacuucagaugaccuacuuacuuuagcagcugaucuagaaaaauuaaaaucaaaaguaauaagaacagaaagaccucuuucaucaggaguauauaugggaaacuuaucuacacaacaacuagaacaaagaagagcauuauuaaacaugauagguauggccggcggagcacaagguacucaaccaggaagagauggagucgugcgaguaugggauguaaagaauccugauuuacuuaauaaucaauucggaaccaugcccagucucacacuagcgugcuuaacaaaacaaggucaaguagaccuaaaugaugcaguacuugcacuaaccgaucuaggauuaauauauacagcaaaauacccaaauucaucagacuuagacagauuaagccaaucacaccccauuuuaaauaugguugacacaaaaaaaucaagcuuaaacaucucaggauacaacuuuagccuaggagcagcuguuaaagcaggagcaugcaugcuagacggaggaaauauguuagaaacaauaaaaguaaccccccaaacaauggacgguauauuaaaaaguauccuaaaaguaaaaagaagcuuaggaauguucguaucagaugcaccaggagaaagaaacccauacgaaaauauacuuuauaaaauaugccucaguggcgauggauggccauauauagcaagcagaacuucgauaguaggaagagcaugggaaaauaccacaguagaucuagaaagcgaugggaaaccacaaaaaguaggagcaacaggaucaaacaaaaguuuacaaucagcagguuuuccaaccggacuaaccuauucacaauuaaugacauuaaaagauagcaugaugcaacuagaccccucagcaaaaacauggauagauauagaaggcagacccgaagacccaguagaaguagcucuauaucaaccaguaagcggaugcuauauacacuuuuucagagaaccgacagauuuaaaacaauucaaacaagacgcaaaauauucacaugguauugauguagcagaucuuuucccagcacaaccaggcuuaacaucagcaguaauagaagcacuaccaagaaacaugguauuaacaugccagggaucagacgacauuaaaaaacuauuagauucucaaggccgaaaagacauaaaacuaaucgauauagcucuaaguaaagccgauuccagaagauucgaaaaugcagucugggaccaaugcaaagauuuaugccacaugcauacaggaguaguugucgaaaaaaaaaaaagaggaggaaaagaagagauaacaccccacugugccuuaauggacuguauaauguacgacgcagcagucucaggaggauuaaauauaccaguacuaagagccguuuuaccuagagauaugguauucagaacaagcagcccuaaaguagucuuauaaggacuagucccuguucccagagcccacuuuuuuuucuuuuuuugaaauaaaauagccugucuuucagaucuaaaaaaaaaaaaaaaaaaaaaaaaaaaaaaaaaaaaaaaaaaaaaaaaaaaaaaaaaaaaaaaaugcaucccccccccccccccccccccccccccccccaaaggcucuuuucagagccaccagaauu

SEQ ID NO: 10023 - RNA, 1986 nt, Artificial Sequence
  mRNA product Design a-1 comprising derived and/or modified sequence from LASV(Lassa virus/H.sapiens-wt/NGA/2018/ISTH_0959;Clade II)__AVV65100__NP (opt6)
gggagagucccgcagucggcguccagcggcucugcuuguucgugugugugucguugcaggccuuauucaagcuuaccaugagcgcaagcaaagaaguaaaauccuuucuuuggacacaguccuuaagaagagaacuaucagguuacuguucgaacauaaaauuacaaguuguaaaagacgcacaagcucuacuacauggucucgauuuuuccgaagucagcaauguacaaagauuaaugagaaaacaaaaaagggaugacucagacuugaaaagacuaagagauuuaaaccaagcaguaaauaacuuaguagaauuaaaaucaacacaacaaaaaucaauauuaagaguagguacucuaaccucagaugauuuauuaacacuagcggcagaccuagaaaaacuaaaaucaaaaguuauucgaacagaacgaccucuaucaucaggcguauacauggguaacuuaaguacucaacaacuagaacaaagaagagcauuacuaaauuuaauagguaugguaggaggugcacagggaacacaaccaggcagggacggaguuguaagaguaugggauguaaagaauccugauuuacuaaauaaucaauucggaacuaugccaucacuaacacuagccugccuaacaaaacaaggucaaguagacuuaaaugacgucguacuggcccuaacagaccuaggauuaaucuauacagcuaaauauccaaauucaucagacuuagacagacuaucacaaucucacccaauauuaaacaugguagauacaaaaaaauccagccuuaacauaucagguuucaauuuuaguuuaggagcagcuguaaaagcaggcgcaugcaugcuagacggagguaauauguuggaaacaauaaaaguaacuccccaaaccauggacggaauacuaaaaucaauauuaaaagugaaaaaaagccuagggauguuugucagcgauacuccaggagaaagaaauccauaugaaaauauucuauacaaaauauguuuaucaggcgacggcuggccauauauagcaucaagaacaucaauaguaggaagagcaugggaaaauacaaccguagaucuagaaagcgauggaaaaccacauaaaguagguacagccggaucaaacaaaucucuacaaucagcuggauuuccaacgggacuuacauacagccaacuaaugacacuuaaagacaguaugaugcaacuggaucccucugccaaaacauggauugacaucgaaggacguccagaagacccagucgaaaucgcacuauaucaaccgaugucuggauguuacauucauuuuuuuagggaaccaacggauuuaaaacaauuuaaacaagacgccaaauauucacauggaauagacgucgccgaccuauucccugcucaacccggauuaacaucggcuguaauugaagcguuaccacguaacaugguauuaacaugccaaggaagcgaugacauuaaaagguuauuagauagucaaggaagaaaagauauaaaauuaauagauauagcacuaucaaaaacggacucacgaagauucgaaaacgcuguaugggaccagugcaaagaucuaugucauaugcauacaggaguaguuguagaaaaaaaaaaaagaggaggaaaagaagaaauaacaccacacugugcuuuaauggauugcauuauguaugaugcagcaguauccgguggccuaaacauaccaguauuacgagcaguucuaccaagagauaugguauucagaacuucaucaccaaaaguaguacuauaaggacuagucccuguucccagagcccacuuuuuuuucuuuuuuugaaauaaaauagccugucuuucagaucuaaaaaaaaaaaaaaaaaaaaaaaaaaaaaaaaaaaaaaaaaaaaaaaaaaaaaaaaaaaaaaaaugcaucccccccccccccccccccccccccccccccaaaggcucuuuucagagccaccagaauu

SEQ ID NO: 10024 - RNA, 1986 nt, Artificial Sequence
  mRNA product Design a-1 comprising derived and/or modified sequence from LASV(LASV003-NIG-2008;Clade II)__AIT17581__NP (opt6)
gggagagucccgcagucggcguccagcggcucugcuuguucgugugugugucguugcaggccuuauucaagcuuaccaugucagcaucaaaagaaguaaaaucuuuccucuggacacaaucacuaagaagagaauuaucaggcuauuguucuagcauaaaacuacaaguaguuaaagacgcacaagcacuauuacauggacuagauuucagugaaguaagcaauguccaaagauuaaugagaaaacaaaaaagagacgauucagacuuaaaaagauuacgagaucuaaaucaagcagucaauaaucuaguugagcuaaaaagcacacagcaaaaaucaguacuaagaguaggaacacugacgucagacgaccuacuaacacuagcagcagaucuugaaaaacuaaaaucaaaaguaauaagaacagaaagaccauuaaguucaggaguauauauggguaaccuaagcgcacaacaacuagaacaaagaagaacucuacucaacaugaucggaauggucgguggcgcacaaggaacacaaccaggaagagaugguguaguucgaguaugggacgucaaaaauccagacuuauuaaacaaccaauuuggaacaaugccuucacuaaccuuagcaugucuuacaaaacaaggacaaguagaucuaaacgauguuguacuagcacuaacagacuuagggcuaauauauacagcaaaauauccaaacucaucugauuuagaccgucucucucaaucacacccaauauuaaguaugguagacaccaaaaaauccucacuaaauauaucaggauauaacuucagucuaggagcagcaguaaaagccggagcauguaugcuagacggaggaaacauguuagaaacaauaaaaguaacaccucaaacaauggauggaauccuaaaaucaauauuaaaaguaaaaaaaaguuuaggaauguucguaucagauacacccggcgaacgaaacccauaugaaaauauacuauacaaaaucugucucaguggagaugguuggccauacauagcaucacgaacuucuauaguaggacgugcaugggaaaauaccacagucgaccuagaaagcgauggaaaaccacaaaaaguagguacugcuggaucaaauaaaaguuuacaaucagcaggcuuuccuacuggacuaacuuauagccaauuaaugacccuaaaagauucuaugaugcaauuagauccgagcgcaaaaaccuggauagauauagagggaagaccagaagacccaguagaaauagcucuauaccaaccaaugagcggauguuacauccauuuuuuuagagaaccaacagaccuaaaacaauuuaaacaagaugcaaaauauagccauggaauagauguaaccgaucuuuuuccagcccaaccaggcuuaacaucugcuguuaucgaagcuuuaccaagaaacaugguauuaaccugccaaggaucagacgacauaaaaagauuacuagauucacaaggacgcagagauauaaaacugauagacauagcacuuagcaaagccgauucucguagauucgaaaaugcaguaugggaccaauguaaagacuuaugccacaugcacacaggcguuguaguagaaaaaaaaaagcgaggagguaaagaagaaauaacaccccauugugcauuaauggacugcauuauguaugacgcggccguuagcggagguuuaaauauaccaguauuacgugcaguacuaccaagagacaugguuuucagaacaucaucaccaaaaguaguacuauaaggacuagucccuguucccagagcccacuuuuuuuucuuuuuuugaaauaaaauagccugucuuucagaucuaaaaaaaaaaaaaaaaaaaaaaaaaaaaaaaaaaaaaaaaaaaaaaaaaaaaaaaaaaaaaaaaugcaucccccccccccccccccccccccccccccccaaaggcucuuuucagagccaccagaauu

SEQ ID NO: 10025 - RNA, 1986 nt, Artificial Sequence
  mRNA product Design a-1 comprising derived and/or modified sequence from LASV(LASV035-NIG-2009;Clade II)__AIT17589__NP (opt6)
gggagagucccgcagucggcguccagcggcucugcuuguucgugugugugucguugcaggccuuauucaagcuuaccaugagugccaguaaagaaguaaaaucauucuuguggacacaaaguuuaagaagagaacuuucaggauacugcucaagcauaaaacuacaaguaguaaaagaugcacaagcacuacuacauggacuagacuucagugaaguaucaaacguacaaagauuaaugagaaaacagaaaagagaugacucagaucuaaaaagauuacgagauuugaaucaagcaguuaauaacuuaguugaauuaaaaaguacacaacaaaaaucgauacuacgaguaggaacucuaacaucagaugaccuuuuaacacuagcagcugauuuagaaaaauuaaaaucaaaaguaauaagaacagaaagaccauuaagcucaggaguauauaugggaaauuugagugcacaacaacuagaacaaagacgagcucuccuaaauaugauaggaaugguuggaggagcacaagguacacaaccaggaagagacggaguaguuaggguaugggaugucaaaaacccugaucuauuaaacaaccaauuuggcacaaugccaagucuaacucuagcaugccugacuaaacagggacaaguagacuuaaacgaugcaguauuagcucuaacagacuuagguuuaauauauacagcaaaauauccaaauaguucugauuuagacagacuaucccaaucacacccaauucucaacaugguagauacaaagaaauccagucugaauauuucaggauacaauuucaguuuaggagcagccguaaaagcaggagccuguauguuagacggugguaauaugcuagaaacaauaaaaguaacaccccaaacaauggacggaauacuuaaaucaauauugaaaguaaaaagaucauuaggaauguuuguaagcgauaccccaggagaaagaaauccguaugaaaauauacuuuauaaaauaugucuaucaggagacggauggcccuauauagcaucaagaaccucaauagucggcagagcaugggaaaacacuacaguugauuuagaaucagauggaaaaccacaaaaaguaggaacaacaggaucaaacaaaucacuacaaucagcaggauucccuacaggucugacauacucccaacuuaugacauuaaaagacucaaugaugcaacuggauccaucagcuaaaacauggauagauauagaaggcagaccagaggacccgguagaaauagcucuauaucaaccaaugucagguuguuacauucacuucuucagagaaccaacagaucuaaaacaauucaaacaagacgccaaauauucacauggaauagauguagcagauuuauuuccagcacaacccggauuaacaagcgcugucauagaagcucucccaagaaacaugguauuaacaugucaaggcagcgaugauauuaagaaauuacuagacucacaaggacgaagagacauaaaacuaauagauauagcauugaguaaagccgauucaagaaaauuugaaaaugcaguaugggaucaauguaaagaucuaugucauaugcacacuggaguugugguugaaaagaagaaaagagguggaaaagaagaaauaacaccacauugugcauuaauggauugcauuauguaugacgcugcaguaucaggaggacuaaacauaccaguccuuagagcaguacucccaagagauaugguauuuagaacuucaucaccaaaaguaguauuauaaggacuagucccuguucccagagcccacuuuuuuuucuuuuuuugaaauaaaauagccugucuuucagaucuaaaaaaaaaaaaaaaaaaaaaaaaaaaaaaaaaaaaaaaaaaaaaaaaaaaaaaaaaaaaaaaaugcaucccccccccccccccccccccccccccccccaaaggcucuuuucagagccaccagaauu

SEQ ID NO: 10026 - RNA, 1986 nt, Artificial Sequence
  mRNA product Design a-1 comprising derived and/or modified sequence from LASV(LASV1000-NIG-2009;Clade II)__AIT17783__NP (opt6)
gggagagucccgcagucggcguccagcggcucugcuuguucgugugugugucguugcaggccuuauucaagcuuaccaugagcgcaucaaaagaaguaaaauccuuccuauggacccaaagccuaagaagagaauuaucaggguacuguucaaauaucaaauuacaaguaguaaaagacgcacaagcauuauuacauggccuagauuucucagaaguauccaauguucaaagacuaaugcguaaacaaaaaagagacgacucagaccuaaaaagauuaagagaucuuaaccaagcaguaaauaauuuaguggaauuaaaaagcacucaacaaaaaaguauccuaagaguaggaacucuaacuagcgacgaucuucuaacauuagcagccgaucucgaaaaacuaaaaucgaaaguaauaagaacugaaagaccauuaaguagcgguguauauaugggcaaccuaagcacacaacaacuagaacaaagaagagcauuacuaaacaugauaggaaugguaggaggagcacaaggaacacaaccuggaagagacggaguaguaagagucugggacguaaaaaacccagacuuacuaaauaaucaauucggaacgaugccaagucuuacacuagcaugucuuacaaaacaaggucaaguugaccuaaacgauguaguucuagcacuaacagaucugggauuaauuuauacagccaaauaccccaacagcagugaccuugaccggcuaagucaaucacacccaauauuaaacauggucgauacaaaaaaaucaucucuaaacauaaguggauacaacuucaguuuaggagcugccguaaaagcaggugcauguaugcuagacggaggaaacauguuagaaacaauaaaagucacaccacaaacaauggaugggauauuaaaaagcaucuuaaaaguaaaaaaaucccuuggaauguucguaucagacacuccuggagaaagaaaucccuacgaaaauauacuauacaaaauaugucuaagcggcgauggauggccauauaucgcuucaagaacuucuauaguaggaagagcuugggaaaauacaacuguagaucucgaaagugacggaaaaccacaaaaaguuggaacagcaggaagcaauaaaucauuacaauccgcaggauuuccaacaggacugacauauagucaacuaaugacucuaaaagauaguaugaugcaauuagauccaucagcaaaaacauggauagacaucgaagguagaccagaagacccaguagaaauagcucuauaucaaccaguaaguggaugcuacauacacuucuucagggaaccaacagauuuaaaacaauuuaaacaagacgcuaaauauagucacggaauagacguagcagaccuauuuccagcacaaccaggccuaacaucugccguuauagaagcacuaccuagaaauaugguacucacuugccaaggaucagaugauaucaaaagacuauuagacucacaaggacgaagagacauaaaacuaauugacauagcauuaagcaaagcagauucaagaagauuugaaaacgcuguaugggaucaaugcaaagaccucugucacaugcauacaggaguagucguagaaaaaaaaaaaagaggagguaaagaggaaauaacaccgcacugugcauuaauggauugcauaauguaugacgcggcaguaucagguggauuaaauauaccuguauuaagagcagucuuaccacgagauaugguauucagaacuucgaguccuaaaguaguacuuuaaggacuagucccuguucccagagcccacuuuuuuuucuuuuuuugaaauaaaauagccugucuuucagaucuaaaaaaaaaaaaaaaaaaaaaaaaaaaaaaaaaaaaaaaaaaaaaaaaaaaaaaaaaaaaaaaaugcaucccccccccccccccccccccccccccccccaaaggcucuuuucagagccaccagaauu

SEQ ID NO: 10027 - RNA, 1986 nt, Artificial Sequence
  mRNA product Design a-1 comprising derived and/or modified sequence from LASV(LASV221-NIG-2010;Clade II)__AIT17625__NP (opt6)
gggagagucccgcagucggcguccagcggcucugcuuguucgugugugugucguugcaggccuuauucaagcuuaccaugucagcaucaaaagaaguaaaaagcuuccuuuggacacaaucccuaagacgagaauuaucaggauacuguucaucaauaaaacuacaaguaguuaaagacgcucaagcauuauuacauggguuagacuuuuccgaagucuccaauguacagagacuaaugagaaaacaaagaagagaugauuccgauuuaaaacgacuaagagauuuaaaccaagcagucaauaaccucguugaacuaaaaaguacacaacaaaaaaguauauuaagaguaggcacacuaacaagcgaugaccuacucacucuagcagcagaccuagaaaaauuaaaaucaaaaguaauaagaacagaaagaccacuaaguucagguguauauaugggaaauuuaucaacacaacaacuagaacaacgaagagcuuuguuaaauaugauagguaugguaggaggagcacagggaacacaaccgggaagagacgguguagugagaguaugggacguaaaaaacccggauuuacuaaacaaccaauucggaacaaugccaagccuaacucuagcaugcuuaacaaaacaaggacaagucgacuuaaacgaugcuguacuagcacuaacagaccuaggauuaauauacacagcaaaauacccaaauagcagugauuuagacagacuaagccaaagucacccuauccuuaauaugguagauacaaaaaaaagcucuuuaaacauauccgguuacaacuucagucucggagcagcagucaaagccggagcauguauguuagauggcggaaacaugcuugaaacaauaaaaguuacaccacaaaccgucgacggcauccuaaaaucaauauuaaagguuaaaagaagucuaggaauguucguaucagacacaccaggugaaagaaauccauacgaaaauauacuguauaaaauaugucuaaguggagauggauggccuuauauagcaucacgaacaucaauagucggacgagcgugggaaaacacuacaguugaucuagaaagugauggaaaaccacaaaaaguuggaacugcgggaucaaauaaaucauuacaaucagcuggauuuccgacaggacuaacauauagccaauuaaugacacuaaaagauagcaugaugcaauuagaucccucagcaaaaacauggauagacaucgaaggaagaccagaagaccccguugaaauagcauuauaucaaccaaugucaggcuguuauauacauuucuuucgcgaaccaacagaccuaaaacaauuuaaacaagaugcaaaauauagucacggaauagacguagcagaucuauucccagcacaaccuggauuaacaucagcaguaaucgaagcccuuccaagaaauauggucuuaacuugucaaggaagcgaugacauaaaaagacuccuugacucacaaggaagaagagacauaaagcucaucgauauugcucuaucuaaagccgauucaagaaaauucgaaaaugccguaugggaccaauguaaagacuuaugccauaugcauacaggaguaguuguagaaaaaaaaaaaagagguggaaaagaagaaauaacaccacacugcgcucucauggauugcauaauguaugacgcagcaguaucaggaggccuaaacaucccaguauuaagagcuguucuaccaagagauaugguauucagaacaaguaguccaaaaguaguacuuuaaggacuagucccuguucccagagcccacuuuuuuuucuuuuuuugaaauaaaauagccugucuuucagaucuaaaaaaaaaaaaaaaaaaaaaaaaaaaaaaaaaaaaaaaaaaaaaaaaaaaaaaaaaaaaaaaaugcaucccccccccccccccccccccccccccccccaaaggcucuuuucagagccaccagaauu

SEQ ID NO: 10028 - RNA, 1986 nt, Artificial Sequence
  mRNA product Design a-1 comprising derived and/or modified sequence from LASV(LASV237-NIG-2010;Clade II)__AIT17639__NP (opt6)
gggagagucccgcagucggcguccagcggcucugcuuguucgugugugugucguugcaggccuuauucaagcuuaccaugucggcuagcaaagaagugaaauccuuucucuggacacaaagucuacgaagagaauuaucuggauauuguaguaauauaaaacuacaaguagucaaagacgcacaagcauuauuacauggauuagacuucagugaagucucuaacguacaaagauuaaugagaaaacagaaaagagacgacucagaccucaaaagacuuagagaccucaaccaagcaguaaauaacuuaguagaacuaaaaucaacgcaacaaaaaucaauauuaagagucggcacacuaacauccgacgauuugcuuaccuuagcagcagaccuagaaaaauuaaaaucuaaaguuauaagaacagaacgaccacuaagcucaggaguuuauaugggaaauuuaaguacgcaacaacuagaacaacguagagcauuacuuaacaugaucgguaugguaggaggagcacaaggaacucaaccaggaagagacgguguuguaagagucugggaugucaaaaacccugaucuucuaaacaaccaguuuggaacaaugccuucuuuaacauuagcauguuuaacuaaacaaggacaaguagacuuaaaugaugcaguacuagcacucacagaccuaggcuuaaucuacacagcuaaauauccuaacucaucagauuuagacagacuaagucaaucacacccuauauuaaacaugguagacauaaagaaaagcucauuaaacauaaguggauauaacuucagccucggagcugcaguuaaagcaggagcauguauguuagauggagguaauaugcuagaaacaauaaaaguaacaccacaaacaauggacggaauacuuaaaaguauauuaaaagucaaaaggagccuaggaauguucguuagugacacaccaggagaaagaaaucccuacgaaaauauacuauacaaaauaugucucucuggagauggauggccauauauagcaaguagaacaucaauaguaggucgagcaugggaaaauacaacugucgaucuugaaucagacggcaaaccccaaaaaguaggaucagcaggaaguaauaaaaguuuacaaucagcaggauuuccaacaggacucacauauagucaacuuaugacauuaaaagauucaaugaugcaacuugauccaucagcaaaaacauggauagauauugaaggacgaccggaagacccaguagaaauagcacuauaucaacccaugucugguuguuauauacacuuuuucagagaaccuacagaucuaaaacaauuuaagcaagacgcgaaauacucacauggcaucgacguugcagauuuauuuccagcacaaccuggauuaacaucagcaguaauagaagcauuaccaagaaacaugguauuaaccugucaaggcucagaugacauaaaaagacuauuagauucccaaggaagaagagacauaaaauuaauagacauagcacucucaaaagcggauucccgaagauucgaaaacgcagucugggaccaauguaaagauuuaugucacaugcacacaggaguaguaguagaaaagaagaaaagaggaggaaaagaagaaauaaccccucacugugcauuaauggacuguauaauguacgaugcagcaguaucagguggacuaaauauaccuguccuccgagccguauuaccaagagauaugguauucagaacaagcucuccaaaaguaguacuauaaggacuagucccuguucccagagcccacuuuuuuuucuuuuuuugaaauaaaauagccugucuuucagaucuaaaaaaaaaaaaaaaaaaaaaaaaaaaaaaaaaaaaaaaaaaaaaaaaaaaaaaaaaaaaaaaaugcaucccccccccccccccccccccccccccccccaaaggcucuuuucagagccaccagaauu

SEQ ID NO: 10029 - RNA, 1986 nt, Artificial Sequence
  mRNA product Design a-1 comprising derived and/or modified sequence from LASV(LASV253-NIG-2011;Clade II)__AIT17671__NP (opt6)
gggagagucccgcagucggcguccagcggcucugcuuguucgugugugugucguugcaggccuuauucaagcuuaccaugagcgcaucuaaagaaguaaaaucuuucuuauggacacaaucacuaagaagagaacucucuggauauugcuccaguauuaaacuacaaguaguaaaagaugcgcaagcccucuuacauggacuugacuuuagugaaguaucaaauguucaaagacuuaugcguaaacaaaaaagagaugauucagauuuaaaaagauuacgagaccuaaaucaagcuguaaacaauuuaguagaauuaaaaagcacacaacaaaaaucaguauuaagaguaggaacauuaacaucagacgaccuacuaacacuagcugcagaccuagaaaaacuaaaaucaaaaguaauaagaacugaaagaccgcuaagcucaggaguauauaugggaaauuuaaguacacagcaauuagaacaaagacgagcacuuuuaaacaugauaggaaugguuggaggagcacaaggaacacaaccuggccgagacggaguaguuagaguaugggauguaaaaaauccagauuuauuaaauaaucaauucggaacuaugccaagucuaacacuagcaugucuaacaaaacaaggacaaguagaccuaaacgacgucguucuagcuuuaacagaccucggauuaaucuauacagccaaauauccaaauaguagcgaucuagauagacucucacaaucacaccccauacuaaauauggucgacaccaaaaaaucaucauuaaacauuucaggauacaauuuuucacuaggagcagcaguaaaagcaggagcgugcaugcuugaugggggaaauauguuagaaacaauaaaaguaacaccccaaacaauggacggcauacuaaaaucaauacuaaaaguaaaaaaaucuuuagguauguucguaucagauacaccuggagaacgaaauccguaugaaaauauacuauacaaaauaugucuaucaggagauggauggccauauaucgcaagucgaaccucaauaguuggaagagcaugggaaaauacaacaguagaucuagaaagcgacggaaaaccacaaaaagucggaacagcgggaucaaauaaaaguuuacaaucagcaggcuuuccaacaggacuuacauauucacaacuaaugacauugaaagauagcaugaugcaacuagauccaagugcaaaaacguggauagauauagaaggaaggcccgaagauccaguugaaaucgcacucuaccaaccaaugucaggaugcuacauccauuuuuucagagaaccaacagaucuaaagcaauucaaacaagacgcaaaauacucacacggaauagacgucacagaucuauucccagcacaaccaggucuuacuucugcaguaauagaagcauuaccgcgaaacaugguacuaacuugucaaggaagugacgacauaaaaagauuacuagacagccaaggaagaagagauauaaaauuaauagacauagcguuaucaaaagcagacuccagacgauuugaaaacgcaguaugggaucaaugcaaggauuuaugccauaugcauacaggagucguaguagaaaaaaaaaagcguggcggaaaagaagaaauaacaccccauugugcauuaauggauugcauaauguaugaugcagcaguauccggaggacucaacauaccaguccuaagagcaguccucccaagggauauggucuuuagaacauccucacccaaaguaguauuauaaggacuagucccuguucccagagcccacuuuuuuuucuuuuuuugaaauaaaauagccugucuuucagaucuaaaaaaaaaaaaaaaaaaaaaaaaaaaaaaaaaaaaaaaaaaaaaaaaaaaaaaaaaaaaaaaaugcaucccccccccccccccccccccccccccccccaaaggcucuuuucagagccaccagaauu

SEQ ID NO: 10030 - RNA, 1986 nt, Artificial Sequence
  mRNA product Design a-1 comprising derived and/or modified sequence from LASV(LASV254-NIG-2011;Clade II)__AIT17675__NP (opt6)
gggagagucccgcagucggcguccagcggcucugcuuguucgugugugugucguugcaggccuuauucaagcuuaccaugagugcaucuaaagaaguaaaaucauuuuuauggacccaaucgcucagaagagaauugaguggauauugcaguucaauuaaauugcaaguuguaaaagacgcacaagcacuauuacauggucuagauuuuagcgaaguaucaaauguucaacgcuuaaugcgaaaacaaaaacgagaugacagugacuuaaaaagacuaagagacuuaaaucaagcaguaaacaauuuaguagaacuaaaaaguacacaacaaaaaucuguauuaagaguaggaacauuaacaagcgaugauuuacucacauuagcagcugaucuagaaaaauuaaaaucaaaaguaauaagaacagaaagaccauuauccagcggaguauauaugggaaauuuaucaacacaacaauuagagcaacgacgugcauuauuaaacaugauaggaaugguagguggagcacaaggcacgcaaccaggaagagacggaguaguaagaguaugggaugucaaaaacccugaccuacuaaauaaucaauuuggaacaaugccaucauugacauuagcaugucuuacaaaacaaggacaaguagacuuaaaugacgcgguacuagcacuaacagauuuaggauuaauauauacagcaaaauauccaaauucaucagaccuugauagauuaagucaaagccacccaauacuuaauaugguagauacaaagaaauccagucuaaacauuagcggcuacaauuucagccuaggagcagcaguaaaagcaggagcgugcauguuggacggaggaaauaugcuagaaacaauaaaagugacuccccaaacaauggacggaauauuaaaaucuauacuaaaaguaaagaaaagccuaggaauguucguaagugauacaccaggagaaagaaauccauaugaaaauauauuauauaaaauaugucuaagcggugauggauggcccuauauagcaaguagaacaucgauaguggguagagcaugggaaaauacuaucguagaucuagagagugauggaaaaccucaaaaaguaggaacggcaggaucaaacaaaucauuacaaucagccggauuuccaacaggacuaacauauucacaauuaaugacacuaaaagauaguaugaugcaacuagacccaagugcaaaaaccuggauagauauagaaggaagaccagaagaccccguagaaauagcauuauaucaaccaaugucaggauguuacauacacuuuuucagagaaccaacugauuuaaaacaauuuaaacaagaugcuaaauacagucauggaauagaugucgcagacuuauucccagcacaaccagguuuaacaagugcaguaauagaagcauuaccgagaaauaugguucucacuugucaaggaagugacgauauaaaacgacuacuugauucacaaggaagaagagacauaaaauuaauugauauagcauuaucaaaagcagauaguagaagauucgaaaaugcaguaugggaucaauguaaagaccucugucacaugcauacaggaguaguagucgagaaaaagaaacgaggaggaaaagaagaaauuacaccgcauugugcauuaauggauugcauaauguaugacgcugccguaucaggaggacuuaauauucccguguuaagggcaguauuaccaagagacaugguauucagaacuucaucacccaaaguaguacuauaaggacuagucccuguucccagagcccacuuuuuuuucuuuuuuugaaauaaaauagccugucuuucagaucuaaaaaaaaaaaaaaaaaaaaaaaaaaaaaaaaaaaaaaaaaaaaaaaaaaaaaaaaaaaaaaaaugcaucccccccccccccccccccccccccccccccaaaggcucuuuucagagccaccagaauu

SEQ ID NO: 10031 - RNA, 1986 nt, Artificial Sequence
  mRNA product Design a-1 comprising derived and/or modified sequence from LASV(Nig08-04;Clade II)__ADU56611__NP (opt6)
gggagagucccgcagucggcguccagcggcucugcuuguucgugugugugucguugcaggccuuauucaagcuuaccaugagugcaucaaaagaagucaaaucauuccuuuggacacaaagccuaagacgagaacuaucaggauacugcucuaacauaaaauuacaaguuguaaaagacgcacaagcacuuuuacauggauuggauuucucagaaguaucaaacguucaacgacuaaugcgaaaacagaaaagagacgauggagaucuaaaaagacuaagagauuuaaaccaagccguaaauaaccuaguagaacuaaaaucgacacaacaaaaaucuguuuugagaguaggaaccuuaaccucugacgaccuacuaacacuugcagcagacuuagaaaaauuaaaaucaaaaguaaucagaacagaaagaccucucagcucaggaguauacaugggaaaucuaaguacacaacaacuagaacaaagaaaagcacuacuaagcaugaucgguaugguaggaggagcacaaggcacacaaccaggaagagacggaguaguuagaguaugggauguuaaaaauccagaccuacuuaacaaccaauucggaacaaugcccucauuaacuuuagcaugcuuaacaaaacaaggacaaguagaucuaaaugaugcaguucuagcccuaacagaucucggacuaauauauacagcaaaauacccaaauucaucagaucuagacagauuaucucaaucccauccaauacuaaacaugguagauaccaagaaaucaucacuaaacauuucaggauacaauuuuucacuaggagcagcaguaaaagccggagcaugcaugcuagauggaggcaacaugcucgaaacaauaaaaguaacaccccaaacaauggacgggauauuaaaaaguauacugaaaguuaaaagaucacuaggaauguucguaucagauacaccaggagaaagaaaucccuaugaaaauauucuauacaaaauaugccuaucaggugauggguggccuuacaucgcaaguagaacaaguauaguagggagagcaugggaaaauacaacuguagaucuagaaucugauggaaaaccacaaaaaguaggaacugcaggaaguaauaaaaguuuacaaagcgcaggauuuccuacaggauuaacuuauagucaacuaaugaccuuaaaagauagcaugaugcaauuagauccaagugcaaaaacauggauagacauagaaggucgaccagaagacccagucgaaauagcauuauaucaaccaaugucaggcuguuauauacacuucuuucgagaaccuaccgaucuaaaacaauuuaaacaggaugcaaaauauucacacgguauagacguuacagauuuauuuucagcacaaccagguuuaacuucagcaguaauagaagcguuaccaagaaacaugguccucacaugucaaggaucagaugauauuaagaaauuacuugacagucaaggaagacgagacauaaaacuuauagacaucucauuaaacaaagcagacucaagaagauuugaaaacgcaguaugggaccaauguaaagauuuaugccacaugcauacaggagucguaguagagaaaaagaaacgagguggaaaagaagaaauaacuccacauugcgcauuaauggauugcauaauguuugacgcagcugugaguggaggauuaaauauaccaauauuaagagccguacuaccaagagauaugguauuuagaacaaguucgccaaaagugguacuauaaggacuagucccuguucccagagcccacuuuuuuuucuuuuuuugaaauaaaauagccugucuuucagaucuaaaaaaaaaaaaaaaaaaaaaaaaaaaaaaaaaaaaaaaaaaaaaaaaaaaaaaaaaaaaaaaaugcaucccccccccccccccccccccccccccccccaaaggcucuuuucagagccaccagaauu

SEQ ID NO: 10032 - RNA, 1989 nt, Artificial Sequence
  mRNA product Design a-1 comprising derived and/or modified sequence from LASV(GA391;Clade III)__AAA46284__NP (opt6)
gggagagucccgcagucggcguccagcggcucugcuuguucgugugugugucguugcaggccuuauucaagcuuaccauguccgcuagcaaagaaguaagauccugcuuauggacacaaucacuaagaagagaacuaucaggauauugcucaaacauaaaauuacaaguaguaaaagacgcccaagcacuauuacacggacuagauuucucagaaguuucaaauguacaaagauuaaugagaaaacaaaaacgagacgacggcgaucuaaaaaggcuaagagaucuuaaucaagcaguaaauaaccuaguagaacuaaaaaguacacaacaaaaaucaguacuacgaguuggcacauuaucuagugaugauuuacuaauacuagcagccgauuuagaaaaacuaaaaucaaaagucacaagaacagaaagaccguuaucaucaggaguauauaugggaaacuuaucaucucaacaauuagaccaaagacgagcucuccuaaacaugauaggaaugacaggaguaagcggaggaggaaaaggagcaucaaacggaaucguaagaguaugggauguuaaaaaugcagaacuacuaaauaaccaauucggaacaaugccuaguuuaacccuagcuugcuuaacaaaacaaggacaaguagaucuaaacgaugccguacaagcacucacagaucuaggauuaauuuacacagcuaaauaccccaauagcucagauuuagaucgauuaagucaaucacacccuauccuaaacaugauagauaccaagaaaaguagccuaaacauuagcggauacaauuuuucauuaggagcagcaguaaaagcaggagcaugcaugcuagaugguggaaacauguuagaaacaaucaaaguaaguccacaaacaauggauggaauacuaaaaucaauacucaaagugaaaaagagcuuaggaauguucguaagugacacaccuggugaaagaaaucccuaugaaaauauauuauauaaaaucugucucucaggagauggcuggagcuauauagcaucaagaacaucaauaguaggcagagcaugggaaaauacaguaguagauuuagaacaagacaacaaaccacagaaaauaggaaacggaggaaguaacaaaucuuuacaaagcgcaggauuugcagcaggccugauauacagucaacuuaugacauuaaaagauuucaaauguuuuaaccuaauaccaaaugccaaaacauggauggauauagaaggcagaccagaagauccagucgaaauagcucuuuaccaaccaaguuccggcugcuauguacauuucuucagagaaccaacagaccuuaaacaauucaaacaagacgcaaaauauucacauggacgagauguaacugaccuauucgcagcacaaccaggauuaacaagugcaguuauagaagcccuaccacgaaauaugguuauaacaugccaaggaagugaagauauacgaaaauuauuagaaagucaaggaaggagagauaucaaacuuauugacauuacacuaucaaaagcugacucaagaaaauuugaaaaugcuguaugggaccaauuuaaagauuuaugccacaugcacacugguguaguaguugagaaaaagaaacgaggaggcaaagaagaaauaacaccacacugugcgcucauggacugcauaauguucgaugcugcaguaucaggaggacucgacgccaaagucuuacgaguagucuuaccaagagacaugguauuccguacaucaacacccaaagucguacuauaaggacuagucccuguucccagagcccacuuuuuuuucuuuuuuugaaauaaaauagccugucuuucagaucuaaaaaaaaaaaaaaaaaaaaaaaaaaaaaaaaaaaaaaaaaaaaaaaaaaaaaaaaaaaaaaaaugcaucccccccccccccccccccccccccccccccaaaggcucuuuucagagccaccagaauu

SEQ ID NO: 10033 - RNA, 1986 nt, Artificial Sequence
  mRNA product Design a-1 comprising derived and/or modified sequence from LASV(Nig08-A19;Clade III)__ADU56619__NP (opt6)
gggagagucccgcagucggcguccagcggcucugcuuguucgugugugugucguugcaggccuuauucaagcuuaccaugagcgcaucaaaagaaguaaaaucauucuuauggacacaaucauuaagacgagaacuaucuggauacuguaguaauauaaaauuacaaguaguuaaagaugcacaagcccuauuacauggacuagauuuuucagaagucucuaauguccaaagauuaaugagaaaacaaaaaagagacgacggagaucuaaaaagacuuagagacuuaaaucaggcaguaaacaaucuuguagaacuaaaaagcacucaacaaaaaucugugcuaagaguuggaacauuaaguagcgaugaucuucuuguacucgcagccgacuuagaaaaauuaaaaucuaaaguaguacgaacagaacggccacuaucaucagguauauauaugggaaaccuuucaucucaacaacuggaucaaaggaaagcauuacuaaacaugauaggaaugacaggaggaaauggaggacgaaacacaacaagcgacggaaucguuagaguuugggacguaaaaaacgcagaacuauuaaacaaucaauuugguacaaugccaaguuuaacucucgcuugccuuaccaaacaaggacaaguagaucuaaaugaugcaguacaagcacuaacagaccuagguuuaauauauacagcgaaauauccaaauuccucagacuuagaucgacuagcacaaucacauccaauauuaaauaugauagauacgaaaaaaucaucauuaaacauaagcggauacaauuucucauuaggcgcagcaguuaaagcuggagcauguauguuagacggaggaaauaugcucgaaacaaucaaaguaagcccacaaacaauggacggaauauuaaaaucaauacuaaaaguaaaaaggucacuaggaauguucauuagugauacaccaggcgaaagaaacccauaugaaaauauauuauacaaaauaugcuuaagcggagacggauggcccuauauugccucaagaaccagcauaguaggaagagcaugggaaaacacaguagucgaucuagaaucggauaauaaaccacaaaaaacaggaaacgguggaaguaauaaaucacuacaaucagcagguuuugccgcaggcuuaacauacucacaacucaugacauuaaaagauucaaugcuccaacucgacccaaaugcuaaaacauggauggauauagaaggaagaccagaagacccaguagaaauagcucuauaccaaccguccucaggauguuacauacacuucuuuagagaaccaacagaucuaaaacaguuuaaacaagacgcaaaauacagccauggaauagacguuacagauuuauuugcagcacaaccaggacuaacaagugcaguuauagaagcauuaccaaggaacaugguaauaacaugucaaggcagugaagacauaagaaaacuacucgaaucacaaggaaggcgugacauuaaacuuauagauauuagucuaagcaaaguagacucacgaaaguuugaaaacgcaguaugggaucaauucaaagaucuaugccacaugcauacaggaauaguagucgaaaaaaaaaaaagaggggggaaagaagaaauuacaccacacugcgcuuuaauggacugcauaauguuugaugcagcuguaucaggaggaguugacgcaaaaguucuuagagcaguauuaccaagagauaugguauucagaacuucaacacccaaaguuguccucuaaggacuagucccuguucccagagcccacuuuuuuuucuuuuuuugaaauaaaauagccugucuuucagaucuaaaaaaaaaaaaaaaaaaaaaaaaaaaaaaaaaaaaaaaaaaaaaaaaaaaaaaaaaaaaaaaaugcaucccccccccccccccccccccccccccccccaaaggcucuuuucagagccaccagaauu

SEQ ID NO: 10034 - RNA, 1986 nt, Artificial Sequence
  mRNA product Design a-1 comprising derived and/or modified sequence from LASV(G1180-SLE-2010;Clade IV)__AIT17169__NP (opt6)
gggagagucccgcagucggcguccagcggcucugcuuguucgugugugugucguugcaggccuuauucaagcuuaccauguccgcaagcaaagaaauaaaauccuuccuauggacccaaucucucagaagagaauuaaguggauacuguucuaacauuaaacuacaaguagucaaagacgcucaagcacuauuacaugguuuagauuucucagaaguaaguaauguccaaagacuaaugagaaaagaaagaagagacgauaacgacuuaaaaagacuaagagaccuaaaucaggcugucaauaauuuaguagaacuaaaaaguacucaacaaaaaucuauacuaagaguaggaacguuaacuagcgacgaucuacuaauauuagcagccgaucuugaaaaauuaaaaucaaaaguaauuagaacagagagaccauuaagcgcuggaguauauaugggaaacuuaaguucacaacaauuagaccaaagaagagcacucuuaucgaugauaggaaugucaucaggaaaucaaagagcacaagcaggcagagauggugucguacgugucugggacguaaaaaauguagaacuacuaaacaaucaauuuggaaccaugccuucauuaacucucgcuuguuuaacuaaacaaggacaaguagaccuaaacgaugcaguacaagcauuaacugacuuaggacuaauauauacagcaaaauacccuaauacuuccgauuuagacagacuaacacaaucacacccaauacuuaauaugauagauacaaaaaaauccucauuaaacaucucaggauacaauuucucauuaggagcagcagucaaagcaggagccuguauguuagacggaggaaauauguuagaaacuauaaaaguaucuccacaaaccauggacggaauacugaaaaguauucuaaaaguaaaaaaagcauuaggaauguucauuucagauacaccaggcgaaagaaaucccuaugaaaauauauuauacaaaauaugucuaucaggugauggauggccauauaucgcaagccgaacaaguaucacaggaagagcaugggaaaauacaguaguagacuuagaaucagauggaaaaccacaaaaagcaggauccaacaauucaaacaaaucauuacaaagcguaggauuuaccgcaggacuaacauauucacaacuaaugacguuaaaagaugcaaugcuacaguuagauccaaaugcaaaaaccuggauggacauagaaggaagacccgaagacccaguagaaauugcauuauaucaaccaagcaguggaugcuauauucacuuuuuccgugaaccuaccgaccuaaaacaauuuaaacaagacgcaaaauauucacauggaauagacguuacagaucuauuugcagcacaaccuggacuaacaucagcaguaauagacgcccuuccucgaaauaugguuauaaccugucaaggaucagaugauauacgaaaacuucuagaaagccaaggacgaaaagacaucaaauuaauagauauagcauuaucuaaaacggacucaagaaaauaugaaaacgcugucugggaccaauauaaagauuuaugccauaugcauaccggaguaguaguugaaaaaaaaaaacgaggaggaaaagaagaaauaaccccacacugcgcacuaauggauugcauaauguucgacgcagcaguaucagggggucuaaauacauccgucuuaagagcaguacuaccaagagauaugguauucagaacaucaacaccacgaguuguacuauaaggacuagucccuguucccagagcccacuuuuuuuucuuuuuuugaaauaaaauagccugucuuucagaucuaaaaaaaaaaaaaaaaaaaaaaaaaaaaaaaaaaaaaaaaaaaaaaaaaaaaaaaaaaaaaaaaugcaucccccccccccccccccccccccccccccccaaaggcucuuuucagagccaccagaauu

SEQ ID NO: 10035 - RNA, 1986 nt, Artificial Sequence
  mRNA product Design a-1 comprising derived and/or modified sequence from LASV(G1442-SLE-2011;Clade IV)__AIT17181__NP (opt6)
gggagagucccgcagucggcguccagcggcucugcuuguucgugugugugucguugcaggccuuauucaagcuuaccaugucugcuaguaaagaaguaaaaagcuuuuuauggacacaaucauuacgaagagaauuauccggcuauuguagcaauauaaaacuacaaguagucaaagacgcacaagccuuacuacacggacuagauuucucagaaguaucaaauguacaaagacuaaugagaaaacaaagaagagacgacaacgaccugaaaagacuaagagaucuaaaucaagcaguuaacaaucucguagaacucaaaagcacacaacaaaaaucaguauuaagagucggcacucuaacgagcgaugacuuauuagugcucgccgcagacuuagaaaaacuaaaaagcaaaguaauaagaacagaaagaccccucucagccggaguauauaugggaaaucuaucaucacaacaauuagaccaaagacgagcauuauuaaacaugaucggaaugagcggcggcauacaaggaacacgaacaggaagagaugguguagucagaguaugggacgucaaaaacgcagauuuauuaaacaaccaauuuggcacaaugccaucauuaacauuagcaugcuuaacaaaacaaggacaaguagacuuaaaugaugugguacaagcacucacagaccucggcuuaauauacacagccaaauaccccaacgcaucagaccuagacagacuaacucaaucacacccaauacuaaacaugauagauaccaaaaagaguucacuaaacaucucaggauauaacuuuucacuaggcgcugcuguaaaagccggagcauguauguuagacggugguaacaugcuagaaacuauaaaaguaucaccacaaacaauggacggaauauuaaaaucaauccuaaaaguaaaaaaaacauuaggaauguuuauaagugacacaccaggagaaagaaauccguaugaaaauauauuauacaaaaucugccuuucgggagacggcuggcccuacauagccagccgaacuagcauuacaggaagagcaugggaaaacacaguaguagaccucgaaagcgacggaaaaccgcaaaaagcugggucaaauaacuccaauaaaucauuacaaagugcuggauuugcagcaggauuaacauauucacaauuaaugacauuaaaagacgcaaugcuacaauuagauccuaaugcaaaaacauggauggauaucgaaggaagaccagaagaccccguagaaauagcccuauaccaaccguccucaggauguuacauccacuuuuucagagaaccaacagaccuaaaacaauuuaaacaagacgccaaauauucacauggaaucgacgucacugauuuauucgccgcacaaccaggacuaacaagcgcaguaaucgaagccuuaccaagaaacauggugauaacaugccaaggaagugaugacauaaaaaaacuauuagaaucacaaggaagaaaagacauaaaauuaauagacauagcauuaagcaaaacagacucacgcaaauaugaaaacgcaguaugggaucaauacaaagacuuaugccauaugcacacaggaguaguuguagaaaaaaagaaaagaggaggcaaagaagaaauaacaccacauugugcacuuauggacuguauaauguuugacgcagccguaucaggaggauuaaauacacuaguacuaagagcaguccuaccaagagacaugguauucagaacuagcaccccaagaguaguacuauaaggacuagucccuguucccagagcccacuuuuuuuucuuuuuuugaaauaaaauagccugucuuucagaucuaaaaaaaaaaaaaaaaaaaaaaaaaaaaaaaaaaaaaaaaaaaaaaaaaaaaaaaaaaaaaaaaugcaucccccccccccccccccccccccccccccccaaaggcucuuuucagagccaccagaauu

SEQ ID NO: 10036 - RNA, 1986 nt, Artificial Sequence
  mRNA product Design a-1 comprising derived and/or modified sequence from LASV(G3010-SLE-2013;Clade IV)__AIT17345__NP (opt6)
gggagagucccgcagucggcguccagcggcucugcuuguucgugugugugucguugcaggccuuauucaagcuuaccaugagcgcuaguaaggaaauaaaauccuuccucuggacacaaucacuaagaagagaauuaagugguuauugcaguaacaucaaauuacaaguaguuaaagaugcacaagcauuacuacauggauuagauuucucagaaguaagcaauguacaaagacuuaugaggaaagaacgaagggaugauaacgaccuaaaacgacuaagagaucugaaucaagcaguaaauaacuuaguagaauuaaaaucaacacaacaaaaaucaauucuaagaguaggcacccugacaagcgaugauuuacuaauucuagcagcagauuuagaaaaauuaaaaucaaaaguuacaagaacagaaagaccgcuaagcgcuggaguauauaugggaaaccugucuucccaacaauuagaucaaagaagagcuuuacuaagcaugauaggaaugucaucugggguccaaggagcaagagccgguagagacggaguaguucgaguaugggacguaaaaaacgcagaacucuuaaacaaccaauucggaacuaugccaaguuuaacuuuagcuuguuuaacaaaacaaggacaaguagauuuaaaugauguaguucaagcacuaacagacuuaggucuaauauauacagcuaaauaccccaauacaucagaucucgacagacuaacacaaucccaucccauauuaaacaugauagauaccaaaaaaucuucucuaaacauaucaggauacaauuuuaguuuaggugcagcuguaaaagcuggagccugcauguuagaugguggaaauauguuagaaacaauaaaagugaguccccaaacaauggaugggauccuaaaaagcauauuaaaaguaaaaaaagcauuaggaauguucauaucagagacacccggugaaagaaauccauaugaaaauauacuauacaaaaucugucuaaguggugacggcuggccuuacaucgcaaguagaacaucaauuacgggacgugcaugggaaaacacaguaguugaucuggaaucagauggaaaaccacaaaaagcaggaucaaacaacucaaauaaaagucuacaaucagcaggauucacugcaggauuaacauauucacaacuaaugacacuaaaagaugcuaugcuucaacuagacccaaacgcaaaaacauggauggacauagaaggccgaccagaagauccagucgaagucgcacuauaccaaccuaguucaggauguuauauacacuucuuucgugaaccaacagaccuaaaacaauucaaacaagacgcaaaauauucacauggaauagacguuacagaccuauucgcagcacaaccaggucuaaccagugccguaauagacgcauuaccaaggaauauggucauaacaugucaaggaucagaugauauaaaaaaacuauuagaaagucaaggaagaaaagacaucaaauuaauagauauagcacuaucaaagacagauucaagaaaauaugaaaaugcaguaugggaccaauauaaagaccuaugucacaugcauaccggaguugugguagaaaaaaaaaaaagaggagggaaagaagaaauaacgccacauugcgcauuaauggauuguauaauguuugaugccgcaguauccgguggacuuaauacaaguguacuuagagcaguacugccacgagacaugguauuuagaacaucaacaccccguguaguuuuauaaggacuagucccuguucccagagcccacuuuuuuuucuuuuuuugaaauaaaauagccugucuuucagaucuaaaaaaaaaaaaaaaaaaaaaaaaaaaaaaaaaaaaaaaaaaaaaaaaaaaaaaaaaaaaaaaaugcaucccccccccccccccccccccccccccccccaaaggcucuuuucagagccaccagaauu

SEQ ID NO: 10037 - RNA, 1986 nt, Artificial Sequence
  mRNA product Design a-1 comprising derived and/or modified sequence from LASV(G502-SLE-2009;Clade IV)__AIT17127__NP (opt6)
gggagagucccgcagucggcguccagcggcucugcuuguucgugugugugucguugcaggccuuauucaagcuuaccaugagcgcaucuaaagaaauaaaaucauuucuauggacacaaucucuaagaagagaacuaucaggauacugcucaaauauaaaauuacaaguaguaaaagacgcucaagcacucuuacacggauuagauuucucugaaguuucuaauguacaaagauuaaugagaaaagaacgcagagacgacaacgaucuuaaaagauuaagagauuuaaaucaagcgguaaacaacuuagucgaauuaaaaagcacucaacaaaaaaguaucuuacgaguaggcacacucacaucagaugaccuacuuauacuagccgcagacuuagaaaaauuaaaauccaaaguaauaagaacugaacgcccucuaucagccggaguauauauggguaacuuaucaucacaacaacuagaucaaagacgagcacuauuaucaaugaucggaaugucagggggcaaucaaggcgucagagcaggaaaagacggaguaguaagaguaugggacguaaaaaacgcagaauuauugaauaaccaauuuggaacaaugccaucacugacacuagcauguuuaacaaaacaaggacaaguagauuuaaaugacgccguucaagcacuaacagaucuuggccuaaucuauaccgcaaaauauccaaacacuagugacuuagacaggcuaacacaaagccacccaauauuaaauaugauagacacaaaaaaaucuucacucaacauaagcggguacaauuuuuccuuaggugccgcagucaaagcaggagccuguauguuagacggaggaaacauguuagaaacaauaaaaguaucgccacaaacaauggaugguauauuaaaaucuauacuaaaagucaaaaaagcauuagguauguucauauccgacacaccaggagaaagaaacccauacgaaaauauccuauauaaaauauguuuaucuggagauggauggccauacauagcaucuagaacaagcaucaccggcagggcaugggaaaauaccguaguugaccucgaaucagauggaaaaccccaaaaagcagguucaaacaauucaaauaaaucauuacaauccgcaggcuuuaccgccggacuuacuuauucacaacuaaugacuuuaaaagaugcaaugcuccaacuagauccaaauaccaaaacauggauggauauagaaggacgaccagaagauccaguagaaaucgcccucuaccaaccaucaucaggcuguuacauacacuucuuuagggaaccaacugaucucaaacaauucaaacaagacgcuaaauauucacauggaaucgacguaacagaucuauuugcugcacaaccuggucucacaucagcaguuauagaugcacuaccaagaaauaugguaauuacaugccaaggaagcgacgacauacgaaaacuccuagaaucacaaggucgaaaagauauaaaacucauugauauagcauuaaacaaaacagauucuagaaaauaugaaaacgcuguaugggaccaguacaaagacuuaugucacaugcacaccggaguaguuguagaaaagaaaaaacgaggcggaaaagaagaaauaacaccucacugugcccucauggauugcauaauguuugacgcugcaguaucaggaggacuaaacacuucaguauuaagagcaguauuaccaagagauaugguauucagaacauccaccccaagaguaguguuauaaggacuagucccuguucccagagcccacuuuuuuuucuuuuuuugaaauaaaauagccugucuuucagaucuaaaaaaaaaaaaaaaaaaaaaaaaaaaaaaaaaaaaaaaaaaaaaaaaaaaaaaaaaaaaaaaaugcaucccccccccccccccccccccccccccccccaaaggcucuuuucagagccaccagaauu

SEQ ID NO: 10038 - RNA, 1986 nt, Artificial Sequence
  mRNA product Design a-1 comprising derived and/or modified sequence from LASV(G733-SLE-2010;Clade IV)__AIT17155__NP (opt6)
gggagagucccgcagucggcguccagcggcucugcuuguucgugugugugucguugcaggccuuauucaagcuuaccaugucugcuaguaaagaaauuaaaucauuuuuauggacacaaucacuacgcagagaacuaucaggcuacuguucaaauauuaaacuacaaguaguuaaagacgcacaagcucuauuacacggguuagacuucucugaaguaagcaacguacaaagacucaugagaaaagaacgaagggacgacaacgauuuaaaaagacuacgagacuuaaaucaagcugucaauaaucuaguagaacuaaaaucaacacaacagaaaucaguauuaagaguaggaacguuaacauccgaugaacuucuaguuuuagcagccgaucuggaaaaacuaaaaucaaaaguaauacgaacagaaagaccccuaucggcaggaguauacaugggaaauuuaucaucacaacagcuagaucaacgaagagcucuccuaucaaugauaggcaugagcggaggaaaccaaggcgcacguacaggcagagacggagucguaagaguaugggacguaaaaaacgcugaacuacucaauaaccaauuuggcacaaugccaaguuuaacuuuagcuuguuuaacaaaacaaggacaaguagaccuaaaugaugccguacaagcacuaacugauuuaggauuaauauauacagcaaaauauccaaacacaucagaucuugauagacuaacacaaucccauccaauccuaaacaugauagacacaaaaaaaucuucauuaaauauaucagguuacaacuucagccuaggagcagcuguaaaagcuggcgccuguauguuagauggaggaaacaugcuugaaacaauaaaaguaucaccacaaacaauggacggaauauuaaaaucaauacuaaaaguaaaaaaagcacuagguauguuuauaagcgauacaccaggagaaagaaauccauacgaaaauauauuauacaaaauaugccuaaguggagauggauggccuuacauugcuucaagaacaucaauaaccggacgagcaugggaaaauacgguuguagaccuggaaucggauggaaaaccacaaaaagcaggcucaaacaauucaaauaaaagucuccaaucagcaggauuuacugcaggacuuacguauucucaacuuaugacauuaaaagaugcaaugcuacaauuagauccaaacgccaaaacguggauggacauagaaggaagaccagaagacccaguagaaauagcauuauaucaaccaaguagcggauguuacauacacuucuuuagagaaccaaccgauuuaaaacaauuuaaacaagacgcaaaauacagccacgguauagacguaaccgaccuauuugcagcacaaccaggauuaaccagugcaguuauagaugcauuaccaagaaauaugguaauaaccugucaaggaucagaugauaucagaaaacuauuagaaagucaaggaagaaaagacauuaaacuaauagauauugcgcucucuaaaauagacagucgaaaauacgaaaacgcagucugggaucaauauaaagauuuaugccacaugcauacaggaguaguaguagaaaaaaaaaaaagagguggaaaagaagaaauaacaccccacugugcacuuauggacuguaucauguuugacgcagccguaaguggaggauuaaauucauuaguacuaagagcaguauuaccaagagacaugguauuccguacaagcaccccacgaguaguauuauaaggacuagucccuguucccagagcccacuuuuuuuucuuuuuuugaaauaaaauagccugucuuucagaucuaaaaaaaaaaaaaaaaaaaaaaaaaaaaaaaaaaaaaaaaaaaaaaaaaaaaaaaaaaaaaaaaugcaucccccccccccccccccccccccccccccccaaaggcucuuuucagagccaccagaauu

SEQ ID NO: 10039 - RNA, 1986 nt, Artificial Sequence
  mRNA product Design a-1 comprising derived and/or modified sequence from MOPV/LASV reassortant(IGS-1;Clade IV)__AFY05578__NP (opt6)
gggagagucccgcagucggcguccagcggcucugcuuguucgugugugugucguugcaggccuuauucaagcuuaccauguccgcaucgaaagaaauuaaaucauuucuauggacucaaagccuuagaagagaauuaucaggauauuguucaaauauaaaacuacaagucgugaaagaugcacaagcauuacuccacggauuagauuucagcgaaguaucaaauguccaaagacuaaugagaaaagaaagaagagacgauaacgaucuaaaaagacuaagagaucuaaaucaagcaguaaacaacuuaguggaauuaaaaagcacacaacaaaaaagcauacuuagaguagguacacucacauccgacgacuuacuaauuuuggcagcagaucuagaaaaauuaagaaguaagguuaucagaaccgaaagaccucuuagcgcaggaguauauaugggaaaucuauccucucaacaacuagaucaaagaagagcauuauuaaacaugaucggaaugagcggaggaaaucaaggagcacgugcaggaagagacggagucguuagagugugggacguaaaaaacgccgaauuauuaucaaaucaguuuggaacaaugcccucauuaaccuuagcauguuuaacaaaacaaggacaaguagacuuaaacgacgcaguucaagcacucacagauuuaggauuaauauauacggcaaaauauccaaauacuuccgaccucgacagacuaacacaaucacacccaauccuaaacaugauagacacaaaaaaaucaucacuaaacauuagcggauauaacuuuucacuaggagcagcaguaaaagcaggugcauguauguuagauggagggaauauguuggaaacaaucaaaguaucaccacaaacaauggacggaauacuaaaaagcauauuaaagguaaaaaaagcacuaggcauguucaucucagacacgccaggagaacgaaacccauaugaaaacauuuuauauaaaauaugcuuaagcggagauggauggccauacauagcaucaagaacaaguauuaccggaagagccugggaaaauacuguaguagaucuagaaagcgacggaaaaccacaaaaagccgauucaaauaauaguagcaaaagucuacaaagugcaggauucacagcuggguuaaccuauucacaauugaugacacuaaaagacgcgaugcuucaacuagacccaaaugcaaaaaccuggauggauauagaaggaagaccagaagaccccguugaaauagcauuauaucaacccaguucaggauguuacauacacuuuuuucgagaaccaacagauuuaaaacaauucaaacaagacgcuaaauacucacauggaauugaugugacagauuuauucgcaacacaaccagggcuaacaagcgcagucauagaugcauuaccaagaaacaugguaauaacaugccaaggaagugaugacauaagaaaauuauuagaaucgcaaggaagaaaagacauaaaauuaauagacauagaccuuagcaaaacagacaguagaaaauacgaaaacgcaguaugggaccaauauaaagaccuaugccauaugcauaccggaguaguugucgaaaaaaaaaaacgaggugggaaagaagaaauaacaccacauugugcauuaauggacugcauuauguuugaugcagcaguaucaggaggauuaaacacaagcguauuaagagcaguauuacccagagauauggucuuccgcacaucaaccccaagaguaguauuauaaggacuagucccuguucccagagcccacuuuuuuuucuuuuuuugaaauaaaauagccugucuuucagaucuaaaaaaaaaaaaaaaaaaaaaaaaaaaaaaaaaaaaaaaaaaaaaaaaaaaaaaaaaaaaaaaaugcaucccccccccccccccccccccccccccccccaaaggcucuuuucagagccaccagaauu

SEQ ID NO: 10040 - RNA, 1986 nt, Artificial Sequence
  mRNA product Design a-1 comprising derived and/or modified sequence from LASV(LM765-SLE-2012;Clade IV)__AIT17815__NP (opt6)
gggagagucccgcagucggcguccagcggcucugcuuguucgugugugugucguugcaggccuuauucaagcuuaccaugagcgccuccaaagaaauaaaaucauucuuauggacucagucauuaagacgagaacuaaguggauacugcaguaauauaaaacuacaaguaguuaaagaugcacaagcuuuacuacacgggcuagauuuuucagaaguuucaaacguacaaagauuaaugagaaaagaaagacgagacgauaaugauuuaaaaagacuaagggaucucaaucaagcuguaaauaacuuaguggaauuaaaauccacacagcaaaaaucaauauuaagaguaggaacauuaaccagugaugacuuacuuauauuagcugcagaucucgaaaaauuaaaaucaaaaguaacaagaacugaaagaccacuaucagcaggaguauacaugggcaauuuaaguagucaacaauuagaucaaagaagagcauuauuagacaugauagguaugucaggaaguaaccaaggagcacgagcaggacgagacggaguaguaaggguaugggauguaaaaaacgcagaauuacuaaauaaccaauucgguaccaugccaucauugacacuagcauguuuaacuaaacaaggacaaguagaucuaaaugaugccguacaagcuuuaacagaucuaggccucauauacacagcaaaauauccaaauacaagcgaucuagauagacucacacagucacacccaauauuaaacaugauagauacaaaaaaaaguagcuuaaauauaagugguuauaacuuuaguuuaggagcagcaguaaaagcuggagccuguaugcuagacgguggaaauauguuagaaacuauaaaagucucaccgcaaacaauggaugguauacucaaaaguauacuaaaaguaaaaaaagcauuaggcauguucauaagcgaugcgccuggagaaagaaauccauacgaaaauauauuauauaaaauaugcuuaucaggagacggauggccguacauagcaaguagaacgucaauaacaggacgugcaugggaaaauacaguaguagauuuagaaagcgacgguaaaccgcaaaaagcaggaaguaacggaaguaauaaaaguuuacaaagugcaggauucacagcaggauuaacauauucacaauuaaugaccuuaaaagacgcaauguuacaauuagauccaaaugccaaaacauggauggauauagaaggacgacccgaagacccaguagaaauagcguuauaucaaccauccucaggauguuauauucacuuuuucagagaaccuacagauuuaaaacaauuuaaacaagacgcaaaauauagccauggaauagacguaacggaucuauuugcagcacaaccuggauuaaccagcgcaguuauagaugcauuaccuagaaauaugguaauuacaugucaagguagugaugacauacgaaaauuauuugaaucacaaggacgaaaagacauaaaacuaauagacauugcccucaguaaaacggacagcagaaaauaugaaaacgcaguaugggaccaauauaaagauuuaugccacaugcauacaggaauaguugucgaaaaaaaaaaacgagguggaaaagaagagauuaccccccacugugcacugauggauuguauaauguucgacgcagcggucucaggaggacuaaacacuucagucuuaagggccgucuuaccaagagauaugguauucagaacaucaacaccaagaguaguauuaugaggacuagucccuguucccagagcccacuuuuuuuucuuuuuuugaaauaaaauagccugucuuucagaucuaaaaaaaaaaaaaaaaaaaaaaaaaaaaaaaaaaaaaaaaaaaaaaaaaaaaaaaaaaaaaaaaugcaucccccccccccccccccccccccccccccccaaaggcucuuuucagagccaccagaauu

SEQ ID NO: 10041 - RNA, 1986 nt, Artificial Sequence
  mRNA product Design a-1 comprising derived and/or modified sequence from LASV(LM776-SLE-2012;Clade IV)__AIT17825__NP (opt6)
gggagagucccgcagucggcguccagcggcucugcuuguucgugugugugucguugcaggccuuauucaagcuuaccaugucagcaaguaaagaaauaaaaaguuuuuuauggacccaaucacuacgacgagaacuaucaucauauugcucgaacauaaaauuacaaguaguaaaagaugcacaagcucuacuacaugguuuagacuuuucugaaguuucaaauguacaaagauuaaugagaaaagaaagaagagaugauaacgauuuaaaaagacuaagagaucucaaucaagcagucaauaaccucguugaacucaaauccacacaacaaaaaucaauucuaagaguaggcacuuuaaccucagaugacuuacugauacucgcagcagauuuagaaaaacuaaaaaguaaaguaacacgcaccgaaagaccacuaagugcuggaguauauauggguaaucuaaguucgcaacaauuagaccaaagaagagcucuucuauccaugauagguaugucaggaucaaaucaaggagcaagagcagguagagauggaguaguaagaguaugggacguaaaaaaugcagaacuucuaaauaaccaauucggaacaaugccaucacuuacauuagcuugccucacaaagcaaggacaaguagaccuaaaugaugcaguacaagcucuaacagacuuaggcuugauauauacagcaaaauauccaaauacuucagauuuagaucgauuaacacaaagucacccaauauuaaauaugauagauacuaaaaaaucaucauugaauauaucaggauacaauuuuagccuaggagcagcugucaaagccggagcauguauguuagacggaggcaauaugcuagaaacaauaaaaguuaguccucaaacaauggauggaauauuaaaaaguauacuaaaaguuaaaaaagcauuaggcauguuuauaagcgauacucccggagaaagaaauccauaugaaaauauauuauacaaaauaugucuaucuggagauggauggccauauauagcaagcagaacuagcauaacuggaagagcaugggaaaacaccguaguagaucuagaaucagauggaaaaccccaaaaagcaggaucgaacaauucaaauaaaagucuacaaagugcaggauuuacagcaggacuuacauauucacaacuaaugacccuaaaagaugcaaugcuacaauuagaccccaaugccaaaacauggauggacauagaaggaagaccagaggacccaguugaagucgcccuauaucaaccaucaucagguuguuauauacacuucuucagagaaccaacagaucuaaaacaauuuaaacaagacgcuaaauacagucaugguauagacguaacagaucuauuugcagcacaaccaggcuuaaccagugcaguuaucgaugcuuuaccaagaaacaugguuauaaccugucaaggaucagaugauauucgaaaacuucuagaaucucaaggaagaaaagauauuaaacuuauagauauagcacuaucgaaaacagauucccgaaaauaugaaaacgccguaugggaucaauauaaagaccucugucacaugcacacagguguagucguagaaaaaaaaaaaagaggaggaaaagaggaaauaaccccacacugugcacuaauggauugcauaauguuugacgcagcaguaucaggaggauuaaauacaucaguacuaagagcaguauuaccaagagacaugguuuuuagaacaucaaccccucgaguaguauuauaaggacuagucccuguucccagagcccacuuuuuuuucuuuuuuugaaauaaaauagccugucuuucagaucuaaaaaaaaaaaaaaaaaaaaaaaaaaaaaaaaaaaaaaaaaaaaaaaaaaaaaaaaaaaaaaaaugcaucccccccccccccccccccccccccccccccaaaggcucuuuucagagccaccagaauu

SEQ ID NO: 10042 - RNA, 1986 nt, Artificial Sequence
  mRNA product Design a-1 comprising derived and/or modified sequence from LASV(Mad39;Clade IV)__ANH09723__NP (opt6)
gggagagucccgcagucggcguccagcggcucugcuuguucgugugugugucguugcaggccuuauucaagcuuaccaugagcgcaucaaaagaaauaaaaucauuccuauggacccaaagccuaagacgagaacuaucagguuauugcucaaacauaaaauuacaaguuguaaaagacgcacaagcacuauugcacggacuagacuucucagaaguaucaaacguacaaagacuaaugagaaaacaacgaagagacgauaaugaucuaaaaagauuaagagaccuaaaucaagcaguaaacaaucucguagaacuaaaaucaacacaacaaaaaucaguauuaagaguaggaacacuaacaagugaugacuuauuaacccuagcugcagacuuagaaaaauuaaaaaguaaagucacaagaacagagaggcccuuaacugcaggaguguauaugggaaaucuaaguagucaacaauuagaucaacggagagcauuacuaaacaugauaggaaugucaggaggcaaucaaggagcacgaacuggaagagacggaguaguaagaguaugggacgucaaaaacgcagaguuauuaaauaaucaauucggaacaaugccaucauuaacguuagcauguuuaacaaaacaaggccaaguagacuuaaacgauguaguacaagcccuaaccgaucuagggcuaauauacacagcaaaauacccaaauacaagugaucuagacagacucacucagucucacccaauauuaaacaugauagauacaaauaaaaguucauuaaacauuucaggauacaauuucagccucggagcagcaguaaaagcaggcgcauguaugcuagacggcggaaauaugcucgaaacgauaaaagucucaccucaaacaauggauggaauacuaaaauccauacucaaaguaaagaaaaguuuaggcauguuuaucuccgauacaccaggagaaagaaacccauaugaaaacauacuauauaaaauauguuuaagcggagauggauggccauacauagcaaguagaacaucuauaacaggcagagcaugggaaaacacaguuguagacuuagaaucaggaggaaaaccacaaaaagccggaucaaacaauagcaauaaaagccuucaaucagcaggauucgccgcaggccuaacauauagccaacuaaugacauuaaaagaugcaauguuacaacuagacccaaaugcaaaaacauggauggacauagaagggagaccagaagacccaguagaaauugcucuauaucaaccaauaaguggauguuacauacacuucuuuagagaaccaacagauuuaaaacaauucaaacaagacgcaaaauacagucaugguauagacguaacagauuuauucgcagcgcaaccagggcuuacaucugcaguaauagaagcauuaccaagaaacaugguaauaaccugucaaggaagugaugacaucagaaaacuauuugaaucacaagggagaaaagauaucaaauuaauagauaucgcguuaucaaaaacagauucaagaaaauacgaaaacgcaguaugggaccaauacaaagaccuaugccauaugcauacaggcguaguaguagaaaagaaaaagaaaggcggaaaagaggaaauaacaccgcacugcgcauuaauggacuguauaauguuugaugcagcagucucaggaggauuaaacacccuaguauuaagagcaguauuaccaagagacaugguauucaggacaucgacaccaaaaguuguacuauaaggacuagucccuguucccagagcccacuuuuuuuucuuuuuuugaaauaaaauagccugucuuucagaucuaaaaaaaaaaaaaaaaaaaaaaaaaaaaaaaaaaaaaaaaaaaaaaaaaaaaaaaaaaaaaaaaugcaucccccccccccccccccccccccccccccccaaaggcucuuuucagagccaccagaauu

SEQ ID NO: 10043 - RNA, 1986 nt, Artificial Sequence
  mRNA product Design a-1 comprising derived and/or modified sequence from LASV(Z0947-SLE-2011;Clade IV)__AIT17841__NP (opt6)
gggagagucccgcagucggcguccagcggcucugcuuguucgugugugugucguugcaggccuuauucaagcuuaccaugucagccucaaaagaaauaaaaucauuucuauggacacaaucauuacgucgagaauuaucaggauacugcucaaacauaaaacuacaaguugucaaagacgcacaagcccuacuacacggacuagauuuuagugaaguaagcaacguccaacgauuaaugagaaaagaacgcagagacgacaacgaccuaaaaagacucagagaucuaaaucaagcaguaaacaaccuaguggaacuuaaaagcacccaacaaaaauccauauuaagaguaggaacacuaacaucugaugauuuauuaauacuagcugcagaucuggaaaaguuaaaaucaaaaguaacaagaaccgaaagaccacuaucagccggaguauauaugggaaaucuaucaagucaacaauuagaucaacgaagagcacuacuaaacaugauaggaaugucuggaucaaaucaaggagcaagaaccggaagagacggugucguaagaguaugggacguaaaaaaugcagaacuacuaaauaaccaauuuggaaccaugccaucauuaaccuuagcaugucuaaccaaacaaggacagguugauuuaaaugaugcuguacaagcacuaaccgaccuuggauuaaucuauacagcaaaauauccaaauacuucggacuuagauagacuaacacaaucucacccaauacuaaacaugaucgacacaaaaaaaucaucacuaaacauaucaggauauaauuucucacuaggagcggcaguaaaagccggagcaugcauguuagacggaggaaacaugcuagaaacaaucaaaguaaguccacagacaauggacggaauucuaaaaucaauacucaaaguaaaaaaagcacuaggaauguuuauaucugacgcaccaggagaaagaaauccauacgaaaauauacuauacaaaaucugccuaucaggugacggauggccauacaucgcaucaagaacaucaauaacaggacgagccugggaaaauaccguaguagauuuagaaucagauggaaaaccacaaaaagcuggaucaaacggaucaaauaaaucauuacaaucagcagguuucacagcaggacuuacauacucacaguuaaugacacucaaagaugcuaugcuucaacuagaucccaaugcaaaaacauggauggacauugaaggaagacccgaagaucccguagaaauagcucuauaucaaccaagcucaggauguuacauccacuuuuuuagagaaccaacagacuuaaaacaauucaaacaagacgccaaauacucccacggcaucgauguaacagaucuauuugcagcucaaccaggacuuacaucagcaguaauagaugcauuaccaagaaacaugguaauaacuugccaaggaucagacgacauaagaaaacuauucgaaucucaaggacgaaaagacaucaaguuaauagauauagcacuaucuaagacagauucucgaaaauaugaaaaugcaguaugggaucaauacaaagauuuaugccacaugcauacaggcaucgucguagaaaaaaaaaaaagagguggaaaagaagaaauaacaccucauugcgccuuaauggacugcauaauguuugacgcugccguaucaggaggauuaaauacaaguguauuaagagcaguucuaccacgugacaugguauucagaacaucaacaccaagaguuguuuuauaaggacuagucccuguucccagagcccacuuuuuuuucuuuuuuugaaauaaaauagccugucuuucagaucuaaaaaaaaaaaaaaaaaaaaaaaaaaaaaaaaaaaaaaaaaaaaaaaaaaaaaaaaaaaaaaaaugcaucccccccccccccccccccccccccccccccaaaggcucuuuucagagccaccagaauu

SEQ ID NO: 10044 - RNA, 1986 nt, Artificial Sequence
  mRNA product Design a-1 comprising derived and/or modified sequence from LASV(Josiah;Clade IV)__NP_694869__NP (opt11)
gggagagucccgcagucggcguccagcggcucugcuuguucgugugugugucguugcaggccuuauucaagcuuaccaugucagccagcaaagaaauaaaaucauuccucuggacacaaucacuccgccgcgaacucucaggguauugcucaaacauaaaacuccaaguagucaaagacgcccaagcccuccuacacggacuagacuucucagaaguaagcaacguccaacgccuaaugagaaaagaacgcagagacgacaacgaccucaagaggcucagagaccuuaaccaagcggucaacaaccuugucgaacucaaaagcacacaacagaaauccauacuacgagucggcacacuaaccagcgacgaccuccugauccucgcagccgaccucgagaaacuaaaaagcaaagucauccgaacagaaaggccccucuccgccggagucuacaugggaaaccuaagcucccaacaacucgaccaacggcgagcccuccucaacaugaucgggaugucgggcggcaaucagggcgcccgcgccggccgggacggcgucguacgagucugggacgucaaaaacgcagaacuccuuaacaaccaguucggcaccaugcccagccuaacacucgccugccugaccaaacaaggccaaguggaccucaacgacgcagugcaagcccucaccgaccuaggccugaucuacaccgcgaaauacccaaacaccuccgaccuagaccgccugacacaaucgcaccccauacucaacaugaucgacaccaaaaaaucuucgcuaaacaucucaggauacaacuucucccucggagccgcggucaaagcaggagccugcaugcuggacggcggaaauaugcuggaaaccauaaaaguaagcccccagaccauggacggcauccugaaaucaauccugaaagucaaaaaagcccuuggcauguucaucagcgauaccccgggcgaacgcaauccauacgaaaacauccuguacaaaauaugcuuaucaggcgacggcuggcccuacaucgcauccagaacuucgaucacaggccgagcaugggaaaacaccgucgucgaccuagaauccgacggcaaaccucaaaaagcggacagcaacaacucauccaaaagccuacaaucggcaggcuucaccgccggccucacguacucccaacucaugacccucaaagacgccaugcuacagcuagacccaaacgcaaaaaccuggauggacaucgaaggccggcccgaagaccccgucgaaaucgcucucuaccaaccaagcagcgguugcuacauacacuucuucagggaacccaccgaccucaagcaauucaaacaagacgcuaaauacucccacggaaucgacgugaccgaccucuucgcgacacagcccggccucaccagcgcaguaauugacgcacugccaagaaacaugguaauaacaugccaaggaagcgacgacauacgaaaacuccucgaaucacaaggacgcaaagacaucaaacucaucgacaucgcgcucuccaaaacggacagccgcaaauaugagaaugccguaugggaccaauacaaagaccucugccacaugcacaccggaguaguaguagaaaaaaaaaaaagaggagggaaagaagagauaaccccccacugcgccuuaauggauugcaucauguucgaugcagcagugagcggcggccucaacaccuccguccuccgagcaguccuuccgcgcgacaugguauucagaaccuccacaccaagagucguacucuaaggacuagucccuguucccagagcccacuuuuuuuucuuuuuuugaaauaaaauagccugucuuucagaucuaaaaaaaaaaaaaaaaaaaaaaaaaaaaaaaaaaaaaaaaaaaaaaaaaaaaaaaaaaaaaaaaugcaucccccccccccccccccccccccccccccccaaaggcucuuuucagagccaccagaauu

SEQ ID NO: 10045 - RNA, 1986 nt, Artificial Sequence
  mRNA product Design a-1 comprising derived and/or modified sequence from LASV(LP;Clade I)__AAF86702__NP (opt11)
gggagagucccgcagucggcguccagcggcucugcuuguucgugugugugucguugcaggccuuauucaagcuuaccaugucaaacuccaaagaaaucaaauccuuccucuggacccaaucacuccgccgcgaacuauccggauacugcucaaacaucaaacuucaaguaguaaaagaugcacaagcccuccuacacggccucgacuuuucagagguaucaaacguccaacgacucaugcguaaacaaaaacgagacgacgcugaccuuaaacgauuacgcgaccuaaaccaagccgugaacaaccuugucgaacucaaauccacccaacagaaaaacguccuccgcguaggcacccucagcuccgacgaccucaucacucucgcugccgaccucgaaaaacuaaaauccaaaguaauccgaaccgaacggccccucuccagcggcguauacaugggcaaccugucaagucaacagcucgaccaacgcagagcccucuugucgaugaucggaauguccggaggaccccaaggcaacagaaccggcggcgacggcguaguacgugucugggacgugaaaaacgccgaacuacuuaacaaccaguuugggacgaugcccagccucacccucgccugccucaccaaacaaggccaagucgaccucaacgacgccguccaagcacucacagaccuuggacucaucuacaccgcaaaguaccccaacuccucggaccuugacaugcugacacaaucacacccaauacugggcaugguugauaccaagaaaagcagccuaaauaucucagguuacaacuucucgcucggagccgcagucaaagccggagccugcaugcucgacggaggcaauaugcuagaaaccauaaaagucucaccccaaacuauggacggcauccucaaaucaauccucaaagucaaaagaucccuuggcauguucaucuccgacacccccggugaacgaaacccuuacgaaaacauacucuacaaaaucugccuauccggcgaaggauggccuuacaucgccagucgcaccuccaucaccggccgcgccugggaaaacacccuagucgaucuugaauccgacaacaaacccccuaaacuaaacucggccggcagcaacaaaucccuccaagccgccggacuaaacgccggacucaccuacagccaacucaugacccuaaaagauugcaugcuccaacucgacccaucaucuaagacauggauagacaucgaaggacgccccgaagacccagucgagaucgcccucuuccaacccuccucaggcugcuacauccacuucuuccgcgaacccaccgaccuaaagcaauucaaacaagacgcaaaauauucacacgguauagacgucacagaccuauucucgacccaaccaggccugaccucugcggucauagaagcacuccccagaaacaugguccuaaccugccaaggcucagacgacauuaagaaacuacucgaaagccaaggccgccgcgauaucaaacuaaucgacaucucccuauccaaagccgacucacgaaaauucgaaaacgcagucugggaccaguacaaagaccugugccauaugcacacaggcgucguagucgaaaagaagaaacgcggaggaaaagaagaaauuacaccccacugcgcccuacucgacugcaucauguucgacgccgccaccacuggcucccuaaacaucaccacccuccgagccguacuaccccgcgacaugguauuccgaaccuccacccccaaagucguacuuuaaggacuagucccuguucccagagcccacuuuuuuuucuuuuuuugaaauaaaauagccugucuuucagaucuaaaaaaaaaaaaaaaaaaaaaaaaaaaaaaaaaaaaaaaaaaaaaaaaaaaaaaaaaaaaaaaaugcaucccccccccccccccccccccccccccccccaaaggcucuuuucagagccaccagaauu

SEQ ID NO: 10046 - RNA, 1986 nt, Artificial Sequence
  mRNA product Design a-1 comprising derived and/or modified sequence from LASV(803213;Clade II)__AAF86704__NP (opt11)
gggagagucccgcagucggcguccagcggcucugcuuguucgugugugugucguugcaggccuuauucaagcuuaccauguccgcaagcaaagaagucaaaucauuccucuggacccaaucacuccgccgagaacucucgggcuacugcucaaacaucaaacuacaagucguaaaagacgcccaagcccuccuccacggucucgacuucuccgaagucaacaacguacagcgccucaugcgaaaacaaaaacgcgacgacggcgaccuuaaacgacuacgagaccuaaaccaagccguaaacaaccucgucgaacugaaauccacccaacaaaaaucaauccugcgaguugguacccucacauccgacgaccuccuaacacuagcagccgaccucgaaaaacucaaguccaaagucauacgcaccgaacgcccacucaguuccggcguauacaugggcaaccucucuacccaacaacucgaacaacgccgcgcgcuccuaaauaugaucgguaugguagguggagcccaaggcacccaaccaggccgcgacggcgugguacgcgucugggacgugaaaaaccccgaucucuuaaacaaucaauucggcacaaugcccucccucacacuagcaugccugaccaaacaaggacaagucgaccuaaaugacgccguccuagcucuuacagaccuaggacucaucuauaccgccaaauacccuaacuccuccgaccucgaccgacucucacaaucucacccaauccuaaacauggucgacaccaagaaauccucccucaacaucucgggauacaacuucagccucggcgccgccgucaaagcaggcgccugcaugcuagacggcggcaacaugcucgaaaccaucaaaguaacgccccaaaccauggacggcauccucaaauccauccucaaggucaaaagaagccucggcauguucguuucggacacucccggcgaacgcaaccccuacgaaaacauccuauacaaaaucugccuaucaggcgacggcuggcccuacauagcaucacgaaccaguaucguaggccgagcaugggaaaauaccacaguagaccucgaguccgacggaaaaccucaaaaagucggcacugccggaucaaacaaaucccuccaaagcgccggcuucccaaccggccuuaccuauucccaacuaaugacccucaaagauuccaugaugcaauuagaccccuccgccaagacauggaucgacaucgaaggccgucccgaagacccaguagaaaucgcccucuaccaacccaugagcggaugcuacauucacuuuuucagagaacccaccgaccucaaacaauucaaacaagacgccaaguacucccaugggauagacgucgccgaccucuuccccgcccaacccggccucaccucggccguaauagaggcccuaccaagaaacaugguccuaaccugccaagguuccgacgacaucaagaaacuccucgacucacaaggcagacgcgacaucaaacuaaucgacaucucccucuccaaagucgacucacgaaaauucgaaaacgccgucugggaucagugcaaagaccucugccacaugcacacaggcgucgucgucgaaaagaagaaacgaggcggaaaagaagaaauaacaccacacugcgcccucauggauugcaucauguucgacgccgccguaucuggcgggcuaaacauuccaguccugcgagccguccucccccgcgacaugguauuccgcaccuccuccccaaaagucguccucugaggacuagucccuguucccagagcccacuuuuuuuucuuuuuuugaaauaaaauagccugucuuucagaucuaaaaaaaaaaaaaaaaaaaaaaaaaaaaaaaaaaaaaaaaaaaaaaaaaaaaaaaaaaaaaaaaugcaucccccccccccccccccccccccccccccccaaaggcucuuuucagagccaccagaauu

SEQ ID NO: 10047 - RNA, 1989 nt, Artificial Sequence
  mRNA product Design a-1 comprising derived and/or modified sequence from LASV(GA391;Clade III)__CAA36646__NP (opt11)
gggagagucccgcagucggcguccagcggcucugcuuguucgugugugugucguugcaggccuuauucaagcuuaccauguccgcaagcaaagaagugagauccuuccucuggacccaaucgcuccgccgcgagcucucaggcuacugcucgaacaucaaauuacaagucgucaaagacgcacaagcccuccuacacggacucgacuucucagaaguguccaacguccaacgacugaugaggaaacaaaagagagacgacggcgaccuaaaacgacuacgcgaccuaaaccaagccgucaacaaccuagucgaacuaaaauccacacaacaaaaaucaguccuucgcguaggaacccuaucaucagacgaccuccucauccucgcagccgaccuagaaaaacugaaaucaaaaguaacacgaaccgaacggccacucuccagcgggguauacauggggaaccucuccucccaacaacuugaccaaagacgcgcucuccuuaacaugaucggcaugacaggcgugagcggagguggcaaaggcgcaucggacgggaucguccgcguaugggacgucaaaaacgccgaacuacucaacaaccaauucggaaccaugccaucccucacacucgccugccucaccaagcaaggacaaguggaccuaaacgacgccguccaagcccucaccgaccucggccucaucuacaccgcgaaauacccaaacagcucggauuuggaccgacuaucccaaucccacccaauacuaaacaugaucgacaccaagaaauccagucuaaacaucuccggcuacaacuucucccucggagccgcggucaaagccggcgccuguaugcuggacggcggcaacaugcuagaaaccaucaaagucucuccccaaaccauggacgguauccucaaauccauccugaaagucaagaaaagccucggcauguucgucucagacacaccgggagaacgcaaccccuacgaaaacauccuguacaaaaucugucucucaggcgacggcuggcccuacaucgccagccggaccagcaucguaggcagagccugggaaaacaccguaguagaccucgaacaagacaacaaaccccagaaaauaggaaacggcggcucaaacaaaucacuccaaagcgccggauucgccgccggacugaccuacagccaacuaaugacccuaaaagacuucaaaugcuucaaccucauacccaaugccaaaacauggauggacauagaaggacgacccgaagacccaguagagaucgcccucuaucaaccuuccucaggauguuacguccacuucuucagagagcccaccgaccugaaacaguucaaacaagacgccaaauacucacacggcaucgacgucacagaccuauucgccgcccaacccggccugaccuccgccgucaucgaagcccucccacgcaacauggucauaacaugccaaggcuccgaagacaucagaaaacuacucgaaucccaaggccgccgcgacauuaagcuaauagacauaacccuauccaaagccgauagccguaaauucgaaaacgcagucugggaccaauuuaaagaccuaugccacaugcacaccggcgucgucguggaaaagaagaaacgaggcggcaaagaagaaaucacaccccacugcgcccucauggacugcaucauguucgacgccgccguuucgggcggccucgacgccaaaguccuacgcgucguccuaccccgagacauggucuuccgcaccagcacgcccaaaguaguccucuaaggacuagucccuguucccagagcccacuuuuuuuucuuuuuuugaaauaaaauagccugucuuucagaucuaaaaaaaaaaaaaaaaaaaaaaaaaaaaaaaaaaaaaaaaaaaaaaaaaaaaaaaaaaaaaaaaugcaucccccccccccccccccccccccccccccccaaaggcucuuuucagagccaccagaauu

SEQ ID NO: 10048 - RNA, 1986 nt, Artificial Sequence
  mRNA product Design a-1 comprising derived and/or modified sequence from LASV(AV;Clade V)__CCA30315__NP (opt11)
gggagagucccgcagucggcguccagcggcucugcuuguucgugugugugucguugcaggccuuauucaagcuuaccaugagcgcauccaaagaagucaaaagcuuccucuggacacaaucccuacggcgcgaacuauccggcuacugcucuaacaucaaacuccaagucguuaaagacgcccaagcccuccuccacggacucgacuucuccgaaguuuccaacguacaaagacuuaugcgaaaacagcgccgcgacgacucagaccuaaaacgacugcgcgaccuaaaccaagcaguaaacaaucucgucgaacucaaaagcacccaacaaaaaucaguucuccgcgucggcacucucuccuccgacgaccuccucacccuagccgcugaccuagaaaaacugaaauccaaagucaccagaaccgaacgaccccucuccucaggcgucuacaugggaaaccucaguucacaacaacucgaccaacgccgagcccuccuaaaccugaucggaaugacaaacggaagccaaggcucacaagcaggcagagacggcgucgugcgcgucugggacgucaaaaacgcggaacuccuaaacaaccaauucggcaccaugcccucacugacccucgcuugccuuaccaaacaaggccaaguagaccucaacgacguuguccaagcacuuaccgaccuaggacugauauacacugccaaauaccccaacaccuccgaccucgaccgccuaacccaaagccaccccauucuaaacaugaucgacacgaaaaaauccucauuaaacaucuccggauacaacuucucacugggagcagcaguaaaagcaggggcauguaugcucgacggcggaaacaugcucgaaaccaucaaggucagcccccaaagcauggacggcauucuaaaaucaauccuaaaaguaaaacgcgcccuaggaauguucguauccgacacccccggcgaacgcaaccccuacgaaaacauacucuauaaaaucugccuaucaggcgacggcuggcccuacauagccucccgcaccucgaucgucggcagagccugggaaaacaccguagucgaccucgaaaccgacggaaaaccacaaaaaauaggcuccggaaacagcaacaaaucucuccaaagcgcaggauucuccgccggccugaccuacagccaacucaugacccucaaagacgccaugcuccaacucgacccuaacgcaaaaaccuggauggacaucgaaggacgccccgaagaccccguagaagucgcccuauaccagccuaucuccggcuguuacauccacuucuuccgcgaacccacagaccuaaagcaauucaaacaagacgccaaauacagccacggcaucgacauagccgaccucuucgccgcucaaccuggccuaaccucugccgucaucgaagcccucccacgcaacauggucaucacaugccaaggcagcgaggacaucaaaaaacuccuagaaucccaaggccguaaagacaucaaacugauagacaucgcacuauccaaaaucgacucccggaaauucgaaaacgcggucugggaccaguauaaagaccucugccauaugcacacuggagucgucguagaaaaaaaaaaaagaggcggaaaagaagaaaucacgccacacugcgcccuuauggacugcauaauguucgacgcagcugucagcggcggccucaacacucucguccucagagccguccucccccgagauauggucuuccgcaccucaacaccccgcguaguccucuaaggacuagucccuguucccagagcccacuuuuuuuucuuuuuuugaaauaaaauagccugucuuucagaucuaaaaaaaaaaaaaaaaaaaaaaaaaaaaaaaaaaaaaaaaaaaaaaaaaaaaaaaaaaaaaaaaugcaucccccccccccccccccccccccccccccccaaaggcucuuuucagagccaccagaauu

SEQ ID NO: 10049 - RNA, 1986 nt, Artificial Sequence
  mRNA product Design a-1 comprising derived and/or modified sequence from LASV(Togo/2016/7082;Clade VI)__AMR44578__NP (opt11)
gggagagucccgcagucggcguccagcggcucugcuuguucgugugugugucguugcaggccuuauucaagcuuaccauguccaacucuaaagaagucaaaucauuccucuggacccaaucacuccgccgcgaacucuccgguuacugcuccaauauaaaacugcaaguagucaaagacgcacaagcucuccuccacggccucgauuuuuccgaaguguccaacguccaacgacucaugagaaaacaaaaacgagacgacggcgaccucaaacgacugcgcgaccuaaaccaagccgucaacaaccuugucgaacuaaaaucaguccagcagaaaucaauucugcgcgucggcacacucacuuccgacgaccuacucacccuagcagccgaucucgaaaaacuuaaaucaaaagucacucguaccgaacgcccacuauccagcggcgucuacauggggaaccucagcucacaacaacucgaccaaagacgagcauuacucuccaugauaggaaugucaggcggcaaccaaaacucacaacccaaaggcgacggggucguccgcgucugggacgucaaaaacgccgaccuucucaauaaccaauucggcacaaugcccucacucacccucgcaugccuaaccaagcagggucaagucgaucucaacgacgccguccaggcacuaacagaccuaggacucaucuacaccgccaaauaccccaacuccucugaccucgaccgccucucacaaucacaccccauccugaacaugaucgacaccaagaaaucaagccucaacauuuccggcuacaacuuuucucuaggugcggccaucaaaacaggcgccuguaugcucgacggcggcaacaugcucgaaaccaucaaaguaacaccccaaaccauggacggcauacucaaauccauccucaaaguaaaacgaucccuagggauguuuaucuccgacacacccggcgaacgcaaccccuacgaaaauauccuauacaaaaucugccuaucuggcgacggauggccauacaucgccucacgaaccgccaucauaggccgggccugggaaaacaccguagucgaccucgaauccgacagcaaaccccagaaaauaggcucuaacggauccaacaaaucacuacaauccgcaggcuucgccccaggccucaccuauagccaacuaaugacccucaaagacagcaugcuccaacuugacccaaacgccaaaacauggaucgacaucgaaggacgcccagaagacccaguagaagucgcccucuuccaacccauaucgggcugcuacauccacuucuuccgcgagccaacagaccucaaacaauucaagcaagacgccaaauacucccacggaauagacgucaccgaccuauucgcagcacaacccggucucacauccgccguuaucgaggcccucccccggaacaugguccugaccugccaaggauccgacgacaucaagaaacuccucgacagucaaggacguagagacauaaaacuuauagacgucucccuaaacaaaaucgacagccgcaaauucgaaaacgcagucugggaccaauacaaggaccuaugccauaugcacaccggcgucgucgucgaaaagaaaaagaaaggcggcaaagaagaaaucacgccccacugcgcccuacuagacugcaucauguucgacgcugccgucucgggaggccucaacgcaaccguacuccgugccguacucccccgcgacaugguauuccggaccucuuccccaaaagucgucuuauaaggacuagucccuguucccagagcccacuuuuuuuucuuuuuuugaaauaaaauagccugucuuucagaucuaaaaaaaaaaaaaaaaaaaaaaaaaaaaaaaaaaaaaaaaaaaaaaaaaaaaaaaaaaaaaaaaugcaucccccccccccccccccccccccccccccccaaaggcucuuuucagagccaccagaauu

SEQ ID NO: 10050 - RNA, 1986 nt, Artificial Sequence
  mRNA product Design a-1 comprising derived and/or modified sequence from LASV(KAK-428;Clade n.d. (VII))__ANH09741__NP (opt11)
gggagagucccgcagucggcguccagcggcucugcuuguucgugugugugucguugcaggccuuauucaagcuuaccaugagcaacucaaaagaagucaaaucauuccucuggacccaaucacuccgcagagaauuauccggcuacugcaccaacaucaaacuccaaguagucaaagacgcccaagcccuacuacacggucucgacuucuccgaagucagcaauguccaacgacucaugcgaaaacaaaaacgugacgacaacgacuuaaaaagacucagagaccugaaccaagccguaaacaaccuagucgaacucaaaucgguccaacaaaaauccgugcuaaaagugggcacccucaacucagacgaccuuuuaacacucgccgccgaccucgaaaaacugaaaucgaaagucguccgaaccgaacgcccccucuccuccggcguauacaugggcaaccuauccucacaacaacucgaccaacgccgugcgcuccuaaacaugaucgguauggccggaggcagccaaggcaaccaacccucccgagauggagucgugcgagucugggacgucaaaaacgccgaccuucucaacaaccaauucgguacaaugccaucacucacgcuagccugccuaaccaaacagggacaaguagaccucaacgacgucguccuagcccuuacagaccuaggccugauauacaccgccaaauacccaaacuccuccgaccucgaccgcuuaagccaaaaccacccaguacuaaacaugaucgacgucaacaaaucaucccucaacauauccggcuacaacuucagccucggcgcagccgucaaggccggugcaugcaugcucgacggcggaaacaugcuagaaacuaucaaaaucagcccccaaaccguagacggcauacuaaaauccauacucaaagugaaacgugcacuaggcauguucguauccgacaccccaggagaacgaaaccccuacgaaaacauccuuuacaaagucugccuaucaggaaacggcuggcccuacaucgcaagccgcacaucaaucgucggcagagccugggaaaacaccguagucgaucuagagucgaacaaaaaccaaccuaaagucgguaauaacggauccaacaagaugcuucaauccuccggcuucgccaccggccucaccuacucccaacucaugacacuacgggacuccaugcuccaacucgaccccaccgcaaaaaccuggauugacaucgaaggccgccccgaagacccuguugagcucgcacuauuccaaccauccuccggcugcuacauacacuucuuccgcgaaccuacagaccucaagcaauucaaacaggaugccaaauacagccacggcaucgacgugaacgaccuauucucggcccaacccggccuaaccagugccguccuagaagcccucccacgcaacaugguccuaaccugccaagggagcgacgacauccgcaaacuccucgacucacaagaccgcaaagacauaaaacucaucgacaucucccucagcaaggccgacgcccgcaaauucgaaaacgacguaugggaccaauucaaagaccucugccacaugcacaccggcaucguaguagaaaagaagaagaaaggcggaaaacaagaaaugaccccucauugcgcccuccuagacugcaucauguucgacgcagcugugagcggcggccucaacguccccacccucagagcaguccuaccaacagacauggucuuccgcaccauaaccacaaaaguaguacuauaaggacuagucccuguucccagagcccacuuuuuuuucuuuuuuugaaauaaaauagccugucuuucagaucuaaaaaaaaaaaaaaaaaaaaaaaaaaaaaaaaaaaaaaaaaaaaaaaaaaaaaaaaaaaaaaaaugcaucccccccccccccccccccccccccccccccaaaggcucuuuucagagccaccagaauu

SEQ ID NO: 10051 - RNA, 1986 nt, Artificial Sequence
  mRNA product Design a-1 comprising derived and/or modified sequence from LASV(Pinneo-NIG-1969;Clade I)__AIT17837__NP (opt11)
gggagagucccgcagucggcguccagcggcucugcuuguucgugugugugucguugcaggccuuauucaagcuuaccauguccaauuccaaagaaaucaaauccuuccucuggacacaaucacuccgccgagaacucucaggauacugcucaaacaucaaacuacaaguagugaaagacgcacaagcccuucugcacggucucgauuucucagaagucuccaacguacaacgccucaugagaaaacaaaaacgcgacgacgcagaccucaaacgacuccgagaccuaaaccaagccgucaacaaccucgucgagcucaaauccacccaacagaaaaacguacuccgagucggaacccucagcucagacgaccucaucacgcuagcggcagaccucgaaaaacuuaaaagcaaagucauccgcacagagcgcccacuauccuccggagucuacauggggaaccucuccucccaacaacucgaccaacgccgcgcccuccucucuaugaucgguauguccggcggcccacaaggaaaucgcaccggcggagacggaguaguacgcguaugggacgucaaaaacgcagaacuccuuaacaaccaauucggaacaaugccaucccugacccuggcaugccuaacaaaacaaggccaaguagaccuaaacgacgcaguacaagcucucacagaccuaggccucaucuacaccgcaaaauaccccaacucguccgaccucgacaugcuuacccaaucccacccaauccucggaaugguagacacgaaaaagagcucccuaaacaucagcggauauaacuucucgcugggcgccgcggucaaagcgggcgccugcaugcuggacggcggaaacauguuagaaaccaucaaggucucgccccagacaauggacgggauacuaaaauccauucuuaaagucaaacgcucucuaggcauguucaucuccgacacccccggcgaacgcaacccauacgaaaauauacuauacaaaaucugucucagcggugaaggcuggcccuacauagccagcagaaccagcaucaccggacgcgcgugggaaaacacacucgucgaccucgaaucagacaacaagccacccaagcucaacucagcaggguccaacaaaucacuacaagcagccggccucaacgccggccuaaccuacucccaacuaaugacccucaaagacugcaugcuccaacuugaccccagcuccaaaaccuggaucgacaucgaaggacgccccgaggacccagucgaaauagcccuauuccaacccuccagcggaugcuacauacacuucuucagagaaccaacagaccucaaacaauucaagcaagacgccaaauauucucacggcaucgacgugaccgaccucuucuccacacagcccgggcucaccagugcagucauagaagcccucccacgaaacaugguacucacaugccagggaagcgacgacauaaagaaacuccucgaaagccaagguagacgggacaucaaacucauagacaucucccucuccaaagcagauucacgcaaauucgaaaacgccgucugggaccaauacaaagaccuuugccacaugcacaccggagucguagucgaaaagaagaaacgagguggaaaagaagaaaucacaccccacugcgcccuacuagacugcauaauguucgacgccgcaaccacaggaagccuaaacaucaccacacucagggccguccuaccccgcgacaugguguucagaacuagcacacccaaagucguauuauagggacuagucccuguucccagagcccacuuuuuuuucuuuuuuugaaauaaaauagccugucuuucagaucuaaaaaaaaaaaaaaaaaaaaaaaaaaaaaaaaaaaaaaaaaaaaaaaaaaaaaaaaaaaaaaaaugcaucccccccccccccccccccccccccccccccaaaggcucuuuucagagccaccagaauu

SEQ ID NO: 10052 - RNA, 1986 nt, Artificial Sequence
  mRNA product Design a-1 comprising derived and/or modified sequence from LASV(ISTH0009-NIG-2011;Clade II)__AIT17405__NP (opt11)
gggagagucccgcagucggcguccagcggcucugcuuguucgugugugugucguugcaggccuuauucaagcuuaccaugucagucuccaaagaagucaaaucauuccucuggacccaaucccugcgacgggaacucagcggcuacugcuccaacaucaaacugcaagucgucaaagacgcccaagcacuacuccacggccuagauuucucagaaguaagcaacguccaacgacucaugcguaaacaaaaacgcgaugacucagaccuaaagcgacuacgagaccugaaccaagcaguaaacaaccucgucgaacucaagucuacccaacagaaaagcauacuccgagucggcacccucacuuccgaugaccuucucacccuagccgccgaccucgagaaacucaaauccaaagucauccgaacagaacgcccccuaucaagcggcguauacaugggcaaccuauccacacaacagcuagagcaacgccgcgcccuacuaaacaugauaggcaugguagguggagcgcaaggcacucagccaggccgcgacggcgucguacgcguaugggacgucaaaaacccugaccuccucaacaaccaauucggcaccaugcccagccuaacacucgccugccuuaccaagcaaggccaaguagaccucaaugacgcggucuuagcccucaccgaccucggccucaucuacacagccaaauaccccaacuccucagaccucgaccgccugagccaaucccacccaauucucaacauggucgacauuaaaaagagcagccuuaacauauccggcuacaacuucagccuaggcgccgcaguaaaagccggcgccugcaugcucgacggcggcaacaugcuagaaacgaucaaagucacgccccaaaccauggacggcauacucaaauccauacucaaaguuaaacgcucccucggcauguucgucuccgauacccccggcgaacgcaaccccuacgaaaacauccuuuacaaaaucugccucagcggagacggauggccauacaucgcuucccgcaccagcauagucggccgcgcaugggaaaacaccaccguagaccucgaauccgacggcaaaccccaaaaagucggcucagcaggaucaaacaaaucacuccagagugccggcuuccccacgggccuuacauacucccaacuaaugacccucaaagacagcaugaugcaacuggacccauccgccaaaaccuggauagacauagaaggccgacccgaagacccaguagagauagcccucuaccaacccaugagcggaugcuacauacacuucuuccgagaaccuaccgaccucaagcaauucaaacaagacgccaaguacucccacggcaucgacguggccgaccucuucccagcccagcccggccucaccagcgccgucaucgaagcucuaccccguaacaugguacucacaugccaaggaagcgacgacauuaaacgccuccucgauucccaaggacgacgcgacaucaaacucauagacauagcccucuccaaagccgacucccgccgcuucgaaaacgcaguaugggaccaaugcaaagaccucugccacaugcacacuggcgucgucguggaaaagaaaaagcgaggcggcaaagaagaaaucacgccacacugcgcccuaauggacugcaucauguacgacgccgcuguaucgggcggacuuaacauccccguccuaagagcgguccuaccccgagauauggucuuccgcacgucaucccccaaaguaguccucuaaggacuagucccuguucccagagcccacuuuuuuuucuuuuuuugaaauaaaauagccugucuuucagaucuaaaaaaaaaaaaaaaaaaaaaaaaaaaaaaaaaaaaaaaaaaaaaaaaaaaaaaaaaaaaaaaaugcaucccccccccccccccccccccccccccccccaaaggcucuuuucagagccaccagaauu

SEQ ID NO: 10053 - RNA, 1986 nt, Artificial Sequence
  mRNA product Design a-1 comprising derived and/or modified sequence from LASV(ISTH2010-NIG-2012;Clade II)__AIT17483__NP (opt11)
gggagagucccgcagucggcguccagcggcucugcuuguucgugugugugucguugcaggccuuauucaagcuuaccauguccgcuucaaaagaagucaaaucauuccuuuggacccaaucccuacgacgugagcucagcgguuacugcagcaacauaaaacuacaggucgugaaagacgcccaagcgcuacuucacggacucgacuucagcgaggucuccaacguccaacgacucaugagaaaacaaaaacgcgacgacucagaccuuaaaagacuucgagaccucaaucaagccguaaacaaccucgucgaacuaaaauccacccaacagaaaagcauccuucgcgucggcacacucaccuccgacgaccugcuaacccuagccgccgaucucgaaaaacucaaaucaaaagucaucaggaccgagcgcccccuauccucaggcgucuacauggguaaccuauccacccaacaacucgaacaaaggcgagcccugcuaaacuuaaucggcauggucggcggcgcccaaggcacccaaccaggacgagacggcgucguccgaguaugggacgucaaaaaccccgaccuacucaacaaccaauucggcacgaugccaagccucacccucgccugccucacuaaacaaggacaagucgaucuaaaugacgccguccuggcgcucacagaccuaggacucauauacacagccaaauaccccaacuccuccgaccucgaccgccuaucacaaagccaccccauucucaacaugguagacaccaagaaaagcagccucaacaucagcgguuucaacuucucacuaggcgcggccgugaaagcgggagccugcaugcuagacggcggcaauaugcucgaaacaaucaaaguaacaccacaaaccauggacggcauacucaaaagcauccucaaagugaagaaaucacucggcauguucguauccgacacuccaggcgaacguaacccauacgaaaacauccucuacaaaaucugccuuuccggcgacggcuggcccuacaucgccuccagaaccucaaucgucggcagagcuugggaaaacacgaccguagaccuagaaucugacggcaaaccacacaaagucggcaccgccggcuccaacaaaagccugcaauccgccggauucccaaccggccuaacauauucacaacucaugacccucaaagacuccaugaugcaacuggaccccagcgccaaaacauggauagacauagagggccgcccggaagaccccguggaaaucgcccucuaccaacccaugagcggcugcuacauacacuucuuccgugaaccaacggaccuaaaacaauucaaacaagacgcuaaauacucacacggcaucgacguagccgaccucuuccccgcccaacccggccucaccagcgccguaauugaagcacuaccccgcaacaugguccuuaccugccaaggauccgacgacauaaaacgccuacucgacucacaaggacgccgcgacauaaaacucauagacauagcccuauccaaagccgauucccggcguuucgaaaacgcaguuugggaccaaugcaaagaccuaugccacaugcacacaggcgucgucguagagaaaaagaaacgcggcggaaaagaagaaauaacaccucacugcgcccucauggacugcauaauguaugacgcagcaguauccggaggccucaacauaccaguacuacgggcgguccuuccacgcgacaugguauuccgaacaagcucaccaaaagucguccucugaggacuagucccuguucccagagcccacuuuuuuuucuuuuuuugaaauaaaauagccugucuuucagaucuaaaaaaaaaaaaaaaaaaaaaaaaaaaaaaaaaaaaaaaaaaaaaaaaaaaaaaaaaaaaaaaaugcaucccccccccccccccccccccccccccccccaaaggcucuuuucagagccaccagaauu

SEQ ID NO: 10054 - RNA, 1986 nt, Artificial Sequence
  mRNA product Design a-1 comprising derived and/or modified sequence from LASV(Lassa virus/H.sapiens-wt/NGA/2015/ISTH_0543;Clade II)__AVO03640__NP (opt11)
gggagagucccgcagucggcguccagcggcucugcuuguucgugugugugucguugcaggccuuauucaagcuuaccaugagcgcaagcaaagaaguaaaauccuuccuguggacacaaucccuccggcgcgagcucuccggcuauugcuccaacaucaaacugcaaguggucaaagacgcacaagcacuacuacacgggcuagacuucucggaagucuccaacguccaacgacucaugcgcaaacaaaaacgagacgacagcgaccuaaagcgcuuacgagaccucaaccaggccgucaacaaccuggucgagcuaaaguccacgcaacaaaagagcauccugcgaguaggaacgcucacauccgaugaccuccucacccuagcagcugaccucgaaaaacucaaauccaaagucauccgaacugaaagaccccucuccagcggaguauacaugggcaaucuauccacccagcaacuugaacaaagacgcgcacuccuaaacaugauaggaauggucggcggagcccaaggaacacaacccggccgcgacgguguagucagagugugggacgucaaaaacccagaccuucuaaacaaccaguuuggaaccaugcccucacucacccuugcaugccucaccaagcaaggccaaguagaccucaacgacgccguacuagcacuaaccgaccugggacucaucuacaccgccaaauaccccaacagcucagaccucgaccgacuaagccaaagccacccaauacugaauauggucgacacaaagaaauccagccuaaacauaagcggcuacaacuucucccuaggagccgcggucaaagccggagccugcaugcuagacggcggaaacaugcuggaaacuauaaaagucacaccccaaacaauggacggcauacucaaaucaauacucaaaguaaagaaaagccucggcauguucgucucagacacacccggcgaacgcaaccccuacgaaaacauacuauacaaaaucugccuuucaggcgauggauggccauacauagcauccagaaccucaaucguaggcagagcaugggaaaacaccaccguugaccucgagucagacggaaaaccccaaaaagucgggucagcaggcaguaacaaaucccuccaaagugcaggauuccccaccggccugaccuacucacaacucaugacucucaaagacaguaugaugcaacucgaccccucggccaaaacauggaucgacaucgagggaagacccgaagaccccgucgaaauagcccuauaccaaccaauguccggaugcuacauacacuucuuccgagagccaaccgaccucaaacaauucaaacaagacgccaaauacucacacggcauagacguagcugaccucuuccccgcccaacccggccucaccuccgcugucaucgaagcccucccccgcaacaugguacuaacaugucaagguucugacgacaucaaacgccuccucgacucccaaggacgcaaagacaucaaacuaauagacaucgcccucagcaaagcugacucccgaagauucgaaaacgcagucugggaccaaugcaaagaccucugccacaugcacaccggagucgucgucgaaaagaagaaaagaggcgggaaagaagaaaucacaccccacugcgcccugauggacugcauuauguacgacgccgccguuuccgguggucucaacauccccguacuccgagccguccuaccacgcgacauggucuuccgcaccuccagccccaaaguaguccuauaaggacuagucccuguucccagagcccacuuuuuuuucuuuuuuugaaauaaaauagccugucuuucagaucuaaaaaaaaaaaaaaaaaaaaaaaaaaaaaaaaaaaaaaaaaaaaaaaaaaaaaaaaaaaaaaaaugcaucccccccccccccccccccccccccccccccaaaggcucuuuucagagccaccagaauu

SEQ ID NO: 10055 - RNA, 1986 nt, Artificial Sequence
  mRNA product Design a-1 comprising derived and/or modified sequence from LASV(Lassa virus/H.sapiens-wt/NGA/2016/ISTH_0009;Clade II)__AVO03572__NP (opt11)
gggagagucccgcagucggcguccagcggcucugcuuguucgugugugugucguugcaggccuuauucaagcuuaccauguccgccuccaaagaagucaaauccuuccuguggacccaaucccuccgccgcgaacucuccggauacugcucuaacaucaaacuccaaguuguaaaagacgcacaagcgcuacuacacggccuagacuucuccgaaguauccaacguacaacgccucaugcgcaaacaaaaacgagacgacucagaccucaaacgucuccgcgaucucaaccaagccguaaacaaccuagucgaacucaaaaguacgcaacaaaaaucuauccuucgagucggcacacugacaagcgacgaccugcucacccucgccgccgaccucgaaaaacucaaauccaaaguaauccgaaccgaacgcccccucucuuccgggguauacaugggcaaccuuuccacccaacaacuagagcaacgccgcgcccuccucaacaugaucgggaugguagguggagcccaaggaacacaaccuggacgagacggggucguccgagucugggacgucaaaaaccccgaccuccucaacaaccaauucggcacaaugcccucccuaacucucgccugccucacaaaacaaggacaaguagaucucaacgacgccguccuagcucuaacagaccuaggacuuauauacaccgccaaguacccaaacuccucggaccucgacagacucucgcaaucacacccgauacuaaacauggucgacaccaaaaagucaucccugaacaucucgggcuacaacuucucucucggcgccgcagucaaggccggagccugcaugcucgacggcggaaacaugcucgagacgaucaagguaacaccacaaaccauggacggcauacucaaauccauccuaaaagucaagaaaagccucggaauguucgugagcgacacccccggcgaaagaaaccccuacgaaaacauacucuauaaaaucugccuaucuggcgacgguuggcccuacaucgcuagccgcaccuccaucgucggacgcgcaugggagaauacaacagucgaucucgaaagcgacggcaaaccccaaaaagucggcagcgccggaaguaacaaaucacuccaauccgccggcuucccaaccggccuaaccuacucccaacucaugacccucaaggacuccaugaugcaacuugaccccagcgccaaaaccuggaucgacaucgaaggaagaccugaagaccccgucgagaucgcacucuaccaacccauguccggcugcuacauccacuucuuccgcgaaccgaccgaccucaagcaauucaaacaagacgccaaauacagccacggcauugacgucgccgaccuauuccccgcacagcccggccuuaccucggccguaauugaagcccuuccacgcaacaugguccuaaccugccaagguuccgacgacaucaaacgccuccuugacucacaaggccgccgcgacauaaaacucauagacauagcccuaucgaaagcagauucacgacgauucgaaaacgccgucugggaccaaugcaaggaccuuugccacaugcacaccggcguagucguagagaaaaagaaaagaggcgggaaagaagaaaucacuccccacugcgcacucauggacugcauaauguacgacgcagccguuagcggcggccuuaacauaccaguucuacgagccguacucccccgagacaugguauuccgaaccucaagccccaaagucguccuuuaaggacuagucccuguucccagagcccacuuuuuuuucuuuuuuugaaauaaaauagccugucuuucagaucuaaaaaaaaaaaaaaaaaaaaaaaaaaaaaaaaaaaaaaaaaaaaaaaaaaaaaaaaaaaaaaaaugcaucccccccccccccccccccccccccccccccaaaggcucuuuucagagccaccagaauu

SEQ ID NO: 10056 - RNA, 1986 nt, Artificial Sequence
  mRNA product Design a-1 comprising derived and/or modified sequence from LASV(Lassa virus/H.sapiens-wt/NGA/2016/ISTH_0017;Clade II)__AVO03568__NP (opt11)
gggagagucccgcagucggcguccagcggcucugcuuguucgugugugugucguugcaggccuuauucaagcuuaccaugucagcaucaaaagaagucaaaucauuccucuggacccaaucacuacggcgcgaacucagcggcuacugcuccaguaucaaacuacaggucguaaaagacgcccaagcccuacuccacggacuagacuucucagagguuucaaacguacaacguuuaaugcguaaacagaaaagagacgacuccgaccucaaacggcuccgagaccucaaccaagccguuaacaaccuagucgaacucaagucgacacaacaaaaaucaauccuccggguaggcacacucaccucagacgaccuccucacccucgcugccgaccuagagaaacuaaaaucaaaagucauacgcaccgaacgaccucugucaucaggcgucuacaugggaaaccucagcacccaacaguuagaacaacgacgcgcccuauuaaacaugaucgguauggccggcggcgcccagggcacacaacccggucgagacggagucguacgagucugggacgucaagaaccccgaccuccucaacaaccaauucggaaccaugcccucgcucacccucgccugccugacaaaacaaggccaagucgaccucaacgacgccguccuagcacuaaccgaccuaggccuaaucuacaccgccaaguaccccaacuccuccgaccuagaccgcuuaagccaaucgcaccccauccucaacauggucgacaccaagaaaagcucccuaaacaucagcggcuacaacuucucacuaggcgcggccgucaaagcuggagccugcaugcuugacggcggcaacauguuagaaaccaucaaagucacaccccaaaccauggacggcauccucaaauccauacucaaagucaaacgcucccucggcauguucguaagcgacgcgccaggugaacgaaaucccuacgaaaacauccucuauaaaaucugccuaucaggcgacggcuggcccuacaucgccucccgcaccuccaucgucggccgagccugggaaaacacuaccgucgaccuugagagcgacggcaagccccaaaaagugggagccaccggaucgaacaaaucccuccaaagcgccggauucccgaccggccucaccuacagccaacucaugacacucaaagacagcaugaugcaacucgaccccuccgcaaaaaccuggaucgacauagagggacgcccggaagacccaguagaagucgcccucuaccaacccguauccggaugcuacauccacuucuuccgagaacccacggaucucaaacaguucaaacaagacgccaaauacagccacggcauagacguagccgaccucuucccugcccaacccggccucaccucggccgucaucgaagcgcucccccgaaacaugguccuuaccugccaaggcagcgaugacaucaaaaagcuccucgacagccaaggccgcaaagacaucaaacucaucgacaucgcccucucaaaagcagacuccaggcgauucgaaaacgcagucugggaccaaugcaaagaucuuugccacaugcacacgggcgucgucgucgaaaagaagaaacguggcggcaaagaagaaauuaccccacacugcgcccucauggacugcaucauguacgacgccgccgucucaggaggccucaacaucccaguccuacgcgcaguacucccaagagacaugguauuccgcaccuccucaccaaaaguaguccucuaaggacuagucccuguucccagagcccacuuuuuuuucuuuuuuugaaauaaaauagccugucuuucagaucuaaaaaaaaaaaaaaaaaaaaaaaaaaaaaaaaaaaaaaaaaaaaaaaaaaaaaaaaaaaaaaaaugcaucccccccccccccccccccccccccccccccaaaggcucuuuucagagccaccagaauu

SEQ ID NO: 10057 - RNA, 1986 nt, Artificial Sequence
  mRNA product Design a-1 comprising derived and/or modified sequence from LASV(Lassa virus/H.sapiens-wt/NGA/2018/ISTH_0959;Clade II)__AVV65100__NP (opt11)
gggagagucccgcagucggcguccagcggcucugcuuguucgugugugugucguugcaggccuuauucaagcuuaccaugucagccucaaaagaaguaaaauccuuccucuggacacaaucgcuucgccgcgaauuauccggguauuguucaaacauaaaacuacagguagucaaagacgcacaagcacuccuccacggccucgacuucuccgaagucuccaauguacaacgacucaugcgcaaacaaaaacgugacgacuccgaccucaaacgacuccgagaccucaaccaagcagucaacaaccuaguagaacucaagucaacccaacaaaaauccauccuacgaguaggaacccuaaccagcgacgaccuccuaacacucgcagccgaccucgaaaaacucaaaagcaaagugauacgcaccgaacgaccccucagcagcgguguauacauggguaaucucucaacccagcaacucgagcaacgccgcgcccuacuaaaccugauaggaaugguaggcggggcccaagggacccaaccaggacgcgacggcguaguccguguaugggacgucaaaaaccccgaccuccucaauaaccaauucggcaccaugccaagccuaacccucgcgugccuaacaaagcagggccaagucgaccuaaacgacguaguacucgcccuaaccgaccucggccucauauacaccgccaaauaccccaacagcucagaccuugacagacuaagccagucacaccccauacucaacaugguagacaccaagaaaagcagucucaacauaucaggcuucaacuucucgcuaggagcagccguuaaagcaggagccugcaugcucgacggcggcaacaugcuagaaaccaucaaggugacaccccaaaccauggacggcauccucaaaagcauccuaaaggucaagaaaucccuaggcauguucguuagcgacaccccaggcgagcgcaacccauacgaaaacauccucuacaaaaucugccucagcggagacggcuggcccuacauagcaucaagaaccuccauaguugggcgugccugggagaacaccacuguagaccucgaaagcgauggcaaaccacacaaagucggcaccgcaggcucuaacaaaucacuacaauccgcgggcuucccaacaggccugaccuacucccaacucaugacacucaaagacuccaugaugcagcucgaccccuccgccaagacauggaucgauauagaaggacgaccagaagacccagucgaaauagcacucuaccagccaaugucagggugcuacauccacuucuuccgcgaaccaaccgaucuaaaacaguuuaaacaagacgccaaauacagccacggcaucgacgucgccgaccucuuccccgcgcaacccgggcuaacguccgccgucauagaagcccucccgcgcaacaugguacucacaugccaaggaucggacgacauaaaacgacuccucgacagccaaggcagaaaagacaucaaacucaucgacaucgcccugagcaagacggacucccgacgcuucgaaaacgcgguaugggaccaaugcaaggaccucugccacaugcacacaggugucgucgucgaaaagaagaaacgaggagguaaagaagaaauaacaccccacugcgcccuaauggacugcaucauguacgacgcagcagucagcggaggccucaacauccccguucuccgggccguccuaccacgcgacaugguauuucgaacauccagccccaaaguaguccuguagggacuagucccuguucccagagcccacuuuuuuuucuuuuuuugaaauaaaauagccugucuuucagaucuaaaaaaaaaaaaaaaaaaaaaaaaaaaaaaaaaaaaaaaaaaaaaaaaaaaaaaaaaaaaaaaaugcaucccccccccccccccccccccccccccccccaaaggcucuuuucagagccaccagaauu

SEQ ID NO: 10058 - RNA, 1986 nt, Artificial Sequence
  mRNA product Design a-1 comprising derived and/or modified sequence from LASV(LASV003-NIG-2008;Clade II)__AIT17581__NP (opt11)
gggagagucccgcagucggcguccagcggcucugcuuguucgugugugugucguugcaggccuuauucaagcuuaccaugucagccuccaaagaaguaaaauccuuccucuggacccaaucccugcgcagagaacugucaggauacugcuccucaaucaaacuacaagucgucaaagacgcccaagcacuacuacacggacucgacuucagcgaagucucaaacguccaacgacuaaugcgcaaacaaaaacgagacgauucugaccuuaaacgccuccgcgaucucaaccaggccgucaacaaccucgucgaacuaaaauccacccaacaaaaauccguccugcgagucggaacccucaccuccgacgaucugcucacccucgccgccgaucucgaaaaacuaaaauccaaagucauccgaaccgaaagaccacucucauccggcgucuacauggguaaccucuccgcacaacaacucgaacaacgccgaacccuccuaaauaugaucggcauggucgguggggcucagggcacccaacccggccgugacggcgucgucagaguaugggaugucaaaaaccccgaccuucuaaacaaccaauucggaacgaugcccucucucacacuagccugccuaacaaaacaaggccaaguagaccucaacgacgucguacucgcccucacagaucuagggcucauauacacagcaaaauaccccaacuccagcgaccucgacagacucagccaaucacaccccauccucuccaugguggacacgaagaaaagcagccugaacaucuccggcuacaacuucucccuaggcgcagcagucaaagcuggugcaugcaugcucgacggaggcaacauguuagaaaccaucaaagucacaccccaaaccauggacggcauccucaaauccauccucaaaguaaagaaaucccucggcauguucgucucagacacucccggcgaacgcaaccccuacgaaaacauacuauacaaaauaugccucuccggcgacggauggcccuacaucgccucgcguaccuccauagucggccgagccugggaaaacaccaccgucgaccuugaauccgacgguaaaccccaaaaagucggcacagccgguaguaacaaaucacuccaauccgccggcuuccccaccggccucaccuacucacagcucaugacacuaaaagacagcaugaugcaacucgaccccucagccaaaaccuggauagacauagagggccgaccagaagaccccgucgaaauagcccucuaucaaccgaugagcggaugcuacauccacuucuuccgggaaccaaccgacuuaaaacaguuuaaacaagacgccaaauacagccacggaaucgauguuacugaccucuucccagcccaaccgggccuaaccuccgcugucaucgaagcacuaccccgaaacaugguccuaaccugccaaggcuccgacgacaucaagagauuacuagacucccagggccgucgcgacaucaaacucaucgacaucgcccuguccaaagccgacucccgccgcuucgaaaacgcagucugggaccagugcaaagaccuaugucacaugcacaccggcgucguagucgaaaagaagaaacgcggaggcaaagaagaaaucacgccccacugcgcccuuauggacugcaucauguacgacgcagccgucucaggcggccucaacauacccguccuacgugccguacucccccgugacaugguauuccgcaccucgucacccaaaguaguacuuuaaggacuagucccuguucccagagcccacuuuuuuuucuuuuuuugaaauaaaauagccugucuuucagaucuaaaaaaaaaaaaaaaaaaaaaaaaaaaaaaaaaaaaaaaaaaaaaaaaaaaaaaaaaaaaaaaaugcaucccccccccccccccccccccccccccccccaaaggcucuuuucagagccaccagaauu

SEQ ID NO: 10059 - RNA, 1986 nt, Artificial Sequence
  mRNA product Design a-1 comprising derived and/or modified sequence from LASV(LASV035-NIG-2009;Clade II)__AIT17589__NP (opt11)
gggagagucccgcagucggcguccagcggcucugcuuguucgugugugugucguugcaggccuuauucaagcuuaccaugagcgcaucaaaagagguuaagagcuuccucuggacccagucacuccgacgugaacucuccggauacuguuccuccaucaaacuccaaguagucaaagacgcacaagcccuucuccacggccucgacuucucagagguaagcaacguccaacgccuuaugcgcaaacagaaacgagacgacucagaccucaaacgacuacgcgaccuaaaccaagccgucaacaaccucguggaacucaaaucaacccaacaaaaaucuauccuaagagucggcacccucaccagcgacgaccuccucacacucgcagcagaccuagaaaaauuaaaaucuaaagucauccgaacagaaagaccccucucaucagguguauacauggguaaccuguccgcgcaacaacucgaacaacgccgcgcccuacucaacaugaucggcauggugggcggcgcacaaggaacacaacccggccgcgacggcguaguacgagucugggacguuaagaaccccgaccuccucaacaaucaauucggcaccaugcccagccucacccucgccugcuuaacaaaacaaggacaaguagaccuaaacgacgcgguccuagcccucacagaccuaggacucauuuacacagcaaaauacccaaacuccucugaucuagaccgacuuucacaaucacacccaauccuaaacauggucgacaccaaaaagagcucccucaacauaucgggcuacaacuucagccugggcgcggcagucaaagcaggcgcaugcaugcucgacggcggcaacaugcucgaaaccaucaaagucacuccccaaaccauggacggcauccucaaaucgauacuaaaagucaaacggagccucggcauguucguauccgacacuccaggcgaacgcaauccauacgaaaacauacuuuacaaaaucugccucuccggagacggauggcccuacaucgccuccagaaccucaauagucggccgagccugggaaaacaccaccguagaccuagaaagcgacgggaagccccaaaaggucgguacaacaggcuccaacaaaucacuccaauccgcuggcuuccccaccggccugaccuacucacaacuaaugacccucaaagacucaaugaugcaacuagacccauccgcaaaaaccuggauagacauagaaggccgccccgaagaucccgucgaaauagcccuguaccaaccaauguccggaugcuacauucacuucuuccgcgagccuaccgaccucaaacaauucaaacaagacgcgaaauacucccauggaaucgacguagccgaccucuucccagcacagccuggucucacaucagccgucaucgaggcucuaccccgcaacaugguccuaaccugccaaggcucagacgacaucaagaaacuccucgacagccaaggacgccgcgacaucaaacuaaucgacauugcccuauccaaagcugacagccgaaaauucgagaacgcagucugggaccaaugcaaagaucuaugccacaugcacaccggagucgucgucgaaaagaagaaacgcggaggcaaagaagaaaucacaccccacugcgcccuaauggacugcaucauguacgacgccgcugucagcggcggccuaaacaucccuguccuccgagccguacucccccgcgacauggucuuccggaccagcagccccaaaguaguccuuuaaggacuagucccuguucccagagcccacuuuuuuuucuuuuuuugaaauaaaauagccugucuuucagaucuaaaaaaaaaaaaaaaaaaaaaaaaaaaaaaaaaaaaaaaaaaaaaaaaaaaaaaaaaaaaaaaaugcaucccccccccccccccccccccccccccccccaaaggcucuuuucagagccaccagaauu

SEQ ID NO: 10060 - RNA, 1986 nt, Artificial Sequence
  mRNA product Design a-1 comprising derived and/or modified sequence from LASV(LASV1000-NIG-2009;Clade II)__AIT17783__NP (opt11)
gggagagucccgcagucggcguccagcggcucugcuuguucgugugugugucguugcaggccuuauucaagcuuaccaugagcgccucaaaagaaguaaaauccuuccucuggacgcaaucgcucagacgagaacucucaggcuacugcagcaacauaaaacuccaaguagucaaagacgcacaagcccuccuacacggacucgacuucuccgaaguauccaacguacagcgacucaugcgcaaacaaaaacgagacgacagcgaccucaaacgccuccgcgaccuuaaccaagccgucaacaaccuagucgagcucaaaagcacccaacagaaaagcauacuccgcgucggaacccuaacaucagacgaccuccucacacuagcagcagaccucgagaagcuaaaaucaaaagugauccgcaccgaacgcccacuguccuccggaguauacaugggaaaccucuccacccaacaacuagaacaaaggcgcgcccuccucaacaugaucggcauggucggcggcgcccaaggcacccaacccggacgcgacggaguuguacgaguaugggacgucaaaaacccagaccuccucaacaaccaauucggcaccaugccaucacuaacauuggccugccuuaccaaacaaggucaaguagaccuaaacgacguggugcucgcacucaccgaccucggccucaucuacacggcaaaguaccccaacuccagcgaccucgaccgacuaucacaaucccaccccauccucaacauggucgacaccaagaaaucaucgcucaacaucucaggcuacaacuucucacuaggcgccgccgucaaagccggcgccugcaugcucgacggcggaaacaugcucgaaacuauaaaaguaacaccccaaaccauggacggcauccucaaaucaauacucaaaguuaagaaaagccuaggcauguucgucuccgacaccccaggagaacgcaaccccuacgaaaacauacuauacaaaaucugucuaagcggcgacggcuggcccuacaucgccucacgaaccuccaucgucggacgagcaugggagaacaccaccgucgaccuagaaucagacggaaaaccccaaaaagucggcaccgccggcuccaacaaaucacuucagucagcaggauuucccacaggucuaaccuacucccaacucaugacacuaaaagacucaaugaugcaacucgaccccucagccaaaacuuggaucgacaucgaaggccgccccgaagaucccguagaaaucgcgcucuaccaacccgucagcggcugcuauauccacuucuuccgugaaccuacagaccucaaacaauucaaacaagaugcgaaguacagccacggcauagacguagccgaccuauuccccgcccaaccaggacugacuuccgccgugauugaagcccucccccgcaacaugguacucacaugccaaggcuccgacgacaucaaaaggcuacucgacucacaaggccgacgggacaucaaacugaucgacaucgcacucucaaaagcagacucccgaagauucgaaaacgccgucugggaccaaugcaaagaccucugccacaugcacacaggcgucguagucgaaaagaagaaacgaggcggaaaagaagagauaaccccacacugcgcucugauggacugcaucauguacgacgccgcaguauccggcggccucaacauaccaguccucagagcaguccuacccagagauauggucuuccgcaccucaagccccaaaguaguccucuaaggacuagucccuguucccagagcccacuuuuuuuucuuuuuuugaaauaaaauagccugucuuucagaucuaaaaaaaaaaaaaaaaaaaaaaaaaaaaaaaaaaaaaaaaaaaaaaaaaaaaaaaaaaaaaaaaugcaucccccccccccccccccccccccccccccccaaaggcucuuuucagagccaccagaauu

SEQ ID NO: 10061 - RNA, 1986 nt, Artificial Sequence
  mRNA product Design a-1 comprising derived and/or modified sequence from LASV(LASV221-NIG-2010;Clade II)__AIT17625__NP (opt11)
gggagagucccgcagucggcguccagcggcucugcuuguucgugugugugucguugcaggccuuauucaagcuuaccauguccgcuuccaaagaaguaaaauccuuccucuggacccaaucucuacgccgagaacucucaggcuacugcucaucaaucaaacuccaagucgucaaagacgcacaagcccuacugcacggacucgacuucuccgaaguaucaaacguccagcggcucaugcggaaacagcgccgcgacgacuccgaccuuaagcgccuacgagaccugaaccaagcaguaaacaaccucguggaacuaaaauccacccaacaaaaaucaauccuccgagugggcacgcuaacuagcgacgaucuccuaacucuagccgccgaccuagaaaaacuaaaauccaaagucauacgcacagaacgcccgcucuccagcggcgucuacaugggaaaccuauccacacaacaacuagaacaacguagagcccuccuaaacaugauaggcauggucggcggagcccaaggaacacaacccggccgcgauggcgucguccgagucugggacgugaaaaacccagaccuacucaacaaccaauucggcaccaugcccucccucacacuagcgugccugacaaagcaaggacaaguagaccucaacgacgccguacucgcccuuaccgaccucggauuaaucuacacagccaaauacccaaacagcagcgacuuggacagacucucccagucccaccccauacucaacaugguggacaccaagaaauccucccucaacaucagcggguacaauuucucacucggggccgcagucaaagccggcgcaugcaugcuagacggcggcaacaugcucgaaaccaucaaagucaccccacaaacagucgacggcauccucaaaucaauccucaaggugaaacgcagucucggcauguucguuucagacacacccggcgaacgcaauccauacgaaaacauccucuacaaaaucugccucagcggugacggguggccauauaucgccucccgaaccuccaucgucggccgcgcaugggaaaacaccaccguagaccuagagagcgacggaaaaccccagaaggucggcacagcuggcuccaacaaaucccuccaauccgccggcuuccccaccggccucaccuacucacaacugaugacccuaaaagacucuaugaugcaacucgaccccuccgcuaaaaccuggauugacauagagggccgcccugaagaccccgucgaaaucgcccuauaccaacccaugucagggugcuacauccacuucuucagagaacccaccgaccucaagcaauucaaacaggacgcaaaauacucccacggcaucgacguagccgaccucuuccccgcacaacccggauuaaccagcgcaguaaucgaggcacucccacguaacaugguacugaccugucaaggcuccgacgacaucaaacgccugcuagacucccaaggucgaagagauauuaaacucaucgacaucgcccucagcaaagcggacucacgcaaauucgaaaacgcagucugggaucaaugcaaagaccuaugccacaugcacaccggcgucgucgucgagaaaaagaaacgcggcggaaaagaagaaaucaccccacacugcgcccuaauggauugcaucauguacgacgcagccgucucaggcggacucaacauccccguacuacgcgccguacuaccucgcgacauggucuuccggaccucaagccccaagguuguccuauaaggacuagucccuguucccagagcccacuuuuuuuucuuuuuuugaaauaaaauagccugucuuucagaucuaaaaaaaaaaaaaaaaaaaaaaaaaaaaaaaaaaaaaaaaaaaaaaaaaaaaaaaaaaaaaaaaugcaucccccccccccccccccccccccccccccccaaaggcucuuuucagagccaccagaauu

SEQ ID NO: 10062 - RNA, 1986 nt, Artificial Sequence
  mRNA product Design a-1 comprising derived and/or modified sequence from LASV(LASV237-NIG-2010;Clade II)__AIT17639__NP (opt11)
gggagagucccgcagucggcguccagcggcucugcuuguucgugugugugucguugcaggccuuauucaagcuuaccaugucggcaagcaaagaagucaaauccuuccuauggacccaaucacuccgccgagagcucucaggcuauugcucaaacaucaaacuucaaguagugaaagacgcacaagcacuccuccacggccucgacuuuucagaagucagcaacguacaacgccucaugcguaaacaaaaacgagacgacuccgaccucaaacgccuacgcgaccuaaaccaagcagucaacaaccucgucgagcucaaauccacccagcaaaaaucaauacuacgugucgggacccuaacuuccgacgaccuccuaacacuugccgccgaccucgaaaaacugaaaagcaaaguaauccguaccgaacgcccccucucaaguggcgucuacaugggaaaccuuagcacccaacaacuagaacaacgccgugcccuccucaacaugaucgguauggucggaggcgcccaaggcacacaacccggccgcgacggcguagucagaguaugggacguuaaaaaccccgaccuccucaauaaccaauuuggcacuaugcccucccuaacacucgcaugccucaccaaacaaggccaaguagaccuaaacgacgcaguccucgcccuaacagaccucggacucaucuacaccgccaaauacccuaacucauccgaccucgaccgccuaucacagagccaccccauccucaacauggucgacaucaagaaauccagccuaaacaucucagguuacaacuucucacuaggggccgccgucaaagcaggcgcaugcaugcucgacggcggcaacaugcuagaaaccaucaaagucacaccccaaaccauggacggaauccucaagagcauccucaaagucaaacgaucacuuggaauguucguauccgacacccccggcgaacgcaaccccuacgagaacauacuauacaaaaucugccuauccggcgacggcuggcccuacauagcuucacgcaccagcauaguaggccgcgccugggaaaauaccacaguagaccucgaaucagacggaaaaccccaaaaagugggaucagccgguucaaacaaaagccuccaauccgcaggauucccaaccggccuuacguacucccaacuaaugacccucaaagacucaaugaugcagcucgacccauccgcaaaaacauggauugacaucgaaggcagacccgaagacccagucgaaauugcccuuuaucaacccauguccggaugcuacauccacuucuuccgcgaaccaacagaccucaaacaauucaaacaagacgcuaaauacagccacgggauagacgucgccgaucucuucccagcccaacccggucuaaccagcgccguaaucgaagcccugccccgcaacaugguacuuacaugccagggcagcgacgacauaaaacgccuccucgacucccaaggccgacgcgacaucaaacuaaucgacaucgcacucuccaaagcugacucccgccgcuucgaaaacgcagucugggaucaaugcaaagaccuaugccacaugcacaccggaguagucgucgaaaagaagaaaagaggcggcaaagaagaaaucacaccccacugcgcacuaauggacugcauaauguacgacgcagcagugucaggaggacugaacauccccguacugcgagccguacucccccgagacauggucuuccgaaccagcucacccaaagucguccuuuaaggacuagucccuguucccagagcccacuuuuuuuucuuuuuuugaaauaaaauagccugucuuucagaucuaaaaaaaaaaaaaaaaaaaaaaaaaaaaaaaaaaaaaaaaaaaaaaaaaaaaaaaaaaaaaaaaugcaucccccccccccccccccccccccccccccccaaaggcucuuuucagagccaccagaauu

SEQ ID NO: 10063 - RNA, 1986 nt, Artificial Sequence
  mRNA product Design a-1 comprising derived and/or modified sequence from LASV(LASV253-NIG-2011;Clade II)__AIT17671__NP (opt11)
gggagagucccgcagucggcguccagcggcucugcuuguucgugugugugucguugcaggccuuauucaagcuuaccauguccgccuccaaagaagucaaauccuuccuauggacccaaucucugcgacgcgaacucucagguuacugcucaagcauaaaacuccaagucgucaaagacgcacaagcccuccuacacggacuagacuucuccgaaguaucaaacguccaacgccuaaugcgcaaacaaaaacgcgacgacagcgaccucaaacgccuccgagaucucaaccaggcugugaacaaccucguagagcucaaaucaacccaacaaaaaucuguccugcgcgucggaacccuaacgucagaugaucuccucacccuagccgccgaccuagaaaaacucaaauccaaagucauacgcacggaacgaccccucucaucaggcgucuacauggggaaccuauccacccagcaacucgagcaaagacgagcacuccucaacaugaucggcauggucggaggcgcccaaggaacccagcccggacgcgacggcguaguccgagucugggacgucaagaaccccgaccuacugaacaaccaauucggcacaaugccaagccucacccuagcaugccucaccaaacagggacaaguagaccucaacgacgugguccuagcccuaaccgaccucggccuaauauacaccgcaaaguaccccaacuccagcgaccucgaccgacuaucccaaagccauccaauacucaacauggucgacacaaagaaaagcucacuaaacaucagcggcuacaacuucagccucggugccgccgucaaagcaggcgccugcaugcucgacggcggaaacaugcucgaaaccauaaaagucacaccccaaaccauggacggcauccuaaaaagcauacucaaaguaaagaaaucacuaggcauguucgucuccgacacacccggcgaacgcaaccccuacgaaaacauacuauacaaaauaugccuaucgggcgauggcuggccauacauagcuucacgaaccucaauagucggcagagccugggaaaacaccaccgucgaucucgaaucggacggaaaaccacaaaaaguaggcaccgccggaagcaacaaaucccuacaaucagcaggcuucccaaccggccucaccuacagccaacucaugaccuuaaaagauuccaugaugcaacuggacccaagcgccaagacauggaucgacauugaaggacgacccgaagaccccgucgaaauagcccucuaccagcccaugagcggcugcuacauccacuucuuccgagaacccaccgaccuaaaacaauucaaacaagacgccaaguacucccacggcaucgacgucacagaccucuucccagcccaacccggccucaccagcgccgucaucgaagcgcuaccaagaaacaugguccuaacgugucaaggcucggacgacaucaaacgacuccucgacucgcaaggucgcagagacaucaaacuaaucgacaucgcacucaguaaagcugacucacgccgauucgaaaacgcagucugggaccagugcaaagaccucugccacaugcacacaggcgucguaguagaaaagaaaaagcgaggaggcaaagaagaaaucaccccacacugcgcacucauggacugcaucauguacgacgccgcggucucgggcggccuaaacauacccguacuccgcgcaguccuaccacgcgacauggucuucagaaccagcagcccaaaagucgugcucuaaggacuagucccuguucccagagcccacuuuuuuuucuuuuuuugaaauaaaauagccugucuuucagaucuaaaaaaaaaaaaaaaaaaaaaaaaaaaaaaaaaaaaaaaaaaaaaaaaaaaaaaaaaaaaaaaaugcaucccccccccccccccccccccccccccccccaaaggcucuuuucagagccaccagaauu

SEQ ID NO: 10064 - RNA, 1986 nt, Artificial Sequence
  mRNA product Design a-1 comprising derived and/or modified sequence from LASV(LASV254-NIG-2011;Clade II)__AIT17675__NP (opt11)
gggagagucccgcagucggcguccagcggcucugcuuguucgugugugugucguugcaggccuuauucaagcuuaccauguccgccuccaaagaagucaaaucauuccucuggacccaaucccuacgucgagaacucucaggauacugcuccuccaucaaacuacaagucguaaaagacgcccaagcacuccuccacggacuagacuucagcgaaguaucgaacguacaacgccucaugcgaaaacagaaaagggacgacuccgaccucaaacgccuacgcgaccucaaccaagcagucaacaaccuaguagaacucaaguccacucaacagaaaucaguauuacgugugggaacccuaacuagcgacgacuuacucacacucgccgccgaccucgagaaacucaaaucaaaaguaauccgaacagaacgcccccucucuagcggaguauacaugggcaaccugagcacccaacaacuagaacagcgacgagcccuccucaacaugaucggaaugguuggcggcgcacaaggcacgcaacccggacgcgacggcguaguacgaguaugggacgucaaaaaccccgaccuccuaaacaaccaauucggcacaaugcccucacucacacucgccugccuaaccaaacaaggccaagucgaccucaacgaugcaguccucgcccucaccgaccucggccuaauauacaccgcaaaauacccaaacaguuccgaccucgaccgacuaagccaaucccacccaauacucaacaugguagauaccaaaaaguccucccucaauaucuccggcuacaacuucucccucggcgccgcgguaaaagccggcgcgugcaugcucgacgggggaaacaugcucgaaaccaucaaagucacaccccaaaccauggacggaauccugaaaagcauccucaaaguuaagaaaucccuaggaauguucgucuccgacacccccggcgagcgcaacccauacgagaacauccuuuacaaaauaugccucuccggagacggcuggccguacaucgccucccgaaccucaaucguaggcagagccugggaaaacaccauagucgaccucgaaucagacggcaaaccacagaaagucggcaccgcaggaucaaacaaaucccuacaaucagcaggauuccccacaggucuuaccuacucccagcuaaugacacucaaagacuccaugaugcaacucgacccaucagcaaaaaccuggaucgacauagaaggucgcccagaagaccccgucgaaaucgcccuauaccaaccgauguccggcugcuacauccacuucuuccgggaacccaccgaccucaaacaauucaagcaagacgccaaauacucacacggcaucgacguagccgaccuauucccagcucaacccggccucaccuccgcagucaucgaagcccucccccgaaacaugguccucacaugccaaggcagcgacgacaucaaacgccuucucgacucacaaggccgacgugacaucaaacucaucgacaucgcccucuccaaagcagauucccgacgauucgaaaacgcagucugggaccaaugcaaagacuuaugucauaugcacaccggagucgucgucgagaaaaagaaacgcggaggcaaagaagaaaucacaccgcacugcgcccugauggacugcauaauguacgacgcagcaguaagcggcggccucaauauacccguccuccgcgcaguacucccucgagacaugguauuccgaaccuccagcccaaaaguaguccucuaaggacuagucccuguucccagagcccacuuuuuuuucuuuuuuugaaauaaaauagccugucuuucagaucuaaaaaaaaaaaaaaaaaaaaaaaaaaaaaaaaaaaaaaaaaaaaaaaaaaaaaaaaaaaaaaaaugcaucccccccccccccccccccccccccccccccaaaggcucuuuucagagccaccagaauu

SEQ ID NO: 10065 - RNA, 1986 nt, Artificial Sequence
  mRNA product Design a-1 comprising derived and/or modified sequence from LASV(Nig08-04;Clade II)__ADU56611__NP (opt11)
gggagagucccgcagucggcguccagcggcucugcuuguucgugugugugucguugcaggccuuauucaagcuuaccaugagcgcgucgaaagaagucaagagcuuccucuggacccaaucucugcgaagagaacucucuggcuacugcuccaacauaaaacuccaagucgucaaggacgcccaagcccuauuacacggccuagacuucuccgaaguaucaaacgugcaaagacucaugcgcaaacagaaacgagacgacggcgaccucaagagacuacgagaccuaaaccaagccguaaacaaccucgucgaacuaaaaagcacccagcaaaaaucaguccuacgggucggcacgcugaccagcgacgaccugcuaacacucgccgcagaccuagaaaaacuaaaaucaaaagucauacgcaccgaacgcccacuauccagcggagucuacauggggaaccucucaacccagcaauuagaacaaagaaaagcccugcuaucaaugauaggcauggucggcggcgcccaaggaacgcaacccggccgcgacggcgucguccgagucugggacgucaaaaacccagaccuacucaacaaccaauucggcaccaugccgucacuaacacuagcaugccucaccaaacagggccaagucgaccucaacgaugcaguccuagcccuaaccgaccucggccuaaucuacaccgcaaaauacccaaacuccucagaccuagaccgacuaucccaaucacacccaauccucaacauggucgacacaaagaaaucaucccucaacaucuccggcuacaacuucagccucggcgccgccgucaaagcaggcgccugcaugcucgacggcggcaacaugcucgaaaccaucaaaguaaccccacaaacaauggacgggauauuaaaauccauacucaaagucaagagaucccucggcauguucgucucggacaccccaggagaacgcaacccauacgaaaacauacucuacaagauaugccuauccggcgacggcuggccauacauagccuccagaaccuccauagucggccgggcgugggaaaacaccaccguagaccuagaaagcgacggcaaaccccagaaggucggcacugcgggcucaaacaaaucccuacaaucagccggauucccgacaggacucacauacucacaacugaugacccucaaagauucaaugaugcaacucgacccaagcgccaaaacguggaucgauaucgaagggagaccagaagacccggucgaaaucgcccuauaccaaccaaugagcggcugcuacauacacuucuucagggaacccacagaccuaaaacaauucaagcaagacgcaaaguacucacacggcauagaugucacagaccuauucagcgcccaaccaggacuuaccuccgcaguaaucgaagcacuacccaggaacaugguccugaccugccaaggaucagacgacauaaagaaacugcuagacagucagggacgacgagacaucaaacuaaucgacaucagccucaacaaagccgauagccgacguuucgaaaacgccgucugggaccaaugcaaagaccucugccacaugcacaccggcguagucguagaaaagaagaaacgcggcggaaaagaagaaauuacaccccacugcgcccucauggacugcaucauguucgacgcggcaguaagcggaggccucaacauaccgauccuccgagcaguccuccccagagacaugguauuccgcaccuccagcccaaaagucguccucuaaggacuagucccuguucccagagcccacuuuuuuuucuuuuuuugaaauaaaauagccugucuuucagaucuaaaaaaaaaaaaaaaaaaaaaaaaaaaaaaaaaaaaaaaaaaaaaaaaaaaaaaaaaaaaaaaaugcaucccccccccccccccccccccccccccccccaaaggcucuuuucagagccaccagaauu

SEQ ID NO: 10066 - RNA, 1989 nt, Artificial Sequence
  mRNA product Design a-1 comprising derived and/or modified sequence from LASV(GA391;Clade III)__AAA46284__NP (opt11)
gggagagucccgcagucggcguccagcggcucugcuuguucgugugugugucguugcaggccuuauucaagcuuaccauguccgcgaguaaagaaguacguucaugccuauggacgcaaucccuccggcgcgaacuuuccggcuacugcucaaacauaaaacugcaagugguaaaggacgcccaagcacuacuucacggacuagacuucucagaagugucaaacguccagagacuaaugcgaaaacagaaacgggacgauggagaccuaaaacgacugcgcgaccuaaaccaagcggucaacaaccuagucgagcucaaaagcacacaacagaaaucgguccuacgcguuggaacgcucuccagcgacgaccugcucauccucgcggccgaccucgaaaaacucaaaucaaaaguaacccgaaccgaacgcccgcuuucgagcggaguauauaugggaaaccuaaguucccaacagcucgaccaacgccgcgcacuccugaacaugauaggcaugacaggagugagcggcggagggaaaggcgcaucaaacggcaucgugcgcgucugggacgugaaaaacgccgaacuccuuaacaaccaguucgggaccaugcccucacuaacacucgcaugccuaaccaagcaaggacaaguagaccuaaacgacgccguacaagcacuaaccgaccuaggccuuaucuacacagcgaaauaccccaauagcucggaccuggacagacucucacaaucgcaccccauccugaacaugaucgacaccaagaaaucgagccuaaacauuuccggcuacaacuucucucucggggccgccgucaaagcaggggcaugcaugcuagacggaggcaacaugcucgaaacgaucaaagucucaccccaaaccauggacggcauacugaaauccauccuaaaagucaagaaaagccuaggaauguucgucagcgacaccccaggcgaacgcaaccccuacgaaaauauccuguacaaaaucugccucucgggagacggcuggagcuauaucgcgagcagaacaucaaucguaggccgcgcgugggagaacaccguaguugaccucgaacaagacaacaaaccacagaaaauaggcaacggcggauccaauaaaucacuccagagcgcaggcuucgcagcuggccuaaucuacagccaacucaugacacugaaagacuucaaaugcuucaaccucaucccaaacgccaaaacauggauggauaucgaagggcgccccgaagaccccguagaaauagcacucuaccaacccucgagcggcugcuacguucacuucuuccgcgagcccacagauuuaaaacaguucaaacaggacgccaaauacucacacggucgcgacgucacagaccucuucgcagcccaaccaggccugacaagcgcuguaauagaagcccucccacgaaacauggucauaaccugccaaggaucagaagauaucagaaaacuacucgaaagccaaggccgacgggacaucaaacucauagacauaacccuaagcaaagcagauagcagaaaauucgaaaacgccguaugggaccaauucaaagaccucugccacaugcacacaggcguagucguggaaaagaagaaacgcggaggcaaagaagaaaucacaccucacugcgcacucauggacugcauaauguuugaugcugcggucuccggcggacucgaugcaaaaguacuccgaguuguccuacccagagacaugguauuccgcaccucaacacccaaaguaguacucuaaggacuagucccuguucccagagcccacuuuuuuuucuuuuuuugaaauaaaauagccugucuuucagaucuaaaaaaaaaaaaaaaaaaaaaaaaaaaaaaaaaaaaaaaaaaaaaaaaaaaaaaaaaaaaaaaaugcaucccccccccccccccccccccccccccccccaaaggcucuuuucagagccaccagaauu

SEQ ID NO: 10067 - RNA, 1986 nt, Artificial Sequence
  mRNA product Design a-1 comprising derived and/or modified sequence from LASV(Nig08-A19;Clade III)__ADU56619__NP (opt11)
gggagagucccgcagucggcguccagcggcucugcuuguucgugugugugucguugcaggccuuauucaagcuuaccauguccgccucaaaagaggucaagagcuuccuauggacccaaucacuucgccgcgaacuuagcggcuacugcuccaacaucaaacuacaagucgucaaagacgcgcaggcccuccuccacggacucgacuucucagaaguauccaacguacaacgccugaugcgcaaacaaaaacgagacgacggcgaccucaaacgacuacgcgaccucaaccaagcaguuaacaaccuagucgaacucaaaagcacccaacagaaaagcguacuacgugucggcacgcuaagcagcgacgaccuacucguguuagccgcugaccucgaaaaacuaaaaucaaaaguaguccggaccgaacgcccacugagcagcggcaucuacaugggcaaccucucaucacaacaacuagaccaacgcaaagcacuacucaacaugaucggcaugacaggaggcaacggcggacgaaacacgaccuccgacggaauuguacgggucugggacgucaaaaacgcagagcuccuaaacaaucaauucggcacaaugccaucccuuacacuagcuugccucaccaaacaaggccagguagaccuaaaugaugccguacaagcccuuacagaccucggacucauauacaccgcaaaauacccuaacucaucagaccucgaccgacuagcacaaucacacccaauccugaacaugauagauaccaaaaaguccucccuuaacaucuccggauauaacuuuucccucggagcagccgucaaagcuggcgccugcaugcuggacggcggcaacaugcucgaaacaaucaaaguaagcccacaaacaauggacggaauccucaaauccauacuaaaaguaaaacgcucccuaggcauguucauauccgacacacccggcgaacgaaaccccuaugaaaacauacuuuacaagaucugccucucaggcgacggauggcccuacaucgcaucccggacauccaucguaggacgagccugggaaaacaccguagucgaccuggaaagcgacaacaagccccagaaaacaggcaacggcggcagcaacaagucccuccaaagcgccggcuucgcagcaggccuaaccuacucccaacucaugacacucaaagacagcaugcuccaacuagacccaaacgcaaaaaccuggauggauaucgaaggccggccagaagaccccguagaaauagcccuauaccaaccuagcucaggaugcuacauccauuucuuccgagaacccaccgaccuuaagcaauucaaacaggacgccaaauacagccacggcaucgacgucaccgaccucuucgccgcccaacccggccuaacaucagccgucauagaagcccuaccccgcaacauggucauaaccugccaaggauccgaagacauaagaaaacuccucgagucgcaaggccgccgagacaucaaacuaauagacaucucccuauccaaagucgacagccgcaaauucgaaaacgcagucugggaccaauuuaaagaccucugccacaugcauaccggcaucgucguagaaaagaagaaacgcggaggcaaagaagaaaucaccccacacugcgcucucauggacugcauaauguucgacgcggccguaucaggcggcgucgacgccaaaguccugagagccguccuucccagagacaugguauucagaaccuccacccccaaagucguccuauaaggacuagucccuguucccagagcccacuuuuuuuucuuuuuuugaaauaaaauagccugucuuucagaucuaaaaaaaaaaaaaaaaaaaaaaaaaaaaaaaaaaaaaaaaaaaaaaaaaaaaaaaaaaaaaaaaugcaucccccccccccccccccccccccccccccccaaaggcucuuuucagagccaccagaauu

SEQ ID NO: 10068 - RNA, 1986 nt, Artificial Sequence
  mRNA product Design a-1 comprising derived and/or modified sequence from LASV(G1180-SLE-2010;Clade IV)__AIT17169__NP (opt11)
gggagagucccgcagucggcguccagcggcucugcuuguucgugugugugucguugcaggccuuauucaagcuuaccaugucagccagcaaagagaucaaauccuuccucuggacccaaucccuccggcgcgaacucagcgguuacugcagcaacauaaaacuacaagucgucaaagacgcccaagcccuccuccacggccuagacuucuccgaagucuccaacguccagcgccuaaugcgcaaagaacgacgagacgacaacgaccucaaacgacugcgagaucuaaaccaagcaguuaacaaccucguagaacuaaaaucaacucaacaaaaaucaauccugagggucggcacccuaaccagcgacgaccuccuaauccuugccgcugaccucgagaaacucaaaagcaaagucauccgaacggaacgaccacuaagcgccggcgucuacaugggcaaccuaucaagccagcaacucgaccaaagacgcgcauuacucucgaugaucggaaugagcuccggcaaccaacgagcacaagccggccgagacggcgucguacgagucugggacgucaaaaacguugagcuacuaaacaaccaauucggaaccaugccaucacuaacccucgccugccucacaaaacaaggccaaguagaccucaacgacgccguccaagcccucaccgaccucggacuaauauacacagcaaaguaccccaacaccagcgaccuggaccgucuaacccagucacaccccauacucaacaugauagacaccaaaaaguccucacucaacauauccggauacaacuucucccucggcgccgccgucaaagccggagcaugcaugcuagacggcggcaauaugcucgaaacaaucaaagucucaccccaaaccauggacggcauacucaaaagcauacucaaagucaagaaagcccucggaauguuuaucucugacacacccggcgaacgcaaccccuacgaaaacauacuauacaaaauuugccugucaggagauggauggcccuacauagccagucgaaccuccaucaccggccgcgcaugggaaaacaccgucguugaccuagaauccgacggaaaaccccagaaagcaggcuccaauaacuccaacaaaagccuucaaagcgucggauucacagcgggccucaccuacucacaacuaaugacacuaaaagacgccaugcuccaacucgacccaaacgcuaaaaccuggauggacaucgaaggccgccccgaagacccaguagaaaucgcccucuaccagccuuccuccggcugcuacauccacuucuuccgagaacccaccgaccuaaaacaguucaaacaagacgccaaauacucccacggcaucgacgucacagaccuguucgccgcccaaccaggccucacgucugcaguaaucgacgcacugccccguaacaugguaauaaccugccaaggcucagacgacaucagaaaacuucuagaaucacaaggccgaaaagacaucaaacucaucgacaucgcccucuccaaaaccgacuccagaaaauacgaaaacgccguaugggaccaauacaaagacuuaugccacaugcacaccggaguagucgucgaaaagaagaaacgcggcggcaaagaagaaaucaccccacacugcgcacucauggacugcauuauguucgacgccgccgucucuggaggacuaaacaccucaguccucagagccguccucccuagagacaugguauuucgaaccagcacaccccgagucguccuauaaggacuagucccuguucccagagcccacuuuuuuuucuuuuuuugaaauaaaauagccugucuuucagaucuaaaaaaaaaaaaaaaaaaaaaaaaaaaaaaaaaaaaaaaaaaaaaaaaaaaaaaaaaaaaaaaaugcaucccccccccccccccccccccccccccccccaaaggcucuuuucagagccaccagaauu

SEQ ID NO: 10069 - RNA, 1986 nt, Artificial Sequence
  mRNA product Design a-1 comprising derived and/or modified sequence from LASV(G1442-SLE-2011;Clade IV)__AIT17181__NP (opt11)
gggagagucccgcagucggcguccagcggcucugcuuguucgugugugugucguugcaggccuuauucaagcuuaccauguccgccagcaaagaagucaaauccuuccuauggacccaaucacuccgccgcgaacuuagcggcuacugcucaaauauaaaacugcaagucgucaaagacgcucaagcccuccugcacgggcucgauuucucagagguauccaacguccaacggcuaaugcgcaagcaacgacgggacgacaaugaucucaaaagacuccgcgaccugaaccaagccgucaacaaccuugucgagcucaaauccacucaacagaaaaguguacuccgcgucgguacacucaccucggacgaccuucuaguacuagcagcugaccuagaaaaacuaaaauccaaagucauccgcaccgaacgcccccucagcgcaggcgucuauaugggcaaccucuccucccaacaacucgaccaaagacgagcacuccucaacaugaucgguaugagcggaggcauccaaggcacacgaaccggccgagacggcgucguccgaguaugggacgucaaaaacgccgaccuacucaacaaccaauucggaaccaugcccucccuaacacuagccugccucaccaagcaaggacaaguagaccucaaugacgucguccaagcccucacagaccucggccuaauauacaccgcaaaauaccccaacgccagcgaccucgacagacuaacccaaucccaccccauccuaaacaugaucgacacaaagaaaagcagccucaacaucuccggcuacaacuucucacuaggcgccgccgucaaagcaggagcaugcaugcuggauggcggcaacaugcucgaaacaaucaaagucucaccacaaacaauggacgguauccucaaauccauacuaaaagucaagaaaacucugggaauguucauauccgacacucccggagaacgcaaccccuaugaaaacauccuauacaaaaucugccugucaggagacggcuggcccuacaucgcuucccgaacaagcaucacaggacgcgccugggaaaacacaguuguagaccucgaaagcgacggcaaaccacaaaaagccggaucaaacaacucaaacaaaucccugcagagcgcgggcuucgccgccggucuaaccuauagccaacuaaugacccucaaagacgccaugcuccaacuggauccaaacgccaaaaccuggauggacauagagggccgccccgaagacccagucgagaucgcccuauaucaacccagcucaggcugcuacauccacuucuuccgcgaaccaacagaccucaaacaauucaaacaagacgccaaauacucucacggcauagacgucacagaucuauucgccgcacaaccaggacuuaccucagccguaauugaagcccucccccgcaacauggucauaaccugccaaggauccgacgacaucaagaaacuccuagaaucacaaggccggaaagauaucaaacuuaucgacauagcgcuaucaaaaacagacuccagaaaguacgaaaacgcagucugggaccaguacaaagaccucugccacaugcauaccggcgucgucgucgaaaagaagaaaagaggcggaaaagaggaaaucacgccccacugcgcccucauggacugcauaauguucgacgcagccgucagcggcggacucaacacccuaguccuccgcgccguacucccccgcgacaugguauuccguacauccacuccacgcguaguccuaugaggacuagucccuguucccagagcccacuuuuuuuucuuuuuuugaaauaaaauagccugucuuucagaucuaaaaaaaaaaaaaaaaaaaaaaaaaaaaaaaaaaaaaaaaaaaaaaaaaaaaaaaaaaaaaaaaugcaucccccccccccccccccccccccccccccccaaaggcucuuuucagagccaccagaauu

SEQ ID NO: 10070 - RNA, 1986 nt, Artificial Sequence
  mRNA product Design a-1 comprising derived and/or modified sequence from LASV(G3010-SLE-2013;Clade IV)__AIT17345__NP (opt11)
gggagagucccgcagucggcguccagcggcucugcuuguucgugugugugucguugcaggccuuauucaagcuuaccauguccgccucaaaagaaaucaaauccuuccucuggacacaaagccuccgccgcgaacucuccggauacugcucaaacaucaaacuucaaguagucaaagacgcccaggccuuacuacacggucuggacuucagugaaguuuccaacguccaacgccucaugcgaaaagaaagacgcgacgacaacgaccuaaaacgccuccgagaccucaaccaagcugucaacaaccuggucgaacuaaaauccacacaacaaaaaucaauccuacgaguaggcacccucaccucagacgaccuccucauccucgcagccgaucucgaaaaacuaaaaucaaaagucacccgcaccgaacgaccacucuccgccggcgucuauaugggaaaccugucaagccaacaacucgaccaacgccgcgcacuacucagcaugauuggcaugucaucaggcguccaaggcgcccgcgccggccgugacggcguaguacggguaugggacguuaagaacgcagaacuccucaacaaucaguucggcaccaugcccucccuaacacucgcuugccucaccaaacaaggacaaguagaucuaaacgacgucguacaagcgcuaacugaccucggacuuauauacaccgcaaaauacccaaauacaucagaccucgacagacuaacccaaagccacccaauccucaacaugaucgacacuaagaaauccucccuaaacauaucaggauacaacuucucccucggcgcagcagucaaagccggggcaugcaugcucgacggcgggaacaugcuagaaaccaucaaagucucgccccagaccauggacggcauccuaaaaagcauacucaaagucaagaaagcacucggcauguucaucuccgaaaccccaggcgagcgcaaccccuacgaaaacauucuauacaaaaucugccucucgggggacggcuggccauacaucgccucacgaaccucaaucacugguagagccugggaaaauaccgucguagaucucgaaagcgauggcaaaccucaaaaagcaggaucaaacaacaguaacaaaagccuucaauccgcaggcuuuacggccggccuuacuuacucccaacuaaugacccucaaagacgcaaugcuacaacuagaccccaacgccaaaaccuggauggacaucgaaggccgacccgaggacccugucgaggucgcucuuuaccaacccagcucaggaugcuacauccacuuuuuccgcgagcccaccgaccucaaacaauucaaacaagacgccaaauacucccauggcaucgacgucacagaccuauucgccgcccaaccaggccuuaccucagcagucaucgacgcccuacccagaaacauggucauaaccugccaaggcucagacgacauaaagaaacuacucgaaucccaaggacgcaaagacaucaaacucaucgacauagcacucuccaaaaccgacucacgcaaauacgaaaacgccgucugggaccaauacaaagaccuaugccauaugcacacaggcguugucgucgagaaaaagaaacgcggaggaaaagaagaaaucacaccccacugcgcccuaauggacugcaucauguucgacgcugcagucagcgguggccuaaacacgagcguccuccgcgcaguccucccccgcgacaugguuuucagaaccuccacuccccgagucguucucuaaggacuagucccuguucccagagcccacuuuuuuuucuuuuuuugaaauaaaauagccugucuuucagaucuaaaaaaaaaaaaaaaaaaaaaaaaaaaaaaaaaaaaaaaaaaaaaaaaaaaaaaaaaaaaaaaaugcaucccccccccccccccccccccccccccccccaaaggcucuuuucagagccaccagaauu

SEQ ID NO: 10071 - RNA, 1986 nt, Artificial Sequence
  mRNA product Design a-1 comprising derived and/or modified sequence from LASV(G502-SLE-2009;Clade IV)__AIT17127__NP (opt11)
gggagagucccgcagucggcguccagcggcucugcuuguucgugugugugucguugcaggccuuauucaagcuuaccauguccgccuccaaagaaauaaaauccuuucuauggacccaaucccuucgccgcgaacucuccggcuacugcuccaauaucaaacuccaagucgucaaagacgcccaagcacuacuacacggccuagacuucucagaagucucaaacguccaacgacucaugcgaaaagagagacgcgacgacaacgaccuaaaacgccuaagagaccucaaccaagccguaaacaaccucgucgaacuuaaaagcacgcaacaaaaauccauccuccgaguaggcacccuaaccucagacgaccuacuuauacuagcagcggaccucgaaaaacucaagagcaaggucauccgcacugaacgcccacuauccgcaggcgucuacaugggaaaccucucaucccaacaacucgaccaacgccgggcccuacucuccaugaucggcauguccgguggaaaccaaggagugcgagcaggcaaagacggcgucguacgcguaugggacgucaaaaacgcugaacuccucaacaaccaauuuggaacaaugcccagccucacccuugccugccucaccaaacaaggccaaguagaccuaaacgacgccguacaagcccuaaccgaccuaggacucauuuacacagccaaauacccuaacaccuccgaccuagaccgccucacacaaucccacccgauccuaaacaugauagacaccaaaaaguccucccucaacauauccggcuacaacuucagccucggagcugcagucaaagcaggcgccugcaugcucgacggcggcaacaugcucgaaaccaucaaagucagcccccaaaccauggacggcauacuaaaguccaucuugaaaguaaagaaagcgcuaggcauguucaucuccgacacaccaggagaaagaaaccccuacgaaaacauccuauacaaaauaugccucuccggagacggcuggccauacaucgccucacgcaccuccaucacaggccgugcaugggaaaacaccgucgucgaccuagaauccgacggcaaaccacaaaaagcaggcuccaacaacuccaacaaaucacuccaaucagcuggcuucaccgcuggucuaacauacucccagcucaugacccugaaagaugccaugcugcaacuagacccaaacaccaaaaccuggauggacaucgaaggacgacccgaagauccagucgaaauagcccucuaccaaccaucguccggcugcuacauccacuucuuccgcgaaccaacugaccucaaacaauucaaacaggacgcaaaauacucccacggaaucgacgucaccgaccuauucgcagcacaaccaggcuuaacauccgcugucaucgaugcccucccccgcaacaugguaauuacaugccaaggcuccgacgacauccgaaaacuacucgaaucccaaggacgcaaagacaucaaacucauagacauagcccucaacaaaaccgacucccgcaaauacgaaaacgcagucugggaccaauauaaagaccucugccauaugcacaccggugucgucgucgaaaagaagaaacgaggcgguaaagaagaaauaaccccgcacugcgcccuuauggacugcaucauguucgacgccgccgucucaggcggccucaauaccagcguacuccgggcaguccucccccgggacaugguauuccggacaagcacaccccgcguaguccucuagggacuagucccuguucccagagcccacuuuuuuuucuuuuuuugaaauaaaauagccugucuuucagaucuaaaaaaaaaaaaaaaaaaaaaaaaaaaaaaaaaaaaaaaaaaaaaaaaaaaaaaaaaaaaaaaaugcaucccccccccccccccccccccccccccccccaaaggcucuuuucagagccaccagaauu

SEQ ID NO: 10072 - RNA, 1986 nt, Artificial Sequence
  mRNA product Design a-1 comprising derived and/or modified sequence from LASV(G733-SLE-2010;Clade IV)__AIT17155__NP (opt11)
gggagagucccgcagucggcguccagcggcucugcuuguucgugugugugucguugcaggccuuauucaagcuuaccaugucugccagcaaagaaaucaaauccuuccucuggacucaaucacuccgccgcgaacuaagcggauacugcucgaacauuaaacuucaagugguaaaagacgcccaagcccuccuccacggacucgacuucucagaaguaucaaacguccaacgccuaaugcgcaaagagcggcgcgacgacaacgaccucaaacgccuccgcgaccucaaccaagcagucaacaaccucgucgaacucaaaucaacacaacaaaaaucaguacuacgcgucggcacauuaacaagcgacgaacuucucguacucgcagccgaccucgagaaacugaaauccaaaguuaucagaacagagcgaccccucuccgccggagucuacaugggaaaccucuccucccagcaacucgaccaacgacgcgcccuccucagcaugaucggcauguccggcggcaaccaaggcgcccgcacaggccgcgacggcguaguccgaguaugggacguuaaaaacgccgaacuccucaacaaccaauucggaacaaugccaucucuuacacucgcuugccuaaccaaacaaggacaaguagaccuaaacgacgccgugcaagcacuaaccgacuugggccucauauacaccgccaaauaccccaacaccuccgaccuagaccgccucacacaaucacacccaauacucaacaugaucgacaccaaaaagucaagucucaacauaagcggcuacaacuucucacucggcgccgccgucaaagccggcgcaugcaugcuggacggaggaaacaugcucgaaacaaucaaagucucaccccaaaccauggacggaauccucaaauccauacucaaagucaagaaagcccuaggcauguucauaagcgauacacccggcgaacgcaaccccuacgaaaacauccuauacaaaauaugccucuccggagauggauggcccuacaucgccucacgcaccagcaucacgggccgcgcuugggaaaacacaguagucgaccuagaaagcgacggcaaaccacaaaaagcaggcuccaacaauuccaacaaaucgcuucaguccgcuggcuucaccgccggccuaaccuacucacaacucaugacccugaaagacgcuaugcuccaacucgaccccaacgcaaaaacauggauggacaucgagggcagacccgaggaccccgucgaaauagcccucuaccaaccuuccuccggcugcuacauacacuucuucagagaacccaccgaccucaaacaauucaaacaagacgccaaauacucccacggcaucgacgucaccgaccucuucgccgcccagccaggacucaccuccgccgucaucgacgcccuccccaggaacaugguaauuaccugccaaggauccgacgacauccgcaaacuccucgaaucacaaggacgcaaagacaucaaacuaauagacaucgcccuaucaaaaauagacucccgcaaauacgaaaaugccguaugggaccaauacaaagaucugugccacaugcacaccggagucgucgucgaaaagaagaaacgcggcggaaaagaagaaauaacuccccacugcgcacuaauggacugcauaauguucgacgcagccgucuccggaggacuaaacucacucguccuaagagcagugcucccccgcgacaugguauuccgcacguccacaccccgcguaguccuauaaggacuagucccuguucccagagcccacuuuuuuuucuuuuuuugaaauaaaauagccugucuuucagaucuaaaaaaaaaaaaaaaaaaaaaaaaaaaaaaaaaaaaaaaaaaaaaaaaaaaaaaaaaaaaaaaaugcaucccccccccccccccccccccccccccccccaaaggcucuuuucagagccaccagaauu

SEQ ID NO: 10073 - RNA, 1986 nt, Artificial Sequence
  mRNA product Design a-1 comprising derived and/or modified sequence from MOPV/LASV reassortant(IGS-1;Clade IV)__AFY05578__NP (opt11)
gggagagucccgcagucggcguccagcggcucugcuuguucgugugugugucguugcaggccuuauucaagcuuaccaugagcgccagcaaagaaaucaagagcuuccuuuggacgcagucguuacgacgcgaacucuccggcuacugcucaaacaucaaacuacaaguagucaaagaugcccaagcccuacuccacggacucgacuucuccgaagucagcaacgugcaacgccuaaugcgcaaagaacgacgcgacgacaacgaccucaaacgacuccgagaccuaaaccaagccgucaacaaccucguagaacuaaaauccacacaacaaaaauccauauuacgagucggcacccucaccagcgaugaucuucuaauacuggccgcagaccucgaaaaacuucgcucaaaagugauucgcaccgaacgcccacucagcgccggaguuuacaugggcaaucucuccagccaacaacucgaccaacgaagggcccuccucaacaugauugggauguccggaggcaaccaaggagcccgagccggacgcgacggcguaguccgcguaugggacgucaaaaacgcagaacuacucagcaaccaauucggcaccaugcccucacucacgcuugccuguuugaccaaacaaggacagguagaucuuaacgacgcaguccaagcacuaacagaccucggccuaaucuacaccgcaaaauaccccaacaccuccgaccuagaccgacucacucaaucgcaccccauccuaaacaugaucgacaccaagaaaucgagccucaacauuagcgguuacaacuucucccuaggcgccgccgucaaagccggugcaugcaugcuugacggcggaaauaugcuagaaaccaucaaaguauccccacaaacaauggacggaauccucaaaucgauucucaaagucaagaaagcccucggcauguucaucucagacaccccaggagaaaggaacccguacgaaaauauccucuacaaaauaugucucucaggcgacggcuggccauacaucgccucccgcacaaguauaaccggacgagccugggaaaacaccguaguagaccuagaaagcgacgguaaaccccaaaaagcagacucuaacaacagcucgaaaucccuccaaagcgcaggcuucacagcgggccuaaccuacagccagcucaugacccucaaagacgcaaugcuccagcucgaccccaacgcgaaaaccuggauggacaucgagggcagaccagaagacccagucgaaaucgcacucuaccaacccuccuccggcugcuacauccacuuuuuccgcgaacccaccgaccuaaaacaauuuaaacaagacgcaaaauacucccacggcauagacguaacagaccucuucgcaacccagccaggccuaaccuccgccgucaucgacgcacucccccgcaacaugguaauaaccugccaaggcucagacgacauccgcaaacuccucgaaucccaaggcagaaaagacaucaaacuuaucgacauagaucucucuaaaaccgacucccguaaauacgagaacgccgucugggaccaauacaaagaccuaugccauaugcacaccggaguuguagucgaaaagaagaaacggggagguaaagaagaaauaacaccccacugcgcccuaauggacugcauuauguucgacgccgcaguaagcggcggccuaaacaccuccguccuccgcgcaguccucccacgcgacauggucuucagaaccuccacacccagagucguccucuaaggacuagucccuguucccagagcccacuuuuuuuucuuuuuuugaaauaaaauagccugucuuucagaucuaaaaaaaaaaaaaaaaaaaaaaaaaaaaaaaaaaaaaaaaaaaaaaaaaaaaaaaaaaaaaaaaugcaucccccccccccccccccccccccccccccccaaaggcucuuuucagagccaccagaauu

SEQ ID NO: 10074 - RNA, 1986 nt, Artificial Sequence
  mRNA product Design a-1 comprising derived and/or modified sequence from LASV(LM765-SLE-2012;Clade IV)__AIT17815__NP (opt11)
gggagagucccgcagucggcguccagcggcucugcuuguucgugugugugucguugcaggccuuauucaagcuuaccaugucagcauccaaagagaucaaauccuuccuguggacccaaucccuucgacgcgaacuaagcggauacugcagcaacaucaaacuacaagucguaaaagacgcccaagcacuccuacacggccuagacuucuccgagguauccaauguccaacgccucaugaggaaagaacgccgcgaugauaacgaucuuaaaagauuacgcgaccucaaccaggccguaaacaaccuagucgaacucaaaucaacccaacaaaaaucaauacuccgcgucggaacccuuacaucagacgaccuacucauacuggccgcagaccuugaaaaacucaaaucgaaagucacccgcaccgaaagaccccucuccgccggcgucuacaugggcaaccucagcucacaacagcucgaccaacgacgagcgcuccucgacaugauaggcauguccggaagcaaccaaggcgccagagccggcagagacggcgucguacgcgucugggacgucaaaaacgccgaacuccucaacaaccaauucggcaccaugcccucucucacgcucgccugccucaccaagcaaggccaagucgaccucaacgacgcaguacaagcacuaacggaccuaggccugaucuacacagccaaguaccccaacaccucggaccucgaccggcucacccaaagccaccccauccugaacaugaucgacaccaagaaauccucccuuaacauaucaggcuacaacuucucccugggcgccgcaguaaaagccggcgcaugcaugcuagacggaggaaacaugcucgaaacaaucaaagucucgccccaaacaauggauggcauacuaaaauccauccucaaagucaagaaagcccuaggaauguucauaucagaugcccccggcgaacgaaaccccuacgagaacauccuauacaaaauuugccucagcggcgacgguuggccguauaucgccaguagaaccuccaucaccggccgcgccugggaaaacaccguagucgaccuagaaagcgauggcaaaccccaaaaagcaggaaguaacggauccaacaaaagucuacaauccgccggcuucaccgccggucuaaccuacucccaacucaugacccucaaagacgccaugcuacaacuagacccaaacgccaaaaccuggauggacaucgaaggcagacccgaagacccagucgaaaucgcacuguaccaacccagcuccggcugcuacauccacuucuuccgcgaacccacagaccucaaacaauucaaacaagacgccaaauacagccacggcauagacguaaccgaccuauucgccgcacagcccggcuuaaccagcgcagucaucgacgcccuacccagaaacauggucauaaccugccaaggcucagacgacauccgcaaacucuucgagagccaaggcagaaaagacaucaaacucauagacaucgcccucagcaagacugacucccgcaaauacgaaaacgccgucugggaccaauacaaggaccuaugccauaugcacaccgggaucguaguagaaaagaagaaacgaggcggaaaagaggaaauaaccccacauugcgcccucauggacugcaucauguucgacgccgccguaagcggcggccuaaacaccucaguccuuagagccguccucccacgcgacauggucuuccgcaccucuacgccccgaguaguccuauaaggacuagucccuguucccagagcccacuuuuuuuucuuuuuuugaaauaaaauagccugucuuucagaucuaaaaaaaaaaaaaaaaaaaaaaaaaaaaaaaaaaaaaaaaaaaaaaaaaaaaaaaaaaaaaaaaugcaucccccccccccccccccccccccccccccccaaaggcucuuuucagagccaccagaauu

SEQ ID NO: 10075 - RNA, 1986 nt, Artificial Sequence
  mRNA product Design a-1 comprising derived and/or modified sequence from LASV(LM776-SLE-2012;Clade IV)__AIT17825__NP (opt11)
gggagagucccgcagucggcguccagcggcucugcuuguucgugugugugucguugcaggccuuauucaagcuuaccaugucagccuccaaagaaaucaaauccuuccucuggacccaaucccuccgccgcgaacuauccuccuacugcuccaacaucaaacuacaagucgucaaagacgcccaagcccuccugcacggacucgacuucucagaagucagcaacguacaacgacucaugcgaaaagaacgaagagacgacaacgaccucaaacgacuuagagaccucaaccaagcagucaacaaccucguagaacuaaaaucuacccaacaaaaaucaauacuccgcgucggcaccuuaacaagcgacgacuuacucauccucgcugccgaccucgaaaaacuaaaauccaaaguaacccgcaccgaacgcccccucucagccggcgucuacaugggcaaccucucaucccaacagcuagaccaacgcagagcccuccucuccaugauuggaauguccggaagcaaccaaggugccagagcaggccgagacggagucguccgcguuugggacgucaagaacgcagaacuccuaaacaaccaguucggcacaaugcccucccucacacuagcgugucucaccaaacaaggucaagucgaccuaaacgacgcaguacaagcccucacagaccucggccuaauauacacagccaaauacccaaacaccagcgaccucgaccgccucacccaaagccaccccauauuaaacaugauagacaccaagaaauccucucucaacaucuccggcuacaacuucucacuaggcgcagcaguaaaagccggcgcaugcaugcuggacgguggcaacaugcucgaaacaaucaaagucucaccccaaaccauggacggcauccuaaaauccauacucaaagucaagaaagcacucggaauguucaucucagacacccccggcgaacgcaaccccuacgaaaacauacucuacaaaauuugccucuccggcgacggcuggcccuauaucgccuccagaacauccaucaccggccgcgccugggaaaacaccguaguagaccuugaauccgacggaaaaccucagaaagccggaagcaacaacucaaacaaaucccuacaaucagccggauucaccgccggucuaacauacagccaacucaugacccuaaaggacgccaugcuacaacucgacccgaacgccaaaaccuggauggacaucgaaggccgacccgaagaccccgucgaggucgcccucuaccaacccagcagcggcugcuacauccacuucuucagagaaccaaccgaucucaagcaauuuaaacaagacgcgaaauacucccacggcauagaugucaccgaccucuucgcugcccaacccggccucaccucagccgucaucgacgcccuucccagaaacauggucaucacgugccaaggcuccgacgauauacgaaagcuacucgaaucgcaaggccgcaaggacaucaaguuaaucgacaucgcgcucuccaaaaccgacuccagaaaauacgaaaacgccgucugggaccaauacaaagaccucugccacaugcacaccggagucgucgucgaaaagaagaaaagaggcggcaaagaagaaauuaccccgcacugcgcacuaauggacugcaucauguucgacgccgcagucuccggaggccucaacaccucgguccuccgcgcgguacucccccgcgacauggucuuccguacaucaacaccccgcguaguccucuaaggacuagucccuguucccagagcccacuuuuuuuucuuuuuuugaaauaaaauagccugucuuucagaucuaaaaaaaaaaaaaaaaaaaaaaaaaaaaaaaaaaaaaaaaaaaaaaaaaaaaaaaaaaaaaaaaugcaucccccccccccccccccccccccccccccccaaaggcucuuuucagagccaccagaauu

SEQ ID NO: 10076 - RNA, 1986 nt, Artificial Sequence
  mRNA product Design a-1 comprising derived and/or modified sequence from LASV(Mad39;Clade IV)__ANH09723__NP (opt11)
gggagagucccgcagucggcguccagcggcucugcuuguucgugugugugucguugcaggccuuauucaagcuuaccaugucagcauccaaagaaaucaaguccuuuuuauggacgcaaucacuccgacgcgaacuauccggcuacuguuccaacaucaaacuccaaguagucaaggacgcacaagcacuucuccacggccuagacuucucagaagucagcaacguacaacgacuaaugcgcaaacaacggcgcgacgacaaugaccuaaagcgccucagagaccuaaaccaagccgucaacaaccuuguagagcuaaaguccacccaacaaaaauccguccugcgcguuggaacccuaacaagcgacgaccuccucacacucgcagcggaccuagaaaagcucaaauccaaggucacacgaacagagagaccccuaaccgcaggagucuauaugggcaaccuaagcucccaacaacuagaccaaagacgggcacuccucaacaugauaggaaugagcggcggaaaccaaggugcaagaaccggacgggacgggguaguccgagucugggacgucaagaacgcagaacuacuaaacaaccaguucgguaccaugcccucccucacccucgccugccugacaaaacaaggccaagucgaccucaacgacguuguccaagcacuaacagaccucggccuaauauacaccgcaaaguaccccaacacaucagaccuggaccgacuaacccaaucccaccccauccucaacaugaucgacaccaacaaguccucccuuaacauuagcggcuacaacuucagccucggagccgcagucaaggccggcgccugcaugcuagacggcggcaacaugcuagaaaccaucaaagucucaccccaaaccauggacggcauccucaaaagcauuuuaaaagucaaaaagucacuaggcauguucaucagcgacacccccggagagagaaaccccuacgaaaauauccucuacaaaauaugccucucaggcgacggcuggcccuacauagcaagccgaaccagcaucacaggcagagcaugggaaaacaccgucgucgaucuagaaucaggcggcaaaccccaaaaagccggaucaaacaacuccaacaaaucucuacaaagcgccggcuucgccgcaggacucacauacucccaacucaugacccuaaaagacgccaugcuucagcucgacccgaacgcaaaaaccuggauggacauagaaggcagacccgaagacccaguagaaauagcacuauaccagcccaucucaggguguuacauccacuucuuccgcgaaccgaccgaucuaaaacaauucaaacaagacgccaaauacucccacggcaucgacguaaccgaccuguuugcagcucaaccaggccucaccuccgccgucauagaagcccucccccgaaacauggucauaaccugccaaggcagcgacgacauccgcaaacuauucgaaucacagggcagaaaagacaucaaacucaucgacaucgcacucagcaaaaccgacucacguaaguacgagaacgcggucugggaccaauacaaagaccucugccacaugcacaccggugucgucgucgaaaagaaaaagaaaggcggaaaagaagaaauaaccccucacugcgcccucauggacugcaucauguuugacgccgccgucagcggaggccuaaacacgcuaguccuacgagcaguacucccacgcgacaugguauuccgcacaucaacccccaaaguagucuuauaaggacuagucccuguucccagagcccacuuuuuuuucuuuuuuugaaauaaaauagccugucuuucagaucuaaaaaaaaaaaaaaaaaaaaaaaaaaaaaaaaaaaaaaaaaaaaaaaaaaaaaaaaaaaaaaaaugcaucccccccccccccccccccccccccccccccaaaggcucuuuucagagccaccagaauu

SEQ ID NO: 10077 - RNA, 1986 nt, Artificial Sequence
  mRNA product Design a-1 comprising derived and/or modified sequence from LASV(Z0947-SLE-2011;Clade IV)__AIT17841__NP (opt11)
gggagagucccgcagucggcguccagcggcucugcuuguucgugugugugucguugcaggccuuauucaagcuuaccaugagcgccucaaaggaaaucaaaucguuccucuggacacaaucccuaagacgcgaacucucaggcuacugcuccaacaucaaacuacaagucguaaaagacgcgcaagcacuacuccacggacuagacuucagcgagguuuccaacguacaacgccugaugcgaaaagaacgccgagacgacaacgaccucaagcgacugcgcgaccucaaucaagccguaaacaaccucgucgaacuaaaauccacccaacaaaagucaauccuacgcguaggcacacugaccagcgaugaccuccucauccuugccgcagaccucgaaaagcuaaaaagcaaagucacccgcaccgaacgcccgcuauccgccggagucuacaugggaaaccuaaguagccaacaacucgaccaacggcgcgcacuacuaaacaugauaggcaugagcggcuccaaccaaggugcacguacaggcagggacggggucguacgcgucugggacgucaaaaacgccgaacuccucaacaaccaauucgguacaaugcccucacucacacuagcgugccucaccaagcagggacaaguagaccucaacgacgcaguacaagcgcuaacagaccucggccucauauacaccgcaaaauacccaaacaccucugaccuagaccgacucacucagucacacccaauccucaacaugauagacacaaagaaauccucgcuaaacauauccggcuacaauuucucccucggagccgccgucaaagccggcgcgugcaugcucgacggaggcaacaugcucgaaaccauaaaagucucaccacaaacaauggacggaauccucaaauccauccuaaaggucaagaaagcccuaggaauguucauauccgacgcccccggagaacgcaaccccuaugaaaacauccucuacaaaaucugccucuccggcgacggcuggcccuacaucgccagccgaacaagcaucaccggccgugccugggaaaacaccgucguagaucucgaaagcgacggaaaaccccaaaaagcaggcucgaacggcuccaacaaaucccuccagagcgccggcuucaccgcaggccuaaccuacucacaacugaugacacucaaagacgccaugcuacaacucgaccccaacgcaaaaaccuggauggacaucgaaggccgccccgaagaccccgucgagauagcucucuaccaacccuccucaggaugcuacauccacuucuuccgcgaaccaaccgaccugaaacaauucaaacaggacgcaaaauacucccacggcauagacguaaccgaccuauucgccgcgcaaccaggacucaccuccgccgucaucgacgcccucccaagaaacaugguuauaaccugccaaggcuccgacgacauccgcaaacuauucgaaucccaaggccgcaaagacaucaaguuaaucgacaucgcccugucaaagacagacucccgcaaauacgaaaacgcggucugggaccaauacaaagaccuuugccacaugcacaccgguaucgucguagagaaaaagaaacgaggaggcaaagaagagauaaccccacacugcgcuuuaauggacugcauaauguucgacgccgccgucucaggcggccuaaacaccagcguccuccgagcaguccucccccgcgacauggucuuucggaccuccacccccagagucguccuaugaggacuagucccuguucccagagcccacuuuuuuuucuuuuuuugaaauaaaauagccugucuuucagaucuaaaaaaaaaaaaaaaaaaaaaaaaaaaaaaaaaaaaaaaaaaaaaaaaaaaaaaaaaaaaaaaaugcaucccccccccccccccccccccccccccccccaaaggcucuuuucagagccaccagaauu

SEQ ID NO: 10078 - RNA, 2005 nt, Artificial Sequence
  mRNA product Design a-2 comprising derived and/or modified sequence from LASV(Josiah;Clade IV)__NP_694869__NP (wt)
gggagaguccgcucagccagguugcagaagcggcuuagcguguguccuaaucuucucucugcguguagguaggccugugccgcaaacaagcuuaccaugagugccucaaaggaaauaaaauccuuuuuguggacacaaucuuugaggagggaauuaucugguuacugcuccaacaucaaacuacagguggugaaagaugcccaggcucuuuuacauggacuugacuucuccgaagucaguaauguucaacgguugaugcgcaaggagagaagggaugacaaugauuugaaacgguugagggaccuaaaucaagcggucaacaaucuuguugaauuaaaaucaacucaacaaaagaguauacugagaguugggacucuaaccucagaugacuuauuaaucuuagccgcugaucuagagaaguuaaagucaaaggugaucagaacagaaaggccauuaagugcaggugucuauaugggcaaccuaagcucacagcaacuugaccaaagaagagcucuccugaauaugauaggaaugaguggugguaaucaaggggcucgggcugggagagauggaguggugagaguuugggaugugaaaaaugcagaguugcucaauaaucaguucgggaccaugccaagucugacacuggcaugucugacaaaacaggggcagguugacuugaaugaugcaguacaagcauugacagauuuggguuugaucuacacagcaaaguaucccaacacuucagacuuagacaggcugacucaaagucaucccauccuaaauaugauugacaccaagaaaagcucuuugaauaucucagguuauaauuuuagcuugggugcagcugugaaggcaggagcuugcaugcuggaugguggcaauauguuggagacaaucaaggugucaccucagacaauggaugguauccucaaauccauuuuaaaggucaagaaggcucuuggaauguucauuucagacaccccuggugaaaggaauccuuaugaaaacauacucuacaagauuuguuugucaggagauggauggccauauauugcaucaagaaccucaauaacaggaagggccugggaaaacacugucguugaucuggaaucagaugggaagccacagaaagcugacagcaacaauuccaguaaaucccugcagucggcaggguuuaccgcugggcuuaccuauucucagcugaugacccucaaggaugcaaugcugcaacuugacccaaaugcuaagaccuggauggacauugaaggaagaccugaagauccaguggaaauugcccucuaucaaccaaguucaggcugcuacauacacuucuuccgugaaccuacugauuuaaagcaguucaagcaggaugcuaaguacucacaugggauugaugucacagaccucuucgcuacacaaccgggcuugaccagugcugucauugaugcacucccccggaauauggucauuaccugucagggguccgaugacauaaggaaacuccuugaaucacaaggaagaaaagacauuaaacuaauugauauugcccucagcaaaacugauuccaggaaguaugaaaaugcagucugggaccaguauaaagacuuaugccacaugcacacaggugucguuguugaaaagaagaaaagaggcgguaaagaggaaauaaccccucacugugcacuaauggacugcaucauguuugaugcagcagugucaggaggacugaacacaucgguuuugagagcagugcugcccagagauaugguguucagaacaucgacaccuagagucguucuguaaggacuagucccuguucccagagcccacuuuuuuuucuuuuuuugaaauaaaauagccugucuuucagaucuaaaaaaaaaaaaaaaaaaaaaaaaaaaaaaaaaaaaaaaaaaaaaaaaaaaaaaaaaaaaaaaaugcaucccccccccccccccccccccccccccccccaaaggcucuuuucagagccaccagaauu

SEQ ID NO: 10079 - RNA, 2005 nt, Artificial Sequence
  mRNA product Design a-2 comprising derived and/or modified sequence from LASV(LP;Clade I)__AAF86702__NP (wt)
gggagaguccgcucagccagguugcagaagcggcuuagcguguguccuaaucuucucucugcguguagguaggccugugccgcaaacaagcuuaccaugagcaacuccaaggaaaucaaaucauuccuuuggacucaguccuuacgaagggaacuaucugguuacuguucuaacauaaaguugcaaguugucaaagaugcucaggcucuccugcauggccuugacuuuucugaggucagcaaugugcagaggcugaugcgcaagcagaagagagaugaugcagaccuaaagcgacugagggaucugaaucaagcugucaacaaucuuguugaacugaagucaacucaacagaagaaugucuuaagggucggcaccuugaguucagaugaucuaauaacuuuggcagcggaccuggaaaaacucaaguccaaagucauaaggacagaaaggccuuugagcucagguguuuacauggggaauuuaagcucacaacagcuugaucaaaggagggcucucuugagcaugauugggaugucagguggaccucaaggaaauaggacagguggggauggugucgucaggguuugggacguaaaaaaugcagaauuacucaauaaccaauuuggaaccaugccaagccucaccuuggcgugccucaccaaacaagggcaaguggaccucaaugaugcugugcaagcuuuaacagauuuagguuugauuuacacagcaaaguacccgaacucuucagaucuagacaugcucacucagagucacccuauacuaggaaugguugacacaaaaaagaguucccugaacaucucagguuacaacuucagucugggggcugcaguuaaagcuggugcuugcaugcuugaugggggcaacauguuggaaacaauaaaagugucaccacaaacaauggacgguauuuugaaaucuauucugaaggucaaaagaucacugggaauguucauuucugacacuccuggugaaagaaacccauaugagaacauccucuauaagaucugccuuucaggugaagguuggccguauauugcaucaagaacaucaauuacugggagagcuugggaaaacacucuuguugauuuggaaucugacaacaaaccaccgaaacuaaauagcgcugguuccaauaaaagcuugcaggcugcaggucuaaaugcuggguugaccuauucucaacugaugacacuaaaagauuguauguuacaguuggacccaaguagcaaaacauggauagauauugagggcaggccugaagacccaguggagauugcuuuguuucaaccaagcucugguuguuacauacacuuuuuuagagaaccuacugaccuuaagcaauucaaacaggaugcuaaguacucacaugggauagauguuacagaucuuuuuuccacacaacccgggcugacaagugcugucauagaggcacuuccccgcaauaugguguugaccugccaggggucagaugacaucaaaaagcuguuggagucucaagggagaagagacaucaaauugauugauauuucuuugagcaaagcagauucaaggaaguuugaaaaugcugugugggaccaauacaaagacuugugucacaugcacacgggaguagucguugagaagaaaaagagggguggaaaagaggaaaucaccccacauugcgcuuuacuggacugcaucauguuugaugcagcuacuacugguaguuugaacaucacaacacugagggcaguacuucccagagacauggucuucaggaccagcaccccuaaagucguucuguaaggacuagucccuguucccagagcccacuuuuuuuucuuuuuuugaaauaaaauagccugucuuucagaucuaaaaaaaaaaaaaaaaaaaaaaaaaaaaaaaaaaaaaaaaaaaaaaaaaaaaaaaaaaaaaaaaugcaucccccccccccccccccccccccccccccccaaaggcucuuuucagagccaccagaauu

SEQ ID NO: 10080 - RNA, 2005 nt, Artificial Sequence
  mRNA product Design a-2 comprising derived and/or modified sequence from LASV(803213;Clade II)__AAF86704__NP (wt)
gggagaguccgcucagccagguugcagaagcggcuuagcguguguccuaaucuucucucugcguguagguaggccugugccgcaaacaagcuuaccaugagugcuuccaaggaggugaaaucauuccuuuggacacagucauugaggagagagcuuucagguuauuguucuaacauaaagcuucaaguuguuaaggaugcccaggcccuccuucacggccuugacuucucugaggucaacaaugugcaacgucuaaugcgcaaacagaaaagagaugauggugauuuaaaacgucuuagagaccugaaucaggcagucaacaaccuuguugaacucaaaucaacacaacaaaagagcauuuugagaguuggaacacugaccucagaugacuugcugacauuggcagcugacuuagagaaacugaagucaaaagucaucagaacagaaagaccacuaagcucggguguguacauggggaauuuaaguacacagcagcuugagcagagaagggcauugcugaacaugauuggcaugguugguggagcacagggcacccaaccuggaagagacggaguuguuagggugugggaugucaaaaauccagaucucuuaaacaaccaguucggcaccaugccuaguuugacauuagcaugucuuacuaaacagggucaaguugaccuaaaugaugcuguccuagcacugacggacuugggacugauauacacagcuaaguacccuaacaguuccgaccuggacaggcuuucccaaagucauccgauacugaacaugguggacacuaagaagagcuccuugaacauuucugguuacaauuuuagcuugggagcugcaguaaaggcuggggccuguaugcucgaugggggcaacauguuggaaaccauuaagguuacgccucagacaauggaugguaucuugaaguccauuuuaaaggugaaaagaucuuugggaauguuugucucagauacaccuggugagaggaacccuuaugagaacauacuuuauaaaaucugucucucuggugauggcuggcccuacauagccucaagaaccuccauugugggcagggcuugggagaauacuacuguggaucucgagucagaugggaagccacaaaaagugggaacugcuggguccaauaagucuuugcaguccgcaggguuuccaacaggguugacuuauucacagcugaugacucuuaaagacucaaugaugcagcuugacccaagugccaaaacuuggauagacauugaaggucguccagaagacccuguggagauagcucuuuaucaaccuaugucaggcuguuacauacauuucuuuagagaaccaacagaucugaaacaguucaagcaagacgccaaguauucucaugggauugauguggcagaucuuuucccugcucaaccugguuugacuagugcaguuauugaagcucuuccucgcaauaugguguugacuugccaagguucagaugauaucaagaaacucuuagacucucaaggaaggagggacauaaagcuuauugauauuucauuaagcaagguugacucuaggaaguuugaaaaugcuguuugggaccagugcaaagacuugugccacaugcacacuggagugguuguugagaagaagaaaagaggaggcaaagaagaaaucaccccacauugugcccugauggauugcauaauguuugaugcagcugugucaggagggcucaacauaccaguuuuaagagcuguucuucccagagacaugguauuuagaaccucaagccccaaggucguccuguaaggacuagucccuguucccagagcccacuuuuuuuucuuuuuuugaaauaaaauagccugucuuucagaucuaaaaaaaaaaaaaaaaaaaaaaaaaaaaaaaaaaaaaaaaaaaaaaaaaaaaaaaaaaaaaaaaugcaucccccccccccccccccccccccccccccccaaaggcucuuuucagagccaccagaauu

SEQ ID NO: 10081 - RNA, 2008 nt, Artificial Sequence
  mRNA product Design a-2 comprising derived and/or modified sequence from LASV(GA391;Clade III)__CAA36646__NP (wt)
gggagaguccgcucagccagguugcagaagcggcuuagcguguguccuaaucuucucucugcguguagguaggccugugccgcaaacaagcuuaccaugagugcuuccaaggaagugaggucauucuuguggacucaaucccuaagaagggaacuaucuggcuacuguuccaacauaaaguugcagguaguuaaagacgcucaagcucuccuucauggucuugacuucuccgaggucaguaauguucagagauugaugcgcaagcagaaaagagaugauggcgaccuaaaacgacugagagaucucaaucaagcagucaacaaucuuguugagcucaaauccacacagcagaaaagugucuuaagaguuggaaccuuaaguucagacgaucuacuaauccuggccgcugauuuagaaaaacugaaaucaaaagucaccagaacagaaaggccuuugaguucaggaguuuauauggggaauuugaguucacaacagcuugaucaaaggagagcccuuuugaacaugauuggcaugacuggaguaaguggagggggaaagggugccagugauggcauugugagaguuugggaugucaaaaaugcagaguuacucaacaaucaguucggaacaaugccaagccuaacuuuagcaugccugaccaaacaggggcaaguggaccugaaugaugccguucaagcuuugacagauuuagggcugauuuacacagccaaauaccccaacucaucugaucucgacagauugucucagagucauccaauucugaauaugauugacacuaagaaaaguucacucaacaucucugguuacaauuucaguuugggugcugcugucaaagcaggggccugcaugcuugauggugguaacauguuagagacuauuaagguuucaccucagaccauggaugguaucuugaagucaaucuugaaaguuaagaagagucugggaauguuuguaucagacacaccgggugaaaggaacccuuaugagaacauccuauacaagaucugucucucaggagacggauggcccuauauugcaucaaggaccucgauugugggaagagcaugggaaaauacugugguggaccuugagcaagacaacaagccccagaaaauuggaaaugggggguccaacaagucauuacagucugcaggcuuugcugcaggauuaacuuacucucaguugaugacucucaaagauuucaagugcuucaacuugauucccaacgcaaaaaccuggauggauauugaaggaagaccagaagacccaguugagauagcccuuuaucaaccgagcucggguugcuauguacauuucuuuagggagccaacagauuugaagcaauucaaacaagaugcaaaguauucacaugguauugaugugacugauuuguuugcugcccaaccuggguuaaccagugcagugauagaagcccuuccucggaacauggucaucacuugccaaggaucagaggauaucagaaaacuccuugagucacaagggaggagagacauaaaacugauugacaucacucuuaguaaagcagauucaagaaaguuugagaaugcuguuugggaucaauucaaggaucuaugucacaugcacacugggguaguuguggagaaaaagaagagaggugguaaagaggaaauaacuccucauugugcacugauggauugcauuauguuugaugcagcaguuucaggaggacuugaugcaaaaguccugagaguugugcucccuagagacaugguguucagaacuucaacaccuaaagucguccuguagggacuagucccuguucccagagcccacuuuuuuuucuuuuuuugaaauaaaauagccugucuuucagaucuaaaaaaaaaaaaaaaaaaaaaaaaaaaaaaaaaaaaaaaaaaaaaaaaaaaaaaaaaaaaaaaaugcaucccccccccccccccccccccccccccccccaaaggcucuuuucagagccaccagaauu

SEQ ID NO: 10082 - RNA, 2005 nt, Artificial Sequence
  mRNA product Design a-2 comprising derived and/or modified sequence from LASV(AV;Clade V)__CCA30315__NP (wt)
gggagaguccgcucagccagguugcagaagcggcuuagcguguguccuaaucuucucucugcguguagguaggccugugccgcaaacaagcuuaccaugagugccuccaaagaagugaaaucuuucuuauggacacaaucucugaggagggaguugucggguuacuguuccaauaucaaacuucaaguggugaaggacgcucaagcucucuugcaugggcuugacuucucugaggucagcaauguccagcggcugaugcgcaaacaaaggagagaugauagugaccuaaagcgucuuagggaucugaaucaagcugucaacaaucuuguugagcugaaaucgacacaacagaaaagugugcugagaguugggacccuaaguucggacgauuuacugacucuggcggcugauuuagaaaagcugaaaucaaaaguuacaagaacagaaaggcccuugaguucaggugucuacaugggaaaccuaaguucacagcagcucgaucagaggagggcacuucuaaauuugauugggaugacaaacggcagucaggggucacaggcugggagagauggagugguaagagucugggaugugaagaaugcagaauuguugaacaaucaauuugggacaaugccgagccugacauuagcaugucugacaaagcagggacaaguugacuuaaaugaugugguacaagcacucacagaucugggcuugauuuauacagcuaaauauccuaacacaucagauuuagauagguuaacucaaagucaucccauuuuaaacaugauugacaccaagaagagcucccugaacaucucaggcuacaauuuuagucugggugccgcagugaaagcaggugccugcaugcuggaugguggcaacauguuagaaacaaucaagguuucgccucaaucaauggauggcauuuuaaaauccaucuugaaggucaagagggcucuugggauguucgucucagauacuccgggugagagaaaccccuaugaaaacauacucuacaaaaucugcuuaucaggugacggguggccauacauugcaucuaggacaucaauaguaggaagggcuugggaaaacacuguaguggaccuugaaacagaugggaaaccacagaaaauuggcagugguaacuccaacaaaucucuccaaucugcaggcuucucggcuggacuaacuuacucccaacuuaugacccuuaaagaugcaauguugcagcuugacccaaaugccaagacguggauggacauagaagggaggccagaggacccgguggaaguugcucucuaucagccuaucucuggguguuauauacacuuuuucagagagcccacugaucucaaacaauuuaaacaagaugcaaaauauucucauggaauugacaucgcagaucuguuugcugcacaaccaggucugaccagugcuguuauugaggcgcucccccggaauaugguuaucacuugccaaggguccgaagacauaaagaagcuucuugaaucacaagggagaaaggauauaaaacugauugacauugcucuuaguaagauugauucaagaaaguuugaaaaugcuguuugggaucaauauaaagauuugugucacaugcacacagguguuguuguugagaagaagaagagagguggcaaagaagagaucaccccucacugugcauugauggauugcaucauguuugaugcugcugucucaggaggguugaacacacuggugcucagagcugugcuacccagagacaugguguuuagaacaucaacaccaagagucguccuguaaggacuagucccuguucccagagcccacuuuuuuuucuuuuuuugaaauaaaauagccugucuuucagaucuaaaaaaaaaaaaaaaaaaaaaaaaaaaaaaaaaaaaaaaaaaaaaaaaaaaaaaaaaaaaaaaaugcaucccccccccccccccccccccccccccccccaaaggcucuuuucagagccaccagaauu

SEQ ID NO: 10083 - RNA, 2005 nt, Artificial Sequence
  mRNA product Design a-2 comprising derived and/or modified sequence from LASV(Togo/2016/7082;Clade VI)__AMR44578__NP (wt)
gggagaguccgcucagccagguugcagaagcggcuuagcguguguccuaaucuucucucugcguguagguaggccugugccgcaaacaagcuuaccaugaguaacucuaaagaggugaagucuuuucucuggacucagucucugaggagagagcugucagguuacugcucuaacaucaaacuccagguggucaaggaugcucaggccuuauuacaugggcuugauuucucugaagugagcaauguucagaggcugaugcgaaaacagaagagggaugauggugaccucaagaggcucagagaccugaaucaagcgguaaauaaucuuguugaacuaaaaucaguucaacaaaaaaguauauugagaguuggcacccugaccucugaugacuuacuaacacuugcugcugaccuagaaaaacuaaagucuaaaguaacuaggacugaaagaccuuugaguucaggaguuuauaugggaaaccucagcucucagcaacuugaccagaggagagcccuccugagcaugauagggaugaguggugggaaccagaacagccaacccaaaggagaugguguugugaggguuugggaugugaaaaaugcugaccugcugaacaaccaguuuggaacgaugcccagucuuacauuagcaugcuuaacaaagcagggacaaguggauuugaaugaugcuguucaggcacugacugaucuaggguugauuuacacagcuaaauacccgaacucaucugaccuagacagacuuucacaaagccauccaauccugaacaugaucgauaccaagaagagcucauugaacaucucuggcuacaauuuuaguuuaggggccgcaaucaagacuggggcaugcaugcuugaugggggcaacaugcuggagacaaucaaggucacuccccaaaccauggaugggauuuugaaauccauuuuaaaggugaagaggagucuugggauguuuauuucugauacaccuggagaaaggaauccuuaugaaaacauucuuuauaaaaucugucuuucaggagacggguggccuuacauagccucacgaacugccaucauugguagagcaugggaaaacacugugguugauuuggagucugauagcaagccacaaaagauugggagcaauggaucuaacaaaucauugcaaucugcaggcuuugccccuggacugacauacucucagcucaugacccucaaagacucaauguugcaauuagauccuaaugcaaagacuuggauagacauugaagguaggccggaagacccuguugaggucgccuuguuucagccuaucucagguugcuacauacacuucuuuagagaaccaacagaccugaagcaauuuaaacaagaugcaaaguacucacaugggauagaugucaccgauuuguuugcugcucagccagguuugaccagugcugucauugaggcacuucccaggaauauggugcugaccugucagggaucagacgacaucaaaaaauuguuggauucacaggggagaagggacauuaaacucauugauguuucucucaauaaaauugacucaagaaaguuugagaaugcuguaugggaucaauacaaagaucugugucacaugcauacagggguagucguggagaagaaaaagaagggagggaaagaagaaauaaccccucauugugccuugcuagacugcaucauguuugaugcagccguguccggaggccuaaaugccacaguuuugagagcuguucuaccuagagacaugguguuuagaacgucaucaccuaaagucguucuguaaggacuagucccuguucccagagcccacuuuuuuuucuuuuuuugaaauaaaauagccugucuuucagaucuaaaaaaaaaaaaaaaaaaaaaaaaaaaaaaaaaaaaaaaaaaaaaaaaaaaaaaaaaaaaaaaaugcaucccccccccccccccccccccccccccccccaaaggcucuuuucagagccaccagaauu

SEQ ID NO: 10084 - RNA, 2005 nt, Artificial Sequence
  mRNA product Design a-2 comprising derived and/or modified sequence from LASV(KAK-428;Clade n.d. (VII))__ANH09741__NP (wt)
gggagaguccgcucagccagguugcagaagcggcuuagcguguguccuaaucuucucucugcguguagguaggccugugccgcaaacaagcuuaccaugagcaacucaaaggaggugaaaucuuuccuuuggacucagucucucagaagagaacugucugguuauugcaccaacauaaagcuucaaguugucaaagaugcucaggcacuauugcauggccuugacuucucugaaguuagcaauguccaacgucucaugcguaaacagaaaagagaugauaaugauuuaaagaggcuuagagacuugaaucaggccgucaacaaucuaguggaacuaaaaucagugcaacaaaagagcguccuuaaaguugggacacugaauucagaugaucuccugacauuagcugcagaucuggagaagcucaaaucuaaggugguuagaacugaaaggccucugagcucugguguuuacaugggcaaucuuaguucacaacagcuugaccaaaggagagcacuucuaaacaugauuggaauggcuggcgguagucagggaaaccaaccuagccgagaugguguagucagaguaugggaugucaaaaaugcagaccuacucaacaaccaauuuggcacaaugccaagucuuacauuagcaugucugacaaagcagggccaaguugacuuaaaugauguuguguuggcucugacugauuugggccuuauauacacagccaaauacccuaauucaucagauuuagauaggcugucucagaaccacccaguucugaacaugauugaugucaacaagaguucccuaaacauuucgggcuacaauuucagccugggggcagcagugaaagcuggagcuugcaugcuugauggcgggaacaugcuugagacaaucaagaucuccccucaaacaguggacggcauccugaaaucgaucuugaagguuaaaagggcuuuagggauguuugugucagacaccccuggugaaaggaacccuuaugagaacauacuguauaagguaugucuuucagggaauggguggccauacauagcuucaagaacaucaauuguugggagagcaugggaaaauacugugguagaucuugagucaaacaaaaaucagccuaagguugggaacaauggauccaacaagaugcugcagucuucgggauuugcuacugguuugacuuauucucaguugaugacuuugagggauucaauguuacaguuggacccaacugcaaagaccuggauugacauugaggguagaccugaagacccuguugaguuggcccucuuucagcccaguucaggguguuacauacauuucuuuagagagccuacugaccuaaagcaauucaaacaggaugcaaaauacucucaugggauugaugugaaugauuuguucucggcacaaccugguuuaaccagugcuguuuuggaagcacuaccacguaauauggugcugacuugucaaggcucugaugacauuagaaagcuuuuggacucacaggacaggaaagauauaaagcuaauugacaucucauugagcaaggcugaugcaaggaaguucgagaacgaugugugggaucaauuuaaggauuuaugccauaugcacaccgggauaguugucgagaagaagaagaaaggagggaaacaggaaaugacaccacacugugcauugcuagauuguaucauguuugaugcagcugucucuggggggcuuaauguccccacuuugagagcagugcuucccaccgacauggucuucagaacaauaacaaccaaagucguccuguaaggacuagucccuguucccagagcccacuuuuuuuucuuuuuuugaaauaaaauagccugucuuucagaucuaaaaaaaaaaaaaaaaaaaaaaaaaaaaaaaaaaaaaaaaaaaaaaaaaaaaaaaaaaaaaaaaugcaucccccccccccccccccccccccccccccccaaaggcucuuuucagagccaccagaauu

SEQ ID NO: 10085 - RNA, 2005 nt, Artificial Sequence; identical to SEQ ID NO: 10079
  mRNA product Design a-2 comprising derived and/or modified sequence from LASV(Pinneo-NIG-1969;Clade I)__AIT17837__NP (wt)

SEQ ID NO: 10086 - RNA, 2005 nt, Artificial Sequence
  mRNA product Design a-2 comprising derived and/or modified sequence from LASV(ISTH0009-NIG-2011;Clade II)__AIT17405__NP (wt)
gggagaguccgcucagccagguugcagaagcggcuuagcguguguccuaaucuucucucugcguguagguaggccugugccgcaaacaagcuuaccaugaguguuucuaaggaagugaagucauuucucuggacacagucauugaggagggagcuuucaggcuauugcuccaacauaaaacuucaaguuguuaaggaugcucaggcucuucuucauggucuugacuuuucugaagucagcaaugugcaacgcuuaaugcgcaagcaaaaaagggaugauagugaucugaaacgccucagagauuugaaucaggcugucaacaaucuuguagaacucaaaucgacacaacaaaagaguaucuugagaguugggaccuugaccucagaugaccugcugacauuggcagcugacuuagagaaacuaaagucgaaggucauuagaacagaaaggccucuaagcucagguguuuauauggggaauuugagcacacagcagcuugagcagagaagggcauugcugaacaugauaggcaugguugguggggcucagggcacccaaccuggaagagacggaguuguuagagugugggauguuaagaauccggaucuuuugaacaaccaguucggcaccaugccuagucugacauuagcaugucucaccaaacaaggucaaguugauuugaaugaugccgucuuagcacuaacagaccugggucuaauauacacagcuaaguacccaaauagcuccgaccuagauagacuuucccaaagccauccuauacugaauaugguggacauuaagaaaagcucccugaacauuucugguuacaacuucagcuuaggagcugcagugaaggcuggggccugcaugcucgauggggggaacauguuggagaccaucaagguuacaccucagacaauggauggcaucuugaagucuauuuuaaaaguaaaaagaucuuugggaauguuuguuucagauacaccuggugagagaaacccuuaugagaacauacuuuacaagaucugucuuuccggugacggcuggcccuacauagcuucaaggacuucuauuguggguagggcuugggagaauaccacuguggaucucgagucagauggaaaaccgcaaaaagugggcucugcuggguccaacaaguccuuacagucagcgggauucccaacagggcugaccuauucucaguugaugacacuuaaagacucaaugaugcagcuugacccaagugccaaaaccuggauagacauugaaggucguccagaagacccuguggaaauagcucuuuaccaaccuaugucgggcuguuacauacacuucuucagagagccaacagacuuaaaacaguucaaacaggaugccaaauauucucaugggauugauguggcagaucuuuucccugcucaaccugguuugaccagcgcaguuauugaggcccucccucgcaauauggugcugaccugucaagguucagaugacauuaagagacucuuagacucccaaggaagaagggacauaaagcuuauugacauugcacugagcaaggcugacucuaggagauuugaaaaugcuguuugggaucaguguaaagaccuaugccauaugcauacuggagugguugucgaaaagaagaaaagaggaggcaaagaagaaauaacuccgcacugugcuuuaauggacugcauaauguaugaugcagcugugucaggagggcucaauauaccaguuuuaagagcaguucuucccagagacaugguguuuagaaccucaagccccaaggucguccuguaaggacuagucccuguucccagagcccacuuuuuuuucuuuuuuugaaauaaaauagccugucuuucagaucuaaaaaaaaaaaaaaaaaaaaaaaaaaaaaaaaaaaaaaaaaaaaaaaaaaaaaaaaaaaaaaaaugcaucccccccccccccccccccccccccccccccaaaggcucuuuucagagccaccagaauu

SEQ ID NO: 10087 - RNA, 2005 nt, Artificial Sequence
  mRNA product Design a-2 comprising derived and/or modified sequence from LASV(ISTH2010-NIG-2012;Clade II)__AIT17483__NP (wt)
gggagaguccgcucagccagguugcagaagcggcuuagcguguguccuaaucuucucucugcguguagguaggccugugccgcaaacaagcuuaccaugagugcuucuaaggaagugaagucauuucucuggacacagucuuugaggagggagcuuucagguuauugcuccaauauaaaacuucaaguuguuaaggaugcucaggcucuccuucauggucuugacuuuucugaagucagcaaugugcagcgcuuaaugcgcaaacaaaagagggaugauagugaucugaaacgucucagagauuugaaucaagcugucaacaaucuuguagaacuuaaaucgacacaacaaaagaguaucuugagaguuggaaccuugaccucagaugacuugcugacacuggcagcugacuuagagaaacugaagucgaaggucauuagaacagaaaggccacuaagcucagguguuuauauggggaauuugaguacacagcagcuugagcagagaagagcauugcugaacuugauaggcaugguugguggggcucagggcacccaaccuggaagagacggaguuguuaggguuugggauguuaaaaauccggaccuuuugaacaaccaguucggcaccaugccuagucugacauuggcaugucucaccaaacaaggucaaguugauuugaaugaugccgucuuagcacugacagaccugggccuaauauacacagccaaguacccaaauagcuccgaccuggacagacuuucucaaagccauccuauauugaauaugguggauacuaagaagagcuccuugaacauuucugguuucaacuucagcuuaggagcugcagugaaagcuggagccuguaugcuugauggggggaacauguuggagaccaucaagguuacaccucagacaauggaugguaucuugaagucuauuuuaaagguaaaaaaaucuuugggaauguuuguuucggacacaccuggugagaggaacccuuaugagaauauacuuuacaagaucugucuuuccggugacggauggccuuacauagcuucaaggacuucuauugugggaagggcuugggagaauaccacuguggaucucgagucagauggaaaaccgcauaaagugggcacugcuggguccaacaagucucugcagucagcgggguucccaacagggcugacuuauucucaguugaugacacuuaaagacucaaugaugcagcuugacccaagugccaaaaccuggauagacauugaaggucguccagaagacccuguggagauagcucuuuaccaaccuaugucagguuguuacauacacuucuucagagaaccaacagacuugaaacaguucaagcaagaugccaaauauucucaugggauugauguggcagaucuuuucccugcucaaccugguuugaccagcgcagucauugaagcccucccccgcaauauggugcuaaccugucaagguucagaugauauuaagagacuccuagacucccaaggaagaagggauauaaagcuuauugacauugcacugagcaaggcugacucuaggagauuugaaaaugcuguuugggaucagugcaaagaucuaugccauaugcacacuggagugguugucgaaaagaagaaaagaggaggcaaagaagaaaucaccccgcacugugcuuuaauggacugcauaauguaugaugcagcugugucaggaggacucaacauaccaguguugagggcaguucuccccagggacaugguguuuagaaccucaagucccaaggucguccuguaaggacuagucccuguucccagagcccacuuuuuuuucuuuuuuugaaauaaaauagccugucuuucagaucuaaaaaaaaaaaaaaaaaaaaaaaaaaaaaaaaaaaaaaaaaaaaaaaaaaaaaaaaaaaaaaaaugcaucccccccccccccccccccccccccccccccaaaggcucuuuucagagccaccagaauu

SEQ ID NO: 10088 - RNA, 2005 nt, Artificial Sequence
  mRNA product Design a-2 comprising derived and/or modified sequence from LASV(Lassa virus/H.sapiens-wt/NGA/2015/ISTH_0543;Clade II)__AVO03640__NP (wt)
gggagaguccgcucagccagguugcagaagcggcuuagcguguguccuaaucuucucucugcguguagguaggccugugccgcaaacaagcuuaccaugagugcuucuaaggaagugaagucauuucucuggacacagucauugaggagggagcuuucaggcuauugcuccaacauaaaacuucaaguuguuaaggaugcucaggcucuccuucauggucuugacuuuucugaagucagcaaugugcagcgcuuaaugcgcaagcaaaaaagggaugauagugaucugaaacgucucagagauuugaaucaggcugucaacaaccuuguagaacucaaaucgacacaacagaagaguaucuugagaguugggaccuugaccucagacgaccugcugacauuggcagcugacuuagagaaacuaaagucgaaggucauuagaacagaaaggccucuaagcucagguguuuauauggggaauuugaguacacagcagcuugagcagagaagagcauugcugaacaugauaggcaugguugguggggcucaaggcacccaaccuggaagagauggaguuguuagggugugggauguuaagaauccggaucuuuugaacaaccaguucggcaccaugccuagucugacauuagcaugucucaccaaacaaggucaaguugauuugaaugaugccgucuuagcacuaacagaccugggucuaauauacacagcuaaguacccaaauaguuccgaccuagauagacuuucccaaagccauccuauacugaauaugguggacacuaagaaaagcucccugaacauuucuggcuauaacuucagcuuaggagcugcagugaaggcuggggccuguaugcucgauggggggaacauguuggagaccaucaagguuacaccucagacaauggauggcaucuugaagucuauuuuaaaaguaaaaaaaucuuugggaauguuuguuucagauacaccuggugagagaaacccuuaugagaacauacuuuacaagaucugucuuuccggugacggcuggcccuacauagcuucaaggacuucuauuguggguagggcuugggagaacacuacuguggaucucgagucagauggaaaaccgcaaaaagugggcucugcugggucuaacaaguccuuacagucagcgggauucccaacagggcugaccuauucucaguugaugacacuuaaagacucaaugaugcagcuugacccaagugccaaaaccuggauagacauugaaggucguccagaagacccuguggaaauagcucuuuaccaaccuaugucgggcuguuacauacacuucuucagagaaccaacagacuuaaaacaguucaagcaagaugccaaauauucucaugggauugauguggcagaucuuuucccugcucaaccugguuugaccagcgcaguuauugaagcccucccucgcaauauggugcugaccugucaagguucagaugauauuaagagacucuuagauucccaaggaagaaaggacauaaagcuuaucgacauugcacugagcaaggcugacucuaggagauuugaaaaugcuguuugggaucaguguaaagaccuaugccauaugcauacuggagugguugucgaaaagaagaaaagaggaggcaaagaagaaauaacuccgcauugugcuuuaauggauugcauaauguaugaugcagcugugucaggaggacucaauauaccgguuuuaagggcaguucuucccagagacaugguguuuagaaccucaagccccaaggucguccuguaaggacuagucccuguucccagagcccacuuuuuuuucuuuuuuugaaauaaaauagccugucuuucagaucuaaaaaaaaaaaaaaaaaaaaaaaaaaaaaaaaaaaaaaaaaaaaaaaaaaaaaaaaaaaaaaaaugcaucccccccccccccccccccccccccccccccaaaggcucuuuucagagccaccagaauu

SEQ ID NO: 10089 - RNA, 2005 nt, Artificial Sequence
  mRNA product Design a-2 comprising derived and/or modified sequence from LASV(Lassa virus/H.sapiens-wt/NGA/2016/ISTH_0009;Clade II)__AVO03572__NP (wt)
gggagaguccgcucagccagguugcagaagcggcuuagcguguguccuaaucuucucucugcguguagguaggccugugccgcaaacaagcuuaccaugagugcuucuaaggaaguaaagucauuucucuggacacagucauugaggagggagcuuucaggcuauugcuccaauauaaaacuucaaguuguuaaggaugcucaggcucuccuucauggucuugacuuuucugaagucagcaaugugcagcgcuuaaugcgcaagcaaaaaagggaugauagugaucugaaacgucucagagauuugaaucaggcugucaacaaucuuguagaacucaaaucgacacaacaaaagagcaucuugagaguugggaccuugaccucagaugaccugcugacauuggcagcugacuuagagaaacuaaagucgaaagucauuagaacagaaaggccucuaagcucggguguuuauauggggaauuugaguacacagcagcuugagcagagaagagcauugcugaacaugauaggcaugguugguggggcucagggcacccaaccuggaagagacggaguuguuagggugugggauguuaagaauccggaucucuugaacaaccaguucggcaccaugccuagucugacauuagcaugucucaccaaacaaggucaaguugauuugaaugaugcugucuuagcacuaacagaccugggucuaauauacacagcuaaguacccaaauagcuccgaccuagauagacuuucccaaagccauccuauacugaauaugguggauacuaagaaaagcucccugaacauuucugguuacaacuucagcuuaggagcugcagugaaggcuggggccugcaugcucgauggggggaacauguuggagaccaucaagguuacaccucagacaauggauggcaucuugaagucuauuuugaaagugaaaaaaucucugggaauguuuguuucagacacaccuggugagagaaacccuuaugagaacauacuuuacaagaucugucuuuccggugacggcuggcccuacauagcuucaaggacuucuauuguggguagggcuugggagaauacuacuguggaucucgagucagaugggaaaccgcaaaaagugggcucugcuggguccaacaaguccuuacagucagcgggauucccaacagggcugaccuauucucaguugaugacacuuaaagacucaaugaugcagcuugacccaagugccaaaaccuggauagacauugaaggucguccagaggacccuguggaaauagcucuuuaccaacccaugucgggcuguuacauacacuucuucagagaaccaacagacuuaaaacaguucaagcaagaugccaaauauucucaugggauugauguggcagaccuuuucccugcucaaccugguuugaccagcgcgguuauugaagcccucccucgcaauauggugcuaaccugucaagguucagaugauauuaagagacucuuagacucccaaggaagaagggacauaaagcuuauugacauugcacugagcaaggcugacucuaggagauuugagaaugcuguuugggaucaguguaaagaccuaugccauaugcauacuggagugguugucgaaaagaagaaaagaggaggcaaagaagaaauaacuccgcauugugcuuuaauggacugcauaauguaugaugcagcugugucaggaggacuuaauauaccaguuuuaagagcaguucuucccagagacaugguguuuagaaccucaagccccaaggucguccuguaaggacuagucccuguucccagagcccacuuuuuuuucuuuuuuugaaauaaaauagccugucuuucagaucuaaaaaaaaaaaaaaaaaaaaaaaaaaaaaaaaaaaaaaaaaaaaaaaaaaaaaaaaaaaaaaaaugcaucccccccccccccccccccccccccccccccaaaggcucuuuucagagccaccagaauu

SEQ ID NO: 10090 - RNA, 2005 nt, Artificial Sequence
  mRNA product Design a-2 comprising derived and/or modified sequence from LASV(Lassa virus/H.sapiens-wt/NGA/2016/ISTH_0017;Clade II)__AVO03568__NP (wt)
gggagaguccgcucagccagguugcagaagcggcuuagcguguguccuaaucuucucucugcguguagguaggccugugccgcaaacaagcuuaccaugagugcuucuaaggaagugaagucauuccucuggacacagucauugaggagggagcuuucagguuauugcuccagcauaaaacuucaaguugucaaggaugcucaagcucuccuucauggucuugacuuuucugaagucagcaaugugcagcgcuuaaugcgcaaacaaaagagggaugauagcgaucugaaacgucucagagauuugaaucaggcugucaacaaucuuguagaacucaaaucgacacaacaaaagagcaucuugagaguugggacccugaccucagaugaccugcugacauuggcagcugacuuagagaaacugaagucaaaggucauuagaacagaaaggccacuaagcucagguguuuauauggggaauuugaguacacagcaacuugagcaaagaagagcauugcugaacaugauaggcauggcugguggggcucagggcacccaaccuggaagagacggaguuguuagggugugggauguuaagaauccggaucuuuugaacaaucaguucggcaccaugccuagucugacauuagcaugucucaccaaacagggucaaguugauuuaaaugaugcugucuuagcauuaacagaccugggucugauauacacagcuaaguauccaaauagcuccgaccuggacagacuuucucaaagccauccuauacugaauaugguggacacuaagaagagcuccuugaacauuucugguuacaacuucagcuugggagcugcagugaaagcuggagcuuguaugcuugauggggggaacauguuggagaccaucaagguuacaccucagacaauggauggcaucuugaagucuauuuuaaagguaaaaagaucuuugggaauguuuguuucagaugcaccuggugagaggaacccuuacgagaacauacuuuacaagaucugucuuucaggugacggcuggcccuacauagcuucaaggacuucuauuguggguagagcuugggagaauacuacuguggaucucgagucagaugggaaaccacaaaaagugggugcuacuggguccaacaaaucuuuacagucagcaggguuuccaacagggcugacuuauucucaguugaugacacuuaaagacucaaugaugcagcuugacccaagugccaaaaccuggauagacauugaaggucguccagaagacccuguggaaguggcucuuuaccaaccugugucgggcuguuacauacacuuuuuuagagaaccaacagauuuaaaacaguucaagcaagaugccaaauauucucaugggauugauguggcggaucuuuucccugcucaaccugguuugaccagcgcagucauugaggcccucccucgcaacaugguacugaccugucaagguucagaugauauuaagaaacucuuggacucccaaggaagaaaggacauaaagcuuauugacauugcgcugagcaaggccgauucuaggagauuugaaaaugcuguuugggaucagugcaaagaucuaugccauaugcauacuggagugguuguugaaaagaagaaaagaggaggcaaagaagaaauuaccccgcacugugcuuuaauggacugcauaauguaugaugcagcugugucuggaggacucaauaucccagucuuaagagcaguucuccccagagacaugguguuuagaaccucaagccccaaggucguccuguaaggacuagucccuguucccagagcccacuuuuuuuucuuuuuuugaaauaaaauagccugucuuucagaucuaaaaaaaaaaaaaaaaaaaaaaaaaaaaaaaaaaaaaaaaaaaaaaaaaaaaaaaaaaaaaaaaugcaucccccccccccccccccccccccccccccccaaaggcucuuuucagagccaccagaauu

SEQ ID NO: 10091 - RNA, 2005 nt, Artificial Sequence
  mRNA product Design a-2 comprising derived and/or modified sequence from LASV(Lassa virus/H.sapiens-wt/NGA/2018/ISTH_0959;Clade II)__AVV65100__NP (wt)
gggagaguccgcucagccagguugcagaagcggcuuagcguguguccuaaucuucucucugcguguagguaggccugugccgcaaacaagcuuaccaugagugcuucuaaggaagugaagucauuucucuggacacagucuuugaggagggagcuuucagguuauugcuccaauauaaaacuucaaguuguuaaggaugcucaggcucuccuucauggucuugacuuuucugaagucagcaaugugcagcgcuuaaugcgcaaacaaaagagggaugauagugaucugaagcgucucagagauuugaaucaggcugucaacaaucuuguagaacuuaaaucgacacaacaaaagagcaucuugagaguugggacccugaccucagaugaccugcugacacuggcagcugacuuagagaaacuaaagucgaaggucauuagaacagaaaggccacuaagcucagguguuuauauggggaauuugaguacacagcagcuugagcagagaagggcauugcugaacuugauaggcaugguugguggggcucagggcacccagccuggaagagacggaguuguuaggguuugggauguuaagaauccggaccuucugaacaaccaguucggcaccaugccuagucugacauuggcaugucucaccaaacaaggucaaguugauuugaaugaugucgucuuagcacugacagaccugggccuaauauacacagccaaguacccaaauagcuccgaccuggacagacuuucccagagccauccuauacugaauaugguggacacaaagaagagcucuuugaacauuucugguuucaacuucagcuuaggagcugcaguaaaagcuggagcuuguaugcuugauggggggaacauguuagagaccaucaagguuacaccucagacaauggauggcaucuugaagucuauuuuaaagguaaaaaaaucuuugggaauguuuguuucggacacaccuggugagaggaacccuuaugagaauauacuuuacaagaucugucuuuccggugacggauggcccuauauagcuucaaggacuuccauuguggguagggcuugggagaauaccacuguggaucucgagucagauggaaaaccgcauaaaguaggcacugcuggguccaacaagucuuuacagucagcgggguucccaacagggcugacuuauucucaguugaugacacuuaaagacucaaugaugcagcuugacccaagugccaagaccuggauagacauugaaggucguccagaagacccuguggagauagcccucuaccaaccuaugucaggcuguuacauacacuucuucagagaaccaacagacuugaaacaauucaagcaagaugccaaauauucucaugggauugauguggcagaucuuuucccugcucaaccugguuugaccagcgcagucauugaagcccucccucgcaauauggugcuaaccugucaagguucagaugauauuaagagacucuuagacucccaaggaagaaaggauauaaagcuuauugacauugcacugagcaagacugacucuaggagauuugaaaaugcuguuugggaucaguguaaggaucuaugccauaugcacacuggagugguugucgaaaagaagaagagaggaggcaaagaagagaucaccccgcacugugcuuuaauggacugcauaauguaugaugcagcugugucaggaggacucaauauaccaguuuuaagggcaguucuccccagggacaugguguuuagaaccucaagucccaaggucguccuguaaggacuagucccuguucccagagcccacuuuuuuuucuuuuuuugaaauaaaauagccugucuuucagaucuaaaaaaaaaaaaaaaaaaaaaaaaaaaaaaaaaaaaaaaaaaaaaaaaaaaaaaaaaaaaaaaaugcaucccccccccccccccccccccccccccccccaaaggcucuuuucagagccaccagaauu

SEQ ID NO: 10092 - RNA, 2005 nt, Artificial Sequence
  mRNA product Design a-2 comprising derived and/or modified sequence from LASV(LASV003-NIG-2008;Clade II)__AIT17581__NP (wt)
gggagaguccgcucagccagguugcagaagcggcuuagcguguguccuaaucuucucucugcguguagguaggccugugccgcaaacaagcuuaccaugagugcuuccaaggaagugaagucauuucucuggacacagucauugaggagggagcuuucagguuauugcuccagcauaaagcuucaaguugucaaggaugcucaggcucuucuucauggucuugacuuuucugaaguuagcaaugugcagcgcuuaaugcgcaaacaaaaaagggaugauagugaucugaaacgucucagagaucugaaucaggcugucaacaaucuuguggaacucaaaucaacacaacaaaagagugucuugagaguuggaaccuugaccucagaugaccugcugacauuggcagcugacuuagagaaacuaaagucgaaggucaucagaacagaaaggccacuaagcucagguguuuauauggggaauuugagugcacagcaacuugagcaaagaagaacauugcugaacaugauaggcaugguugguggggcucagggcacucaaccuggaagagacggaguuguuagggugugggauguuaagaauccagaucuuuugaacaaucaguucggcaccaugcccagucugacauuagcaugucucacuaaacaaggccagguugauuugaaugaugucgucuuagcacuaacagaccugggucuaauauacacagcuaaguacccuaauagcuccgaccuggacagacuuucccaaagucauccuauauugaguaugguggacaccaagaagagcuccuugaacauuucugguuacaacuucagcuuaggagcugcagugaaagcuggagcuuguaugcuugauggggggaacauguuggaaaccaucaagguuacaccucagacaauggauggcaucuugaagucuauuuuaaagguaaaaaaauccuugggaauguuuguuucagacacaccuggugagaggaacccuuaugagaacauacuuuacaagaucugucuuucuggugacgguuggcccuauauagcuucaaggacuucuauuguggguagagcuugggagaauacuacuguggaucucgagucagauggaaaaccacaaaaagugggaacugcuggguccaauaagucuuuacagucagcgggguuuccaacagggcugacuuacucucaguugaugacacuuaaagacucaaugaugcagcuugacccaagugccaaaaccuggauagacauugaaggucguccagaagacccuguggaaauagcucuauaccagcccaugucgggcugcuacauacacuucuucagagaaccaacagacuuaaaacaguucaagcaagaugccaaauauucucauggaauugauguaacagaucuuuucccugcucaaccuggauuaaccagugcagucauugaagcccucccucgcaauaugguacugaccugucaagguucagaugacaucaagcgacucuuggauucccaaggaaggagggacauaaagcuuauugacauugcauugagcaaggcugacucuagaagauuugaaaaugcuguuugggaucagugcaaagaucuaugccauaugcacacuggagugguugucgaaaagaagaaaagaggaggcaaagaagaaauuaccccacauugugcucuaauggacugcauaauguaugaugcagcugugucaggaggacucaauauaccaguuuugagagcaguccuccccagagacaugguguuuagaaccucaagccccaaggucguccuguaaggacuagucccuguucccagagcccacuuuuuuuucuuuuuuugaaauaaaauagccugucuuucagaucuaaaaaaaaaaaaaaaaaaaaaaaaaaaaaaaaaaaaaaaaaaaaaaaaaaaaaaaaaaaaaaaaugcaucccccccccccccccccccccccccccccccaaaggcucuuuucagagccaccagaauu

SEQ ID NO: 10093 - RNA, 2005 nt, Artificial Sequence
  mRNA product Design a-2 comprising derived and/or modified sequence from LASV(LASV035-NIG-2009;Clade II)__AIT17589__NP (wt)
gggagaguccgcucagccagguugcagaagcggcuuagcguguguccuaaucuucucucugcguguagguaggccugugccgcaaacaagcuuaccaugagugcuuccaaggaaguaaagucauuccucuggacacagucauugaggagggaacucucagguuacugcucuaguauaaagcuucaaguuguuaaggaugcucaggcucuccuucauggucuugacuuuucugaggucagcaauguucagcgcuugaugcgcaaacaaaaaagggacgacagugaucugaaacgucucagagaucugaaccaggcugucaacaaucuuguagaacucaaaucaacacaacaaaagaguauccugagaguugggaccuugaccucagaugaccugcugacauuggcagcugacuuagagaaacuuaagucgaaggucaucagaacagaaaggccacuaagcucagguguuuacauggggaauuugagugcacagcaacuugagcaaagaagagcauugcugaacaugauaggcaugguugguggagcucaggguacccaaccuggaagagacggaguuguuagggugugggaugucaagaauccggaucuuuugaacaaccaauucggcaccaugccuagccugacauuagcaugucucaccaaacaaggucaaguugauuugaaugaugcugucuuggcacuaacagaccugggucuaauauacacagcuaaguacccaaacagcuccgaccuggacagacuuucccaaagccauccuauacugaauaugguggacacuaagaagagcuccuugaacauuucugguuacaacuucaguuuaggagcugcagugaaagcuggagcuuguaugcuugauggggggaauauguuggagacuaucaagguuacaccucagacaauggauggcaucuugaaaucuaucuuaaagguaaaaagaucuuugggaauguuuguuucagacacaccuggugagaggaacccuuaugagaacauacuuuacaagaucugucuuucuggggacgguuggcccuacauagcuucaagaacuuccauuguggguagagcuugggagaacaccacuguggaucucgagucagauggaaaaccacaaaaggugggcacuacuggguccaacaagucuuuacagucagcgggguucccaacaggguugaccuauucucaguugaugacacuuaaagacucaaugaugcaacuugacccaagugcuaaaaccuggauagacauugaaggucgaccagaagacccuguggaaauagcucuuuaccaaccuaugucgggcuguuacauacacuucuucagagaaccaacagacuuaaaacaguucaagcaagaugccaaauauucucaugggauugauguagcagaucuuuucccugcucaaccuggcuugaccagugcagucauugaagcccuuccucgcaauauggugcugaccugucaggguucagacgauauuaagaaacucuuagauucccaaggaagaagggacauaaagcuuauugacauugcacugaguaaggcugacucuaggaaguuugaaaaugcuguuugggaccaaugcaaggaucuaugccauaugcauacuggggugguuguugaaaagaagaaaagaggaggcaaagaagaaauuaccccgcacugugcucuaauggauugcauaauguaugaugcagcugugucaggaggacucaauauaccaguuuugagagcaguucuccccagagacaugguguuuagaaccucaagccccaaggucguccuguaaggacuagucccuguucccagagcccacuuuuuuuucuuuuuuugaaauaaaauagccugucuuucagaucuaaaaaaaaaaaaaaaaaaaaaaaaaaaaaaaaaaaaaaaaaaaaaaaaaaaaaaaaaaaaaaaaugcaucccccccccccccccccccccccccccccccaaaggcucuuuucagagccaccagaauu

SEQ ID NO: 10094 - RNA, 2005 nt, Artificial Sequence
  mRNA product Design a-2 comprising derived and/or modified sequence from LASV(LASV1000-NIG-2009;Clade II)__AIT17783__NP (wt)
gggagaguccgcucagccagguugcagaagcggcuuagcguguguccuaaucuucucucugcguguagguaggccugugccgcaaacaagcuuaccaugagugcuucuaaggaagugaagucauuucucuggacacagucauugaggagggagcuuucagguuacugcuccaacauaaaacuucaagucguuaaggaugcucaggcucuccuucauggucuugacuucucugaagucagcaaugugcagcgcuuaaugcgcaaacaaaaaagggaugauagugauuugaaacgucucagagauuugaaucaggcugucaacaaucuuguagaacucaaaucgacacaacaaaaaaguaucuugagaguugggaccuugaccucagaugaccugcugacauuagcagcugacuuagagaaauuaaagucgaaggucauuagaacagaaaggccacuaagcucagguguuuauauggggaauuugaguacacagcagcuugagcagagaagagcacugcugaacaugauaggcaugguugguggggcucagggcacccaaccuggaagagacggaguuguuagggugugggauguuaagaauccggaucuuuugaacaaccaguucggcaccaugccuagucugacauuagcaugucucaccaaacaaggucaaguugauuugaaugauguugucuuagcacuaacagaccugggucuaauauacacagcuaaguacccaaauagcuccgaccuggacagacuuucccaaagccauccuauacugaauaugguggacacuaagaagagcuccuugaacauuucugguuacaacuucagcuuaggagcugcaguaaaagcuggagcuuguaugcuugauggggggaacauguuggagaccaucaagguuacaccccagacaauggauggcaucuuaaagucuauuuuaaagguaaaaaaaucuuugggaauguuugucucagacacaccuggugagaggaacccuuaugagaauauacuuuacaagaucugucuuuccggugacggcuggcccuacauagcuucaaggacuucuauuguggguagagcuugggagaacaccacuguggaucucgagucagauggaaagccgcaaaaagugggcacugcuggguccaacaagucuuuacagucagcgggguucccaacagggcugaccuauucucaguuaaugacacuuaaagacucaaugaugcagcuugauccaagugccaaaaccuggauagacauugaaggucguccagaagacccuguggaaauagcucuuuaccaaccugugucgggcuguuacauacacuucuucagagaaccaacagacuuaaaacaguucaagcaagaugccaaauauucucaugggauugauguggcagaucuuuucccugcccaaccugguuugaccagcgcagucauugaagcccucccucgcaauaugguacugaccugucaagguucagaugauauuaagagacucuuggacucccaaggaagaagggacauaaagcuuauugacauugcacugagcaaggcugacuccaggagauuugaaaaugcuguuugggaucagugcaaggaucuaugccauaugcauacuggagugguugucgaaaagaagaaaagaggaggcaaagaagaaaucaccccgcacugugcuuugauggacugcauaauguaugaugcagcugugucaggaggacucaauauaccaguuuuaagagcaguucuccccagggacaugguguuuagaaccucaagccccaaggucguccuguaaggacuagucccuguucccagagcccacuuuuuuuucuuuuuuugaaauaaaauagccugucuuucagaucuaaaaaaaaaaaaaaaaaaaaaaaaaaaaaaaaaaaaaaaaaaaaaaaaaaaaaaaaaaaaaaaaugcaucccccccccccccccccccccccccccccccaaaggcucuuuucagagccaccagaauu

SEQ ID NO: 10095 - RNA, 2005 nt, Artificial Sequence
  mRNA product Design a-2 comprising derived and/or modified sequence from LASV(LASV221-NIG-2010;Clade II)__AIT17625__NP (wt)
gggagaguccgcucagccagguugcagaagcggcuuagcguguguccuaaucuucucucugcguguagguaggccugugccgcaaacaagcuuaccaugagugcuucuaaggaaguaaagucauuucucuggacacagucauugaggagggagcuuucagguuauugcuccagcauaaaacuucaaguuguuaaggaugcucaggcucuccuucauggucuugacuuuucugaagucagcaaugugcagcgcuuaaugcgcaaacaaaggagggaugauagugaucugaaacgucucagagauuugaaucaggcugucaacaaucuuguagaacucaaaucgacacaacaaaagagcaucuugagaguugggaccuugaccucggaugaccugcugacauuggcagccgaccuagaaaaacuaaagucgaaggucauuagaacagaaaggccacuaagcucagguguuuauauggggaauuugagcacacagcagcuugagcaaagaagagcauugcugaacaugauaggcaugguugguggggcccagggcacccaaccuggaagggacggaguuguuagagugugggauguuaagaauccggaucuuuugaacaaucaguucggcaccaugccuagucugacauuagcaugucucaccaaacaaggccaaguugauuugaaugaugcugucuuggcacuaacagaucugggucuaauauacacagcuaaguauccaaauagcuccgaccuggacagacuuucccaaagccauccuauacugaacaugguggacaccaagaagagcuccuugaacauuucuggcuacaacuucagcuuaggagcugcagugaaagcuggagcuuguaugcuugaugggggaaacauguuggagaccauuaaggucacaccucagacaguggauggcaucuugaagucuauuuuaaagguaaaaagaucuuugggaauguuuguuucagauacaccuggugagaggaacccuuacgagaacauacuuuacaagaucugucuuucuggcgacggcuggcccuacauagcuucaaggacuucuauuguggguagagcuugggagaauacuacuguggaucucgagucagauggaaaaccacagaaaguggguacugcuggguccaacaagucuuuacagucagcgggguuuccaacagggcugaccuauucucaguugaugacacuuaaagacucgaugaugcagcuugacccaagugccaaaaccuggauagacauugagggucguccagaagacccuguggaaauugcucuuuaccaaccuaugucuggcuguuacauacacuucuucagagaaccaacagauuuaaaacaguucaagcaagaugccaaauauucucaugggauugauguggcagaucuuuucccugcucaaccugguuugaccagugcagucauugaagcucucccucgcaacaugguacugaccugucaagguucagaugauauuaagagacucuuggacucccaaggaagaagggacauaaagcuuauugacauugcacugagcaaggcugauucuaggaaauuugaaaaugcuguuugggaucagugcaaagaucuaugccauaugcauacuggagugguugucgaaaagaagaaaagaggagguaaagaagaaaucaccccgcacugugcuuuaauggacugcauaauguaugaugcagcugugucaggaggacucaacauaccaguucuaagagcaguucuccccagagacaugguguuuagaaccucgagccccaaagucguccuguaaggacuagucccuguucccagagcccacuuuuuuuucuuuuuuugaaauaaaauagccugucuuucagaucuaaaaaaaaaaaaaaaaaaaaaaaaaaaaaaaaaaaaaaaaaaaaaaaaaaaaaaaaaaaaaaaaugcaucccccccccccccccccccccccccccccccaaaggcucuuuucagagccaccagaauu

SEQ ID NO: 10096 - RNA, 2005 nt, Artificial Sequence
  mRNA product Design a-2 comprising derived and/or modified sequence from LASV(LASV237-NIG-2010;Clade II)__AIT17639__NP (wt)
gggagaguccgcucagccagguugcagaagcggcuuagcguguguccuaaucuucucucugcguguagguaggccugugccgcaaacaagcuuaccaugagugcuucuaaggaagugaagucauuucucuggacacagucauugaggagggagcuuucaggcuauugcuccaacauaaaacuucaaguuguuaaggaugcucaggcucuucuucauggucuugacuuuucugaagucagcaaugugcagcgcuuaaugcgcaagcaaaaaagggaugauagugaucugaaacgucucagagauuugaaucaggcugucaacaaucuuguagaacucaaaucgacacaacaaaagaguaucuugagaguugggaccuugacuucagaugaucugcugacauuggcagcugacuuagagaaacuaaagucgaaagucauuagaacagaaaggccucuaagcucagguguuuacauggggaauuugagcacacagcagcuugagcagagaagggcauugcugaacaugauaggcaugguugguggggcucaaggcacccaaccuggaagagacggaguuguuagggugugggauguuaagaauccggaucuuuugaacaaccaguucggcaccaugccuagucugacauuagcaugucucaccaaacaaggucaaguugauuugaaugaugccgucuuagcacuaacagaccugggucuaauauacacagcuaaguacccaaauagcuccgaccuagauagacuuucccaaagccauccuauacugaauaugguggacauuaagaaaagcucccugaacauuucugguuacaacuucagcuuaggagcugcagugaaggcuggggccugcaugcucgauggggggaacauguuggagaccaucaagguuacaccucagacaauggauggcaucuugaagucuauuuuaaaaguaaaaagaucuuugggaauguuuguuucagauacaccuggugagagaaacccuuaugagaacauacuuuacaagaucugucuuuccggugacggcuggcccuacauagcuucaaggacuucuauuguggguagggcuugggagaauacuacuguggaucucgagucagauggaaaaccgcaaaaagugggcucugcuggguccaacaaguccuuacagucagcgggauucccaacagggcugaccuauucucaguugaugacacuuaaagacucaaugaugcagcuugacccaagugccaaaaccuggauagacauugaaggucguccagaagacccuguggaaauagcucuuuaccaaccuaugucgggcuguuacauacacuucuucagagagccaacagacuuaaaacaguucaagcaggaugccaaauauucucaugggauugauguggcagaucuuuucccugcucaaccugguuugaccagcgcaguuauugaagcccucccucgcaauauggugcugaccugucaagguucagaugauauuaagagacucuuagacucccaaggaagaagggacauaaagcuuauugacauugcacugagcaaggcugacucuaggagauuugaaaaugcuguuugggaucaguguaaagaccuaugccauaugcauacuggagugguugucgaaaagaagaaaagaggaggcaaagaagaaauaacuccgcacugugcuuuaauggacugcauaauguaugaugcagcugugucaggagggcucaauauaccaguuuuaagagcaguucuucccagagacaugguguuuagaaccucaagccccaaggucguccuguaaggacuagucccuguucccagagcccacuuuuuuuucuuuuuuugaaauaaaauagccugucuuucagaucuaaaaaaaaaaaaaaaaaaaaaaaaaaaaaaaaaaaaaaaaaaaaaaaaaaaaaaaaaaaaaaaaugcaucccccccccccccccccccccccccccccccaaaggcucuuuucagagccaccagaauu

SEQ ID NO: 10097 - RNA, 2005 nt, Artificial Sequence
  mRNA product Design a-2 comprising derived and/or modified sequence from LASV(LASV253-NIG-2011;Clade II)__AIT17671__NP (wt)
gggagaguccgcucagccagguugcagaagcggcuuagcguguguccuaaucuucucucugcguguagguaggccugugccgcaaacaagcuuaccaugagugcuuccaaggaagugaagucauuccucuggacacagucauugaggagggagcuuucagguuauugcuccagcauaaagcuucaaguugucaaggaugcucaggcucuccuucauggucucgacuuuucugaaguuagcaaugugcagcgcuuaaugcgcaaacaaaaaagggaugauagugaucugaaacgucucagagaucugaaucaggcugucaacaaucuuguggaacuuaaaucaacacaacaaaagagugucuugagaguugggaccuugaccucagaugaccugcugacauuggcagcugacuuagagaaacuaaagucgaaggucaucagaacagaaaggccacuaagcucagguguuuauauggggaauuugaguacacagcaacuugagcagaggagagcauuacugaacaugauaggcaugguugguggggcucagggcacccaaccuggaagagacggaguuguuagggugugggauguuaaaaauccagaucuuuugaacaaucaguucggcaccaugcccagucugacauuagcaugucucacuaaacaaggccagguugauuugaaugaugucgucuuagcacuaacagaccugggucuaauauacacagcuaaguacccuaauagcuccgaccuggacagacuuucccaaagucauccuauauugaacaugguggacaccaagaagagcuccuugaacauuucugguuacaacuucagcuuaggagcugcagugaaagcuggagcuuguaugcuugaugggggaaacauguuggaaaccaucaagguuacaccucagacaauggauggcaucuugaagucuauuuuaaaggugaaaaaauccuugggaauguuuguuucagacacaccuggugagaggaauccuuaugagaacauacuuuacaagaucugucucucuggugacgguuggcccuacauagcuucaaggacuucaauuguggguagagcuugggagaauacuacuguggaucucgagucagauggaaaaccacaaaaagugggaacugcuggguccaauaagucuuuacagucagcgggguucccaacagggcugacuuacucucaguugaugacacuuaaagacucaaugaugcaacuugacccaagugccaaaaccuggauagacauugaaggucguccagaagacccuguggaaauagcucuuuaccagcccaugucgggcugcuacauacacuucuucagagaaccaacagacuugaaacaguucaagcaagaugccaaauauucucaugggauugauguaacagaucuuuucccugcucaaccuggauuaaccagugcagucauugaagcccucccucgcaauaugguacugaccugucaaggcucagaugacaucaagagacucuuggauucccaaggaagaagggacauaaaacuuauugacauugcauugagcaaggcugacucuaggagauuugaaaaugcuguuugggaucagugcaaagaucuaugccauaugcacacuggagugguugucgaaaagaagaaaagaggaggcaaagaagaaauuaccccacauugugcucuaauggacugcauaauguaugaugcagcugugucaggaggacucaauauaccaguuuuaagagcgguccuccccagagacaugguguuuagaaccucaagccccaaggucguccuguaaggacuagucccuguucccagagcccacuuuuuuuucuuuuuuugaaauaaaauagccugucuuucagaucuaaaaaaaaaaaaaaaaaaaaaaaaaaaaaaaaaaaaaaaaaaaaaaaaaaaaaaaaaaaaaaaaugcaucccccccccccccccccccccccccccccccaaaggcucuuuucagagccaccagaauu

SEQ ID NO: 10098 - RNA, 2005 nt, Artificial Sequence
  mRNA product Design a-2 comprising derived and/or modified sequence from LASV(LASV254-NIG-2011;Clade II)__AIT17675__NP (wt)
gggagaguccgcucagccagguugcagaagcggcuuagcguguguccuaaucuucucucugcguguagguaggccugugccgcaaacaagcuuaccaugagugcuucuaaggaagugaagucauuucucuggacacagucauugagaagggaacuuucagguuauugcuccagcauaaagcuucaaguuguuaaagaugcucaggcucuccuucauggucuugacuuuucugaagucagcaaugugcagcgcuuaaugcgcaaacaaaaaagggaugauagugaucugaaacgucucagagaucugaaucaggcugucaacaaucuuguggaacucaaaucaacacaacaaaagagugucuugagaguugggaccuuaaccucagaugaccugcugacauuggcagcugacuuagagaaacuaaagucaaaggucauuagaacagaaagaccacugagcucagguguuuauauggggaauuugaguacacagcagcuugagcaaaggagagcauuguugaacaugauaggcaugguugguggggcucagggcacccaaccuggaagagacggagugguuagggugugggauguuaaaaauccggaucuuuugaacaaccaguuuggcaccaugccuagucugacauuagcaugucucacuaaacaaggucaaguugauuugaaugaugccgucuuagcacuaacagaccugggucuaauauauacagcuaaguacccaaauagcuccgaccuggacagacuuucucaaagucauccuauacugaacaugguggacacuaagaaaagcuccuugaacauuucugguuacaacuucagcuuaggagcugcagugaaagcuggagcuuguaugcuugauggggggaacauguuggagaccaucaagguuacaccucagacaauggauggcauccugaagucuauuuuaaagguaaaaaaauccuugggaauguuuguuucagauacaccuggugagaggaacccuuaugagaacauacuuuacaagaucugucuuuccggugacggcuggcccuacauagcuucuaggacuuccauugugggcagagcuugggagaauaccaucguggaucucgagucagaugggaaaccacaaaaggugggcacugcugggucuaacaagucuuuacagucagcgggguuuccaacagggcugaccuauucucaguugaugacacuuaaagacucaaugaugcagcuugacccaagugccaaaaccuggauagacauugaaggucguccagaggacccuguagaaauagcucuuuaccaaccuaugucgggcuguuauauacauuucuucagagagccaacagacuuaaaacaguucaaacaagaugccaaauauucucaugggauugauguagcagaucuuuucccugcucaaccuggcuugaccagugcagucauugaagcccucccccgcaauaugguccugaccugucaagguucagaugacauuaagagacucuuggauucucaagggagaagggacauaaagcuuauugacauugcacugagcaaggcugacucuaggagauuugaaaaugcuguuugggaucagugcaaagaucuaugccauaugcacacuggaguggucgucgaaaagaagaaaagagggggcaaagaagaaauuaccccgcauugugcuuuaauggacugcauaauguaugaugcagcugugucaggaggacucaauauaccaguuuuaagagcaguucuccccagagauaugguguuuagaaccucaagccccaaagucguccuguaaggacuagucccuguucccagagcccacuuuuuuuucuuuuuuugaaauaaaauagccugucuuucagaucuaaaaaaaaaaaaaaaaaaaaaaaaaaaaaaaaaaaaaaaaaaaaaaaaaaaaaaaaaaaaaaaaugcaucccccccccccccccccccccccccccccccaaaggcucuuuucagagccaccagaauu

SEQ ID NO: 10099 - RNA, 2005 nt, Artificial Sequence
  mRNA product Design a-2 comprising derived and/or modified sequence from LASV(Nig08-04;Clade II)__ADU56611__NP (wt)
gggagaguccgcucagccagguugcagaagcggcuuagcguguguccuaaucuucucucugcguguagguaggccugugccgcaaacaagcuuaccaugagugcuuccaaggaagugaaaucauuccuuuggacacagucauugaggagagagcuuucaggcuauugcucuaauauaaaacuccaaguggucaaggaugcucaggcccuucugcauggucucgacuucucugaggucagcaauguccagcgcuugaugcgcaaacagaaaagagaugacggugaccuaaaacgucuuagagaccuaaaucaggcaguuaacaaccuugucgagcucaagucaacacaacaaaagaguguucugaggguuggaacauugaccucagacgacuugcugacuuuagcagcugaucuagagaaauugaagucaaagguuauuaggacggagagaccauuaaguucagguguguauauggggaacuugagcacacaacaacuugagcagaggaaggcguuguugaguaugauaggcauggucgguggugcucagggaacccaaccuggaagagacggaguugucagagugugggaugucaaaaacccggaccuccucaacaaccaauuuggcaccaugccuaguuuaacgcuagcaugucucacuaaacagggucagguugacuuaaaugacgccguucuggcgcuaacagacuugggauuaauauacacagcuaaauaccccaauaguuccgaccuagacagacuuucccagagccauccuauacugaauaugguagauaccaagaagagcucccuaaauauuucugguuauaauuuuaguuugggagcugcagugaaggccggagcuugcaugcucgauggggguaacauguuggaaacuaucaaggugacgccucagacaauggauggcauucugaagucuauucuaaagguaaaaaggucccugggaauguuuguuucagacacaccuggugaaagaaacccuuaugaaaacauacuuuacaaaauuugucucucuggggacggcuggcccuacauagcuucaagaaccuccauuguggguagagcuugggagaauaccacuguagaccuugagucagaugggaaaccacagaaaguggguacugcuggauccaacaaaucucugcaaucugcuggguucccaacagggcugaccuauucucaacugaugacacucaaagauucaaugaugcaacuugacccaagcgccaaaaccuggauagacauugaaggucguccagaagacccuguugagauagcucuuuaccaaccuaugucaggcuguuauauacauuucuucagagaaccaacggauuuaaaacaguucaaacaagaugccaaauauucucaugggauugaugugacagaucucuuuucugcucagccuggucuaaccagugcagucauugaggcucucccccgcaacaugguguugacgugccaagguucagacgacauuaaaaaacucuuggauucucaggggagaagggacaucaagcucauugacaucucauuaaauaaggcugauucuaggagauuugaaaaugcugucugggaucaguguaaagauuugugucacaugcacacuggagugguuguugagaaaaagaagagaggaggcaaagaggagaucacuccacauugugcuuuaauggauugcauaauguuugacgcagcugugucaggaggacucaauauaccaaucuugagagcuguucucccaagagauaugguguucagaacuucaagucccaaagucguccuguaaggacuagucccuguucccagagcccacuuuuuuuucuuuuuuugaaauaaaauagccugucuuucagaucuaaaaaaaaaaaaaaaaaaaaaaaaaaaaaaaaaaaaaaaaaaaaaaaaaaaaaaaaaaaaaaaaugcaucccccccccccccccccccccccccccccccaaaggcucuuuucagagccaccagaauu

SEQ ID NO: 10100 - RNA, 2008 nt, Artificial Sequence
  mRNA product Design a-2 comprising derived and/or modified sequence from LASV(GA391;Clade III)__AAA46284__NP (wt)
gggagaguccgcucagccagguugcagaagcggcuuagcguguguccuaaucuucucucugcguguagguaggccugugccgcaaacaagcuuaccaugagugcuuccaaggaagugaggucaugcuuguggacucaaucccuaagaagggaacuaucuggcuacuguuccaacauaaaguugcagguaguuaaagacgcucaagcucuccuucauggucuugacuucuccgaggucaguaauguucagagauugaugcgcaagcagaaaagagaugauggcgaccuaaaacgacugagagaucucaaucaagcagucaacaaucuuguugagcucaaauccacacagcagaaaagugucuuaagaguuggaaccuuaaguucagacgaucuacuaauccuggccgcugauuuagaaaaacugaaaucaaaagucaccagaacagaaaggccuuugaguucaggaguuuauauggggaauuugaguucacaacagcuugaucaaaggagagcccuuuugaacaugauuggcaugacuggaguaaguggagggggaaagggugccaguaauggcauugugagaguuugggaugucaaaaaugcagaguuacucaacaaucaguucggaacaaugccaagccuaacuuuagcaugccugaccaaacaggggcaaguggaccugaaugaugccguucaagcuuugacagauuuagggcugauuuacacagccaaauaccccaacucaucugaucucgacagauugucucagagucauccaauucugaauaugauugacacuaagaaaaguucacucaacaucucugguuacaauuucaguuugggugcugcugucaaagcaggggccugcaugcuugauggugguaacauguuagagacuauuaagguuucaccucagaccauggaugguaucuugaagucaaucuugaaaguuaagaagagucugggaauguuuguaucagacacaccgggugaaaggaacccuuaugagaacauccuauacaagaucugucucucaggagacggaugguccuauauugcaucaaggaccucgauugugggaagagcaugggaaaauacugugguggaccuugagcaagacaacaagccccagaaaauuggaaaugggggguccaacaagucauuacagucugcaggcuuugcugcaggauuaaucuacucucaguugaugacucucaaagauuucaagugcuucaacuugauucccaacgcaaaaaccuggauggauauugaaggaagaccagaagacccaguugagauagcccuuuaucaaccgagcucggguugcuauguacauuucuuuagggagccaacagauuugaagcaauucaaacaagaugcaaaguauucacaugguagggaugugacugauuuguuugcugcccaaccuggguuaaccagugcagugauagaagcccuuccucggaacauggucaucacuugccaaggaucagaggauaucagaaaacuccuugagucacaagggaggagagacauaaaacugauugacaucacucuuaguaaagcagauucaagaaaguuugagaaugcuguuugggaucaauucaaggaucuaugucacaugcacacugggguaguuguggagaaaaagaagagaggugguaaagaggaaauaacuccucauugugcacugauggauugcauuauguuugaugcagcaguuucaggaggacuugaugcaaaaguccugagaguugugcucccuagagacaugguguucagaacuucaacaccuaaagucguccuguagggacuagucccuguucccagagcccacuuuuuuuucuuuuuuugaaauaaaauagccugucuuucagaucuaaaaaaaaaaaaaaaaaaaaaaaaaaaaaaaaaaaaaaaaaaaaaaaaaaaaaaaaaaaaaaaaugcaucccccccccccccccccccccccccccccccaaaggcucuuuucagagccaccagaauu

SEQ ID NO: 10101 - RNA, 2005 nt, Artificial Sequence
  mRNA product Design a-2 comprising derived and/or modified sequence from LASV(Nig08-A19;Clade III)__ADU56619__NP (wt)
gggagaguccgcucagccagguugcagaagcggcuuagcguguguccuaaucuucucucugcguguagguaggccugugccgcaaacaagcuuaccaugagugcuuccaaagaagugaaaucauuccuguggacucagucucugagaagagaguuaucuggcuauugcuccaauauaaaacuccaggugguaaaggaugcucaagcucuccuucaugguuuggacuucucugaggucaguaauguucaacgcuugaugcgcaaacaaaaaagggacgauggugaucuuaaacggcuaagagaccucaaucaagcagucaacaaccuuguugaacuaaagucaacucaacaaaagagugugcugaggguuggaacccuaaguucagacgaucuauugguuuuggcugcugaccuggaaaaacugaagucaaagguuguuaggacagaaagaccccugagcucaggaauuuauauggggaaucuaaguucacagcagcuugaucagaggaaggcccuccucaacaugauuggcaugacuggugggaaugggggaaggaauaccacuagugaugguauugugagaguuugggacgucaagaaugcagagcugcuuaacaaucaguuugggacaaugccaagucuaacucuagcauguuugaccaaacaagggcaaguggauuugaaugaugcuguucaggcuuugacagauuugggauugauuuacaccgcaaaauacccuaauucaucugauuuggacaggcuggcccagagccauccgauauugaacaugauugauacuaagaagagcucccuuaacaucucugguuacaauuuuaguuuaggagccgccgucaaggcuggggccugcaugcuugauggaggcaauaugcuagagacuauaaaggucucaccucaaaccauggauggcaucuugaagucaaucuugaaagucaagagaagccugggaauguucaucucagauacgccaggugaaaggaacccuuaugaaaacauacuguacaaaaucugccucucaggagauggguggccuuacauugcaucaaggacuucaauugugggaagagcuugggagaacaccgugguugacuuagagucagacaacaaaccgcaaaagaccggcaauggggguucaaauaagucauugcaaucugcaggguuugcugcaggacugacuuauucucaacugaugaccuuaaaggauucaaugcuucagcuugacccaaaugcaaagacuuggauggauauugagggaagaccagaagauccaguugaaauagcucuguaucaaccaaguucaggcugcuauauacacuucuucagggaaccgacagacuuaaagcaguuuaaacaggaugcaaaauauucacaugguauugaugugacagauuuguuugcugcacagccaggguuaacaagugcagugauagaggcucuuccuagaaacauggucaucaccugucaagggucagaagacaucagaaaacuucuggagucacaggggaggagggauauaaaacugauugacauuucccuuaguaagguggacucaagaaaauuugagaaugcugugugggaucaauucaaggauuuaugucacaugcacaccgggauuguuguggagaagaaaaagaggggaggcaaggaggaaauaacaccucauugugcauuaauggacugcaucauguuugaugcugcagucucaggaggaguugaugcaaagguccugagggcugugcuccccagagauaugguguucagaacuucgacacccaaagucguccuguaaggacuagucccuguucccagagcccacuuuuuuuucuuuuuuugaaauaaaauagccugucuuucagaucuaaaaaaaaaaaaaaaaaaaaaaaaaaaaaaaaaaaaaaaaaaaaaaaaaaaaaaaaaaaaaaaaugcaucccccccccccccccccccccccccccccccaaaggcucuuuucagagccaccagaauu

SEQ ID NO: 10102 - RNA, 2005 nt, Artificial Sequence
  mRNA product Design a-2 comprising derived and/or modified sequence from LASV(G1180-SLE-2010;Clade IV)__AIT17169__NP (wt)
gggagaguccgcucagccagguugcagaagcggcuuagcguguguccuaaucuucucucugcguguagguaggccugugccgcaaacaagcuuaccaugagugccucaaaggaaauaaaguccuuucuauggacacaaucauugaggagggaauuaucugguuacugcuccaacaucaaacuacagguggugaaagaugcccaggcucuauuacauggacuugacuucucagaagucaguaauguucaacgguugaugcgcaaggagagaagggaugacaaugauuugaaacgguugagggaccuaaaucaagcggucaacaaccucguugaguuaaaaucaacucaacaaaagagcauauugagaguugggacccuaaccucagaugacuuauuaaucuuagccgcugaucuagagaaguuaaaaucaaaggugaucaggacagaaaggccauugagugcaggugucuauaugggcaacuugagcucacagcagcuugaccaaagacgagcucuucugaguaugauaggaaugaguagugguaaucaaagggcucaggcugggagggauggaguggugagaguuugggauguaaaaaauguagaguugcuuaauaaucaguucggaaccaugccaagucuaacacuggcaugucugacaaaacaggggcagguugauuugaaugaugcagugcaagcacugacagauuugggucugaucuacacagcaaaguauccuaauacuucagaccuagauaggcugacucaaagucaccccaucuuaaacaugauugacaccaagaaaagcucuuugaauaucucugguuacaauuucagcuugggugcagcugugaaggcaggagcuugcaugcuggaugguggcaauauguuggagacaaucaaggugucaccucagacaauggaugguauccucaaauccaucuuaaaggucaagaaggcucuugggauguucaucucagacaccccuggugaaaggaaucccuaugaaaacauacucuacaagaucuguuugucaggagauggauggccauauauugcaucaagaaccucgauaacaggaagagccugggaaaacacugucguugacuuggaaucagaugggaagccacagaaagcuggcagcaacaauucuaauaaauccuugcagucaguaggguuuacugcugggcuuaccuauucucagcugaugacccucaaggaugcgaugcugcaacuugacccaaacgcuaagacuuggauggacaucgaaggaagaccugaagauccaguggaaauugcccucuaucagccaaguucaggcugcuacauacacuuuuuccgugaaccuacugauuuaaagcaguucaagcaggaugcuaaguacucacaugggauugaugucacagaccucuucgcugcacaaccgggcuugaccagugcuguuauagaugcacucccccggaacauggucauuaccugucagggguccgaugacauaaggaagcuccuugagucacaagguagaaaagacaucaaauuaauugauauugcccucagcaaaacugauuccaggaaguaugaaaaugcagucugggaucaguauaaagaccuaugccacaugcacacagguguuguuguugaaaagaagaaaagaggcgguaaagaggaaauaaccccucacugugcacuaauggacugcaucauguuugaugcagcagugucaggaggacugaacacaucuguuuugagagcagugcugccuagagauaugguauucagaacaucgacaccuagagucguccuguaaggacuagucccuguucccagagcccacuuuuuuuucuuuuuuugaaauaaaauagccugucuuucagaucuaaaaaaaaaaaaaaaaaaaaaaaaaaaaaaaaaaaaaaaaaaaaaaaaaaaaaaaaaaaaaaaaugcaucccccccccccccccccccccccccccccccaaaggcucuuuucagagccaccagaauu

SEQ ID NO: 10103 - RNA, 2005 nt, Artificial Sequence
  mRNA product Design a-2 comprising derived and/or modified sequence from LASV(G1442-SLE-2011;Clade IV)__AIT17181__NP (wt)
gggagaguccgcucagccagguugcagaagcggcuuagcguguguccuaaucuucucucugcguguagguaggccugugccgcaaacaagcuuaccaugagugcuucaaaggagguaaaguccuucuuguggacacaaucccugaggagggagcuguccgguuauuguuccaauaucaaacuacagguagugaaagaugcccaagcccuuuugcauggacuugauuucucugaggucagcaauguccaacgguugaugcgcaaacagagaagggaugacaaugaccugaaacggcugagggaucuaaaucaagcagucaacaaccuuguugagcugaaaucuacccaacagaaaagugugcugagaguaggaacucuaaccucagaugaucuguugguuuuggcugcugaccuggagaagcugaaaucaaaagugaucaggacagaaaggccauugagcgcaggugucuauaugggcaacuugagcucacagcaacuagaccaaagacgggcucuccugaauaugauaggaaugagugguggcauucaagggacucguacugggagagauggagugguaagagucugggauguaaaaaaugcagaccuacuuaacaaucaguucggcacuaugccaagucugacauuggcauguuuaacaaaacaaggacagguugaccugaaugauguggugcaggcacugacagaucugggccugauuuauacagcaaaguacccuaaugccucagacuuagauagguugacucagagucaccccaucuuaaacaugauugauaccaaaaaaaguucccuaaauaucucagguuacaacuucagucugggugcagcugugaaggcaggagcuugcaugcuggauggugguaacauguuggagacaaucaaggugucaccucagacaauggauggcauccucaagucuauccuaaagguaaaaaagacucuugggauguucaucucagacaccccuggugaaaggaauccuuaugagaacauacuuuacaagauuugucugucaggagauggauggccauauauugcaucaagaacuucaauuacaggaagggccugggaaaacacugucguugaucuggaaucagaugggaagccacagaaggcugggagcaacaauucuaacaaaucccugcagucagcaggcuuugccgcugggcucacuuauucucagcuuaugacccucaaagaugcaaugcugcagcuugaucccaaugcuaaaaccuggauggacauugagggaagaccugaagacccaguggagauugcucucuaucagccaaguucagguugcuacauucacuucuuccgugaaccuacugauuuaaagcaguucaagcaagaugcuaaauauucacauggaauugaugucacagaccucuucgccgcacaaccaggcuugaccagugcugucauagaggcacuuccccggaacauggucaucaccugucagggaucugaugacauaaagaaacuccuugaaucacagggaagaaaggauaucaaacuaauugacaucgcccucaguaaaacugauuccaggaaguaugaaaacgcagucugggaucaauauaaggacuuaugccauaugcacacagguguuguuguugaaaagaagaaaagaggcggcaaggaggagauaacaccucacugugcuuugauggacugcauuauguuugacgcagcagugucaggaggauugaacacauuggucuugagagcgguucuaccuagagacaugguguuuagaacaucgacacccagagucguccuguaaggacuagucccuguucccagagcccacuuuuuuuucuuuuuuugaaauaaaauagccugucuuucagaucuaaaaaaaaaaaaaaaaaaaaaaaaaaaaaaaaaaaaaaaaaaaaaaaaaaaaaaaaaaaaaaaaugcaucccccccccccccccccccccccccccccccaaaggcucuuuucagagccaccagaauu

SEQ ID NO: 10104 - RNA, 2005 nt, Artificial Sequence
  mRNA product Design a-2 comprising derived and/or modified sequence from LASV(G3010-SLE-2013;Clade IV)__AIT17345__NP (wt)
gggagaguccgcucagccagguugcagaagcggcuuagcguguguccuaaucuucucucugcguguagguaggccugugccgcaaacaagcuuaccaugagugccucaaaggaaauaaaguccuuucuguggacacagucauugaggagggaauugucugguuauuguucuaacaucaaacuacagguggugaaagaugcgcaagcucuuuuacauggacuugacuucuccgaagucaguaauguucaacgguugaugcgcaaggagagaagggaugacaaugauuugaaacgguugagggaccuaaaucaagcugucaacaaccuuguugaguuaaaaucaacucaacaaaaaaguauacugagaguugggacccuaaccucagaugacuuguuaaucuuggcugcugaucuagagaaguugaaaucaaaggugaccaggacagaaaggccauugagugcaggugucuauaugggcaaccugagcucacagcaacuugaccaaagacgagcucuucugaguaugauaggaaugaguagugguguucaaggggcucgggcugggagagauggaguggugagaguuugggauguaaaaaaugcagaguugcuuaauaaucaguucggaaccaugccaagucugacacuagcauguuugacaaaacaggggcagguugacuugaaugauguagugcaagcauugacagauuuggguuugaucuacacagcaaaguacccaaauacuucagauuuagauaggcugacucaaagucaccccauccugaacaugauugacaccaagaaaagcucuuugaauaucucagguuauaauuucagcuugggugcagcuguaaaggcaggagcuugcaugcuggaugguggcaacauguuggagacaaucaaggugucaccucagacaauggauggcauccucaaguccaucuuaaaggucaagaaagcucuugggauguucaucucagagaccccuggugaaaggaauccuuaugagaacauacucuacaagaucugucuaucaggagauggauggccauauauugcaucaagaaccucaauaacaggaagggccugggaaaacacugucguugaucuggaaucagaugggaagccacaaaaagcuggcagcaacaauuccaauaaaucccugcagucggcaggguuuaccgcugggcuuaccuauucucagcugaugacccucaaagacgcaaugcugcaacuugacccaaaugcuaagaccuggauggacauugaaggaaggccugaagauccaguggagguugcccucuaucaaccaaguucaggcugcuacauacacuucuuccgugaacccacugauuugaagcaguucaagcaggaugcuaaguacucacaugggauugauguuacagaccucuucgcugcgcaaccaggcuugaccagugcugucauagaugcacuuccccggaauauggucauuaccugucaggggucugaugacauaaagaaacuccuugaaucacaagguaggaaagacaucaagcuaauugauauugcccucaguaaaacugauuccaggaaguaugaaaaugcagucugggaccaguauaaagacuuaugccacaugcacacagguguugucguugaaaagaagaaaagaggcgguaaagaggaaauaaccccucacugugcacuaauggacugcaucauguuugaugcagcaguaucaggaggacugaacacaucggucuuaagagcagugcugcccagagauaugguguucagaacaucgacaccuagagucguucuguaaggacuagucccuguucccagagcccacuuuuuuuucuuuuuuugaaauaaaauagccugucuuucagaucuaaaaaaaaaaaaaaaaaaaaaaaaaaaaaaaaaaaaaaaaaaaaaaaaaaaaaaaaaaaaaaaaugcaucccccccccccccccccccccccccccccccaaaggcucuuuucagagccaccagaauu

SEQ ID NO: 10105 - RNA, 2005 nt, Artificial Sequence
  mRNA product Design a-2 comprising derived and/or modified sequence from LASV(G502-SLE-2009;Clade IV)__AIT17127__NP (wt)
gggagaguccgcucagccagguugcagaagcggcuuagcguguguccuaaucuucucucugcguguagguaggccugugccgcaaacaagcuuaccaugagugccucaaaggaaauaaaguccuuucuguggacacaaucauugaggagggaauugucugguuacugcuccaacaucaaacuacaggugguaaaagaugcccaggcucuucugcauggucuugacuucuccgaagucaguaauguucaacgguuaaugcgcaaggagagaagggaugacaaugacuugaaacgguugagggaccuaaaucaagcggucaacaaccuuguugaguuaaaaucaacucaacaaaagaguauacugagaguugggacucuaaccucagaugacuuauuaaucuuagcugcugaucuagagaaguugaaaucaaaggugaucaggacagaaaggccauugagugcaggugucuauaugggcaacuugagcucacagcaacuugaccaaagacgggcucuucugaguaugauaggaaugaguggugguaaucaagggguucgggcugggaaggauggaguggugagaguuugggaugugaaaaaugcagaguugcuuaauaaucaguuugggacuaugccaagucuaacacuggcaugucugacaaaacaggggcagguugacuugaaugaugcagugcaagcacugacagauuugggucugaucuacacagcaaaguaucccaauacuucagacuuagauaggcugacucaaagucaccccaucuuaaacaugauugacaccaagaagaguuccuugaauaucucugguuauaauuuuagcuugggugcagcugugaaagcaggagcuugcaugcuggaugguggcaauauguuggagacaaucaaagugucaccucagacaauggaugguauccucaaauccaucuuaaaggucaagaaggcucuugggauguucaucucagacaccccuggugaaaggaauccuuaugaaaacauacucuacaagauuuguuugucaggagauggauggccauauauugcaucaagaacuucaauaacaggaagagccugggaaaacacugucguugaccuagaaucagaugggaagccacagaaagcuggcagcaacaauuccaauaaaucccugcagucggcaggguuuaccgcugggcuuaccuauucucagcugaugacccucaaggaugcgaugcugcagcuugacccaaacacuaagacuuggauggacaucgaaggaagaccugaagacccaguggaaauugcccucuaucagccaaguucaggcugcuacauacacuuuuuccgugaaccuacugauuuaaagcaguucaagcaggaugcuaaguacucacaugggauugauguuacagaccucuucgcugcacaaccgggcuugaccagugcugucauagaugcacucccccggaauauggucauuaccugucagggguccgaugacauaaggaaacuccuugaaucacaagguagaaaagacaucaaacuaauugauauugcccucaacaaaacugauuccaggaaguaugaaaaugcagucugggaucaguauaaggacuugugccacaugcacacaggugucguuguugaaaagaagaaaagaggcgguaaagaggaaauaaccccucacugugcacuaauggacugcaucauguuugaugcagcagugucaggaggacugaacacaucuguuuugagagcagugcugccuagagauaugguauucagaacaucaacacccagagucguccuguaaggacuagucccuguucccagagcccacuuuuuuuucuuuuuuugaaauaaaauagccugucuuucagaucuaaaaaaaaaaaaaaaaaaaaaaaaaaaaaaaaaaaaaaaaaaaaaaaaaaaaaaaaaaaaaaaaugcaucccccccccccccccccccccccccccccccaaaggcucuuuucagagccaccagaauu

SEQ ID NO: 10106 - RNA, 2005 nt, Artificial Sequence
  mRNA product Design a-2 comprising derived and/or modified sequence from LASV(G733-SLE-2010;Clade IV)__AIT17155__NP (wt)
gggagaguccgcucagccagguugcagaagcggcuuagcguguguccuaaucuucucucugcguguagguaggccugugccgcaaacaagcuuaccaugagugccucaaaggaaauaaagucuuuucuguggacacaaucccugaggagggaacugucugguuacugcuccaacaucaaacuucaggugguaaaagaugcccaagcucuuuugcacggacuugacuucuccgaagucaguaauguucaacgguugaugcgcaaagagagaagggaugacaaugauuugaaacggcugagggaccuaaaucaagcggucaacaaccuuguugaguuaaaaucaacucaacagaagaguguacugagaguugggacccuaaccucagaugaguuauuagucuuggcugcugaucuagagaaauuaaaaucaaaagugaucaggacagaaaggccauugagugcaggugucuauaugggcaaccugagcucacagcaacuugaccaaaggcgagcucuucugaguaugauagggaugagugguggcaaucaaggggcucggacugggagagaugggguggugagaguuugggauguaaaaaaugcagaauugcucaauaaucaguucgggaccaugccaagucugacacuggcaugucugacaaaacaagggcagguugacuuaaaugaugcagugcaagcauugacagauuuggguuugaucuacacagcaaaguauccuaacacuucagacuuggauaggcugacucaaagucaccccauccuaaauaugauugacaccaagaaaagcucuuugaacaucucagguuauaauuuuagcuugggugcagcugugaaggcaggagcuuguaugcuggaugguggcaauauguuggagacaaucaaagugucaccucagacaauggauggcauccucaaauccauuuuaaaggucaagaaggcucuugggauguucauuucagacaccccuggugaaaggaaucccuacgaaaacauacucuacaagauuuguuugucaggggauggauggccauauauugcaucaagaaccucaauaacaggaagggccugggaaaacacugucguugaucuagagucagaugggaagccacagaaagcuggcagcaacaauuccaacaaaucccugcagucggcaggguuuacugcugggcuuacuuauucucagcuuaugacccucaaggaugcaaugcugcaacuugauccaaaugcuaagacuuggauggacauugaaggaagaccugaagauccaguggaaauugcccucuaucaaccaaguucaggcugcuacauacacuucuuccgugagccuacugauuuaaagcaguucaagcaagaugcuaaauacucacaugggauugaugucacagaccucuucgcugcacaaccgggcuuaacuagugcugucauagaugcacucccccggaauaugguuaucaccugucagggguccgaugauauaaggaaacuccuugaaucacaaggaagaaaggacaucaaauuaauugacauugcccucagcaaaauugauuccaggaaguaugaaaaugcagucugggaucaguauaaagacuuaugccacaugcacacaggugucguuguugaaaagaagaaaagaggcgguaaagaggaaauaaccccucacugugcacuaauggacugcaucauguuugaugcagcagugucaggaggacugaacucauuaguuuugagagcagugcugcccagagacaugguauucagaacaucgacaccaagagucguccuguaaggacuagucccuguucccagagcccacuuuuuuuucuuuuuuugaaauaaaauagccugucuuucagaucuaaaaaaaaaaaaaaaaaaaaaaaaaaaaaaaaaaaaaaaaaaaaaaaaaaaaaaaaaaaaaaaaugcaucccccccccccccccccccccccccccccccaaaggcucuuuucagagccaccagaauu

SEQ ID NO: 10107 - RNA, 2005 nt, Artificial Sequence
  mRNA product Design a-2 comprising derived and/or modified sequence from MOPV/LASV reassortant(IGS-1;Clade IV)__AFY05578__NP (wt)
gggagaguccgcucagccagguugcagaagcggcuuagcguguguccuaaucuucucucugcguguagguaggccugugccgcaaacaagcuuaccaugagugccucaaaggaaauaaaauccuuuuuguggacacaaucuuugaggagggaauuaucugguuacugcuccaacaucaaacuacagguggugaaagaugcccaggcucuuuuacauggacuugacuucuccgaagucaguaauguucaacgguugaugcgcaaggagagaagggaugacaaugauuugaaacgguugagggaccuaaaucaagcggucaacaaucuuguugaauuaaaaucaacucaacaaaagaguauacugagaguugggacucuaaccucagaugacuuauuaaucuuagccgcugaucuagagaaguuaaggucaaaggugaucagaacagaaaggccauuaagugcaggugucuauaugggcaaccuaagcucacagcaacuugaccaaagaagagcucuccugaauaugauaggaaugaguggugguaaucaaggggcucgggcugggagagauggaguggugagaguuugggaugugaaaaaugcagaguugcucaguaaucaguucgggaccaugccaagucugacacuggcaugucugacaaaacaggggcagguugacuugaaugaugcaguacaagcauugacagauuuggguuugaucuacacagcaaaguaucccaacacuucagacuuagacaggcugacucaaagucaucccauccuaaauaugauugacaccaagaaaagcucuuugaauaucucagguuauaauuuuagcuugggugcagcugugaaggcaggagcuugcaugcuggaugguggcaauauguuggagacaaucaaggugucaccucagacaauggaugguauccucaaauccauuuuaaaggucaagaaggcucuuggaauguucauuucagacaccccuggugaaaggaauccuuaugaaaacauacucuacaagauuuguuugucaggagauggauggccauauauugcaucaagaaccucaauaacaggaagggccugggaaaacacugucguugaucuggaaucagaugggaagccacagaaagcugacagcaacaauuccaguaaaucccugcagucggcaggguuuaccgcugggcuuaccuauucucagcugaugacccucaaggaugcaaugcugcaacuugacccaaaugcuaagaccuggauggacauugaaggaagaccugaagauccaguggaaauugcccucuaucaaccaaguucaggcugcuacauacacuucuuccgugaaccuacugauuuaaagcaguucaagcaggaugcuaaguacucacaugggauugaugucacagaccucuucgcuacacaaccgggcuugaccagugcugucauugaugcacucccccggaauauggucauuaccugucagggguccgaugacauaaggaaacuccuugaaucacaaggaagaaaagacauuaaacuaauugauauugaccucaguaaaacugauuccaggaaguaugaaaaugcagucugggaccaguauaaagacuuaugccacaugcacacaggugucguuguugaaaagaagaaaagaggcgguaaagaggaaauaaccccucacugugcacuaauggacugcaucauguuugaugcagcagugucaggaggacugaacacaucgguuuugagagcagugcugcccagagauaugguguucagaacaucgacaccuagagucguucuguaaggacuagucccuguucccagagcccacuuuuuuuucuuuuuuugaaauaaaauagccugucuuucagaucuaaaaaaaaaaaaaaaaaaaaaaaaaaaaaaaaaaaaaaaaaaaaaaaaaaaaaaaaaaaaaaaaugcaucccccccccccccccccccccccccccccccaaaggcucuuuucagagccaccagaauu

SEQ ID NO: 10108 - RNA, 2005 nt, Artificial Sequence
  mRNA product Design a-2 comprising derived and/or modified sequence from LASV(LM765-SLE-2012;Clade IV)__AIT17815__NP (wt)
gggagaguccgcucagccagguugcagaagcggcuuagcguguguccuaaucuucucucugcguguagguaggccugugccgcaaacaagcuuaccaugagugccucaaaggaaauaaaauccuuuuuguggacacaauccuugaggagggaauuaucugguuacugcuccaacaucaaacugcagguggugaaggaugcccaggcucuuuuacaugggcuugacuucucugaagucaguaauguucaacgguugaugcgcaaggagagaagggaugacaaugauuugaaacgguugagggaccuaaaucaagcagucaacaaucuuguugaauuaaaaucaacucaacaaaagaguauacugagaguugggacucuaaccucagaugacuuauuaaucuuggccgcugaucuagagaaguugaagucgaaggugaccagaacagaaaggccauugagugcaggugucuauaugggcaaccuaagcucucagcaacuugaccaaagaagagcucuucuggacaugauaggaaugagugguaguaaucaaggggcucgggcugggagagauggaguggucagaguuugggaugugaaaaaugcagaguugcucaauaaucaguucgggaccaugccaagucugacacuggcaugucugacaaaacaggggcagguugacuugaaugaugcagugcaagcauugacagauuuagguuugaucuacacagcgaaguaccccaauacuucagacuuggacaggcugacucaaagucaucccauccuaaauaugauugacaccaagaaaagcucuuugaacaucucagguuauaauuuuagcuugggugcagcugugaaggcaggagcuuguaugcuggaugguggcaauauguuggagacaaucaaggugucaccucagacaauggauggcauucucaaauccauuuuaaaggucaagaaggcucuugggauguuuauuucagaugccccuggugaaaggaauccuuaugaaaacauacucuacaagauuuguuuaucaggagacggauggccauacauugcaucaagaaccucaauaacaggaagggccugggaaaacacuguuguugaccuggaaucagaugggaagccacagaaagcuggcaguaacgguuccaauaaaucucugcagucggcaggauuuaccgcugggcucaccuauucucagcugaugacccucaaggaugcaaugcugcaacuugacccaaaugcuaagaccuggauggacauugaaggaagaccugaagauccaguggaaaucgcccucuaucaaccaaguucagggugcuacauacacuucuuccgugaaccuacugauuuaaagcaguucaagcaggaugcuaaguacucacaugggauugaugucacggaccucuucgcugcacagccgggcuugaccagugcugucauugaugcacucccccggaauauggucaucaccugccagggaucugaugacauaaggaaacucuuugaaucacaaggaagaaaagacauuaaacuaauugacauugcccucagcaagacugauuccaggaaguaugaaaaugcagucugggaucaguauaaagauuuaugccacaugcauacagguauuguuguugagaagaagaaaagaggugguaaagaggaaauaaccccucacugugcauuaauggacugcaucauguuugaugcagcaguaucaggaggacugaacacaucaguuuugagagcagugcugcccagagacaugguguucagaacaucgacaccuagggucguccuguaaggacuagucccuguucccagagcccacuuuuuuuucuuuuuuugaaauaaaauagccugucuuucagaucuaaaaaaaaaaaaaaaaaaaaaaaaaaaaaaaaaaaaaaaaaaaaaaaaaaaaaaaaaaaaaaaaugcaucccccccccccccccccccccccccccccccaaaggcucuuuucagagccaccagaauu

SEQ ID NO: 10109 - RNA, 2005 nt, Artificial Sequence
  mRNA product Design a-2 comprising derived and/or modified sequence from LASV(LM776-SLE-2012;Clade IV)__AIT17825__NP (wt)
gggagaguccgcucagccagguugcagaagcggcuuagcguguguccuaaucuucucucugcguguagguaggccugugccgcaaacaagcuuaccaugagugcuucaaaggaaauaaaguccuuucuguggacacaaucauuaaggagggaauuaucuaguuacuguuccaacaucaaacuacagguggugaaagaugcccaggcucuuuugcaugggcuugacuucuccgaagucagcaauguucaacgguugaugcgcaaggagagaagggaugacaaugauuuaaagcgguugagggaccuuaaucaagcagucaacaaccuuguugaguuaaaaucaacucaacaaaagaguauauugagaguugggaccuuaaccucagaugacuuacuaaucuuagcugcugaucuagagaagcugaaaucaaaggugacuaggacagaaaggccauugagugcaggugucuacauggguaaccugagcucacagcaacuugaccagagacgagcucuucugagcaugauagggaugagugguaguaaucaaggggcucgggcugggagagauggaguggugagaguuugggaugugaaaaaugcagaguugcucaauaaucaguucgggaccaugccaagucuuacacuggcauguuugacaaaacaggggcagguugacuugaaugaugcagugcaagcauugacagauuugggucugaucuacacggcaaaguaucccaauacuucagaccuggauaggcugacucaaagucaccccauccuaaacaugauugacaccaagaagagcucuuuaaacaucucagguuauaauuuuagcuugggugcagcugugaaggcaggagcuugcaugcuggaugguggcaacauguuggagacaaucaaggugucaccucagacaauggaugguauccucaaauccaucuugaaggucaagaaggcucuugggauguucaucucagacaccccuggugaaaggaauccuuaugagaacauacucuauaagaucugucugucaggagauggguggccauacauugcaucaaggaccucaauaacaggaagggcuugggaaaacacugucguugaucuggaaucagaugggaagccacagaaagcuggcagcaacaauucuaacaaaucccugcagucggcaggguuuaccgcugggcuuaccuauucucagcuaaugacucucaaggaugcaaugcugcaacuugauccaaaugcuaagaccuggauggauauugaaggaagaccugaagauccaguggaaguugcccucuaucaaccaaguucaggcuguuacauucacuucuuccgugaaccuacugauuuaaagcaguucaaacaggaugcuaaguacucacaugggauugaugucacagaccucuucgcugcacaaccgggccugaccagugcugucauagaugcacucccucggaauauggucauuaccugucagggguccgaugacauaaggaaacuccuugaaucacaagguaggaaagacaucaaacuaauugauauugcccucagcaaaacugauuccaggaaguaugaaaaugcagucugggaucaguauaaagacuuaugccacaugcacacaggugucguuguugagaagaagaaaagaggugguaaagaggaaauaaccccucacugugcacuaauggacugcaucauguuugacgcagcagugucaggaggacugaacacaucgguuuugagagcagugcugcccagggauaugguguucagaacaucaacaccuagagucguucuguaaggacuagucccuguucccagagcccacuuuuuuuucuuuuuuugaaauaaaauagccugucuuucagaucuaaaaaaaaaaaaaaaaaaaaaaaaaaaaaaaaaaaaaaaaaaaaaaaaaaaaaaaaaaaaaaaaugcaucccccccccccccccccccccccccccccccaaaggcucuuuucagagccaccagaauu

SEQ ID NO: 10110 - RNA, 2005 nt, Artificial Sequence
  mRNA product Design a-2 comprising derived and/or modified sequence from LASV(Mad39;Clade IV)__ANH09723__NP (wt)
gggagaguccgcucagccagguugcagaagcggcuuagcguguguccuaaucuucucucugcguguagguaggccugugccgcaaacaagcuuaccaugagugccucaaaagagauaaagucuuuuuuguggacacagucucugaggagggaauugucggguuacugcuccaacaucaaacuacagguggugaaagaugcccaggcucuuuuacauggacuugacuuuucugaggucagcaacguccaacggcugaugcgcaaacagagaagggaugacaaugaucuaaagcggcugagggauuuaaaucaagcaguuaacaaucuuguugaacuaaaaucaacucagcaaaagaguguguugagaguuggaacucuaaccucagaugacuuguugacauuagcugcugaccuagagaagcugaaaucaaagguaaccaggacagaaagaccauugaccgcaggcguuuacaugggcaacuuaaguucacaacagcuugaccaaagacgggcucuccugaauaugauaggaaugaguggugguaaccaaggggcucgaacugggagagaugggguagugagggucugggauguuaaaaaugcagaauugcucaacaaucaguuuggaacuaugccaagcuugacacuagcaugccugacaaagcaagggcagguugaccuaaaugauguggugcaagcacuaacagaucuaggccugaucuauacagcaaaguaucccaacacuucagaccuggacagacuaacucagagccaucccauccuaaacaugauugauacuaauaaaagcucccuaaauaucucagguuauaauuuuagcuugggugcagcugugaaggcaggagcuugcaugcuggaugguggaaacaugcuagagacaaucaaagugucaccccaaacaauggauggcauccucaaguccauuuuaaagguaaaaaagagucuugggauguucauuucagacacccccggcgagagaaaucccuaugaaaauauacucuacaagauuugucugucgggggauggguggccauauauugcaucaaggaccucaauaacaggaagggccugggaaaauacuguuguugaucuagaaucaggugggaagccacagaaagcugguagcaacaacuccaacaagucccuacaaucggcaggauuugcugcugggcucacuuauucucaguuaaugacccucaaggaugcaauguugcaacuugauccaaaugcuaagaccuggauggauauugagggaaggccugaagacccaguggagauugcucucuaucagccaauuucggguugcuacauucacuucuuccgugaaccuacugaucugaaacaguucaagcaagaugcuaaguauucacauggaauugauguuacagaccuuuuugcugcacaaccaggauuaacuagugcugugauagaagcacucccccggaacauggucaucaccugucaaggaucugacgacauaaggaaacuuuuugagucacaaggaaggaaagacaucaagcugauugauauugcucucagcaaaacugauucuagaaaauaugaaaacgcagucugggaccaguacaaagauuuaugucauaugcacacagguguuguuguugagaagaaaaagaagggcggcaaagaagaaauaaccccucauugugcucuaauggacugcaucauguuugaugcagcaguaucaggagggcugaacacgcugguuuugagagcagugcuaccuagagauaugguguucagaacaucaacaccuaaagucguccuguaaggacuagucccuguucccagagcccacuuuuuuuucuuuuuuugaaauaaaauagccugucuuucagaucuaaaaaaaaaaaaaaaaaaaaaaaaaaaaaaaaaaaaaaaaaaaaaaaaaaaaaaaaaaaaaaaaugcaucccccccccccccccccccccccccccccccaaaggcucuuuucagagccaccagaauu

SEQ ID NO: 10111 - RNA, 2005 nt, Artificial Sequence
  mRNA product Design a-2 comprising derived and/or modified sequence from LASV(Z0947-SLE-2011;Clade IV)__AIT17841__NP (wt)
gggagaguccgcucagccagguugcagaagcggcuuagcguguguccuaaucuucucucugcguguagguaggccugugccgcaaacaagcuuaccaugagugccucaaaggaaauaaaguccuuuuuguggacacaauccuugaggagggaauuaucugguuacugcuccaacaucaaacugcagguggugaaggaugcccaggcucuuuuacaugggcuugacuucucugaagucaguaauguucaacgguugaugcgcaaggagagaagggaugacaaugauuugaaacgguugagggaccuaaaucaagcagucaacaaucuuguugaauuaaaaucaacucaacaaaagaguauacugagaguugggacucuaaccucagaugacuuauuaaucuuggccgcugaucuagagaaguugaagucgaaggugaccagaacagaaagaccauugagugcaggugucuauaugggcaaccuaagcucacagcaacuugaccaaagaagagcucuucugaacaugauaggaaugagugguaguaaucaaggggcucggacugggagagauggaguggucagaguuugggaugugaaaaaugcagaguugcucaauaaucaguucggaaccaugccaagucugacacuggcaugucugacaaaacaggggcagguugacuugaaugaugcaguacaagcauugacagauuuagguuugaucuacacagcgaaguaccccaauacuucagacuuggacaggcugacucaaagucaccccauccuaaauaugauugacaccaagaaaagcucuuugaacaucucagguuauaauuuuagcuugggugcagcugugaaggcaggagcuuguaugcuggaugguggcaauauguuggagacaaucaaggugucaccucagacaauggaugguauucucaaauccauuuuaaaggucaagaaggcucuugggauguucauuucagaugccccuggugaaaggaauccuuaugaaaacauacucuacaagauuuguuugucaggagacggauggccauacauugcaucaagaaccucaauaacaggaagggccugggaaaacacuguuguugaucuggaaucagaugggaagccacagaaagcuggcaguaacgguuccaauaaaucucugcagucggcaggauuuaccgcugggcucaccuauucucagcugaugacccucaaggaugcaaugcugcaacuugacccaaaugcuaagaccuggauggacauugaaggaagaccugaagauccaguggaaaucgcccucuaucaaccaaguucagggugcuacauacacuucuuccgugaaccuacugauuuaaagcaguucaagcaggaugcuaaguacucacaugggauugaugucacggaccucuucgcugcacaaccgggcuugaccagugcugucauugaugcacucccccggaauauggucaucaccugccaggggucugaugacauaaggaaacucuuugaaucacaaggaagaaaagacauuaaacuaauugacauugcccucagcaagacugauuccaggaaguaugaaaaugcagucugggaucaguauaaagacuuaugccacaugcauacaggcauuguuguugagaagaagaaaagaggcggcaaagaggaaauaaccccucacugugcacuaauggacugcaucauguuugaugcagcaguaucaggaggacugaacacaucaguuuugagagcagugcugcccagagacaugguguucagaacaucgacaccuagggucguccuguaaggacuagucccuguucccagagcccacuuuuuuuucuuuuuuugaaauaaaauagccugucuuucagaucuaaaaaaaaaaaaaaaaaaaaaaaaaaaaaaaaaaaaaaaaaaaaaaaaaaaaaaaaaaaaaaaaugcaucccccccccccccccccccccccccccccccaaaggcucuuuucagagccaccagaauu

SEQ ID NO: 10112 - RNA, 2005 nt, Artificial Sequence
  mRNA product Design a-2 comprising derived and/or modified sequence from LASV(Josiah;Clade IV)__NP_694869__NP (opt1)
gggagaguccgcucagccagguugcagaagcggcuuagcguguguccuaaucuucucucugcguguagguaggccugugccgcaaacaagcuuaccaugagcgccuccaaggagaucaagagcuuccuguggacccagucccuccgccgggagcugagcggcuacugcuccaacaucaagcuccagguggucaaggacgcccaggcgcugcugcacgggcuggacuucagcgagguguccaacgugcagcgccucaugcggaaggagcgccgggacgacaacgaccugaagcgccugcgggaccucaaccaggccgucaacaaccugguggagcucaagagcacccagcagaaguccauccugcgcgugggcacccugaccagcgacgaccugcucauccuggccgccgaccuggagaagcucaaguccaaggucauccggaccgagcgcccccugagcgccgggguguacaugggcaaccuguccagccagcagcucgaccagcggcgcgcgcugcugaacaugaucgggauguccggcggcaaccagggggcccgggccggccgcgacggggugguccgggugugggacgugaagaacgccgagcuccugaacaaccaguucggcaccaugccgagccugacgcucgcgugccugaccaagcaggggcaggucgaccugaacgacgccgugcaggcccucaccgaccugggccugaucuacaccgccaaguaccccaacacguccgaccucgaccgccugacccagagccaccccauccugaacaugaucgacaccaagaaguccagccucaacaucagcggcuacaacuucucccugggggccgcggugaaggccggcgccugcaugcuggacgggggcaacaugcucgagaccaucaaggucagcccccagacgauggacggcauccugaaguccauccugaaggugaagaaggcccucgggauguucaucagcgacaccccgggcgagcggaaccccuacgagaacauccuguacaagaucugccuguccggggacggcuggcccuacaucgccagccgcaccuccaucaccgggcgggcgugggagaacacgguggucgaccucgagagcgacggcaagccccagaaggccgacuccaacaacagcuccaagagccugcaguccgccggcuucaccgccgggcugaccuacagccagcucaugacccugaaggacgccaugcugcagcuggacccgaacgcgaagacguggauggacaucgagggccgccccgaggaccccguggagaucgcccucuaccagcccuccagcgggugcuacauccacuucuuccgggagccgaccgaccugaagcaguucaagcaggacgccaaguacucccacggcaucgacgugaccgaccuguucgccacccagcccgggcucacgagcgccgucaucgacgcgcugccccgcaacauggugaucacgugccagggcuccgacgacauccgcaagcugcucgagagccagggccggaaggacaucaagcugaucgacaucgcccugagcaagaccgacucccgcaaguacgagaacgccgugugggaccaguacaaggaccucugccacaugcacaccggggucguggucgagaagaagaagcggggcgggaaggaggagaucaccccgcacugcgcccugauggacugcaucauguucgacgcggccgugagcggcgggcugaacaccuccgugcuccgcgccguccugccccgggacaugguguuccgcaccagcacgccccgggugguccugugaggacuagucccuguucccagagcccacuuuuuuuucuuuuuuugaaauaaaauagccugucuuucagaucuaaaaaaaaaaaaaaaaaaaaaaaaaaaaaaaaaaaaaaaaaaaaaaaaaaaaaaaaaaaaaaaaugcaucccccccccccccccccccccccccccccccaaaggcucuuuucagagccaccagaauu

SEQ ID NO: 10113 - RNA, 2005 nt, Artificial Sequence
  mRNA product Design a-2 comprising derived and/or modified sequence from LASV(LP;Clade I)__AAF86702__NP (opt1)
gggagaguccgcucagccagguugcagaagcggcuuagcguguguccuaaucuucucucugcguguagguaggccugugccgcaaacaagcuuaccaugagcaacuccaaggagaucaagagcuuccuguggacccagucccuccgccgggagcugagcggcuacugcuccaacaucaagcuccagguggucaaggacgcccaggcccugcugcacgggcuggacuucagcgagguguccaacgugcagcgccucaugcggaagcagaagcgcgacgacgcggaccugaagcggcugcgcgaccucaaccaggccgucaacaaccugguggagcucaagagcacccagcagaagaacgugcugcgggucggcacgcuguccagcgacgaccugaucacccucgccgccgaccuggagaagcugaaguccaaggugauccgcaccgagcggccccucagcuccgggguguacaugggcaaccugagcucccagcagcuggaccagcgccgggcccuccugagcaugaucgggauguccggcggcccgcaggggaaccgcaccggcggggacggcgucgugcgggugugggacgucaagaacgcggagcugcucaacaaccaguucgggacgaugcccagccugacccuggccugccucaccaagcagggccagguggaccugaacgacgccgugcaggcccugaccgaccucggccugaucuacacggcgaaguaccccaacuccagcgaccuggacaugcucacccagagccaccccauccuggggauggucgacaccaagaaguccagccugaacaucuccggcuacaacuucagccucggggccgccgugaaggccggcgccugcaugcuggacggcgggaacaugcuggagaccaucaagguguccccgcagacgauggacggcauccucaagagcauccugaaggucaagcgcucccuggggauguucaucagcgacacccccggcgagcggaaccccuacgagaacauccucuacaagaucugccuguccggggagggcuggcccuacaucgcgagccgcaccuccaucaccggccgggccugggagaacacgcugguggaccucgagagcgacaacaagccgcccaagcugaacuccgccgggagcaacaagucccugcaggccgccggccucaacgcggggcugaccuacagccagcugaugacccugaaggacugcaugcuccagcuggaccccuccagcaagaccuggaucgacaucgagggccgccccgaggacccgguggagaucgcccuguuccagcccuccagcgggugcuacauccacuucuuccgggagcccacggaccucaagcaguucaagcaggacgccaaguacagccacggcaucgacgucaccgaccuguucuccacccagcccggccugaccagcgccgugaucgaggcccucccgcgcaacauggugcugacgugccagggguccgacgacaucaagaagcugcucgagagccagggccggcgcgacaucaagcugaucgacaucucccugagcaaggcggacucccgcaaguucgagaacgccgucugggaccaguacaaggaccucugccacaugcacaccgggguggucguggagaagaagaagcggggcgggaaggaggagaucacgccccacugcgcccugcuggacugcaucauguucgacgccgccaccaccggcagccucaacaucaccacccugcgcgcggugcugccccgggacauggucuuccgcaccuccacgcccaagguggugcucugaggacuagucccuguucccagagcccacuuuuuuuucuuuuuuugaaauaaaauagccugucuuucagaucuaaaaaaaaaaaaaaaaaaaaaaaaaaaaaaaaaaaaaaaaaaaaaaaaaaaaaaaaaaaaaaaaugcaucccccccccccccccccccccccccccccccaaaggcucuuuucagagccaccagaauu

SEQ ID NO: 10114 - RNA, 2005 nt, Artificial Sequence
  mRNA product Design a-2 comprising derived and/or modified sequence from LASV(803213;Clade II)__AAF86704__NP (opt1)
gggagaguccgcucagccagguugcagaagcggcuuagcguguguccuaaucuucucucugcguguagguaggccugugccgcaaacaagcuuaccaugagcgccuccaaggaggugaaguccuuccuguggacccagagccuccgccgggagcugagcggcuacugcuccaacaucaagcugcaggucgugaaggacgcccaggcgcuccugcacgggcuggacuucagcgaggugaacaacguccagcgccucaugcggaagcagaagcgcgacgacggcgaccugaagcggcugcgcgaccucaaccaggccgugaacaaccugguggagcugaaguccacccagcagaaguccauccuccgggucgggacgcugaccagcgacgaccugcucacccuggccgccgaccuggagaagcucaagagcaaggugauccgcaccgagcggccccuguccagcggcguguacauggggaaccuguccacgcagcagcucgagcagcgccgggcccugcugaacaugaucggcauggucggcggggcgcagggcacccagccggggcgcgacggcguggugcgggucugggacgugaagaaccccgaccuccugaacaaccaguucgggaccaugcccagccugacccucgccugccugacgaagcagggccagguggaccugaacgacgccguccucgcccugaccgaccugggccucaucuacaccgcgaaguaccccaacuccagcgaccuggaccgccugucccagagccacccgauccucaacaugguggacaccaagaaguccagccugaacaucagcggguacaacuucucccugggcgccgccgugaaggccggggccugcaugcucgacggcggcaacaugcuggagacgaucaaggucacgccccagaccauggacgggauccucaagagcauccugaaggugaagcggucccugggcauguucgugagcgacacccccggggagcgcaaccccuacgagaacauccuguacaagaucugccucuccggcgacggguggccguacaucgcgagccggaccuccaucgucggccgcgccugggagaacaccaccguggaccuggagagcgacggcaagccccagaagguggggaccgccggcuccaacaagagccugcaguccgccggguuccccacgggccucaccuacagccagcugaugacccugaaggacuccaugaugcagcuggaccccagcgccaagaccuggaucgacaucgaggggcggccggaggaccccgucgagaucgcgcucuaccagcccauguccggcugcuacauccacuucuuccgcgagcccacggaccugaagcaguucaagcaggacgccaaguacagccacggcaucgacguggccgaccuguucccggcccagcccgggcucaccuccgccgucaucgaggcgcugccccggaacauggugcugaccugccagggcagcgacgacaucaagaagcuccuggacucccaggggcgccgcgacaucaagcugaucgacaucagccucagcaagguggacucccggaaguucgagaacgccgucugggaccagugcaaggaccugugccacaugcacaccggcgugguggucgagaagaagaagcgcgggggcaaggaggagaucacgccccacugcgcccugauggacugcaucauguucgacgccgccgugagcggcgggcucaacaucccggugcugcgggcgguccugccccgcgacaugguguuccggaccuccagccccaaggugguccucugaggacuagucccuguucccagagcccacuuuuuuuucuuuuuuugaaauaaaauagccugucuuucagaucuaaaaaaaaaaaaaaaaaaaaaaaaaaaaaaaaaaaaaaaaaaaaaaaaaaaaaaaaaaaaaaaaugcaucccccccccccccccccccccccccccccccaaaggcucuuuucagagccaccagaauu

SEQ ID NO: 10115 - RNA, 2008 nt, Artificial Sequence
  mRNA product Design a-2 comprising derived and/or modified sequence from LASV(GA391;Clade III)__CAA36646__NP (opt1)
gggagaguccgcucagccagguugcagaagcggcuuagcguguguccuaaucuucucucugcguguagguaggccugugccgcaaacaagcuuaccaugagcgccuccaaggaggugcgcagcuuccuguggacccagucccuccggcgcgagcugagcggcuacugcuccaacaucaagcugcaggucgugaaggacgcccaggcgcuccugcacgggcuggacuucagcgagguguccaacguccagcggcucaugcgcaagcagaagcgggacgacggcgaccugaagcgccugcgggaccucaaccaggccgugaacaaccugguggagcucaagagcacccagcagaaguccguccugcgcguggggacccugagcuccgacgaccugcucauccuggccgccgaccuggagaagcucaagagcaaggugacccggaccgagcgcccccuguccagcggcgucuacauggggaaccuguccagccagcagcucgaccagcggcgcgcccugcugaacaugaucggcaugaccggcguguccgggggcgggaagggcgcgagcgacgggaucgugcgggucugggacgugaagaacgccgagcuccugaacaaccaguucggcacgaugccgucccugacccucgccugccugaccaagcagggccagguggaccugaacgacgccguccaggcgcucaccgaccuggggcugaucuacacggccaaguaccccaacagcagcgaccucgaccgccugucccagagccaccccauccugaacaugaucgacaccaagaaguccagccucaacaucuccggcuacaacuucagccugggggccgccgugaaggccggcgcgugcaugcuggacggcgggaacaugcucgagaccaucaaggugagcccccagaccauggacggcauccucaaguccauccugaaggucaagaagucccuggggauguucgugagcgacacgccgggcgagcggaaccccuacgagaacauccuguacaagaucugccuguccggggacggcuggcccuacaucgccagccgcaccuccaucgugggccgggccugggagaacaccgucguggaccucgagcaggacaacaagccccagaagaucgggaacggcgggagcaacaagucccugcagagcgccggcuucgccgcggggcugaccuacucccagcucaugacgcugaaggacuucaagugcuucaaccugaucccgaacgccaagaccuggauggacaucgagggccgccccgaggaccccguggagaucgcccuguaccagcccagcuccggcugcuacguccacuucuuccgggagccgaccgaccucaagcaguucaagcaggacgccaaguacagccacgggaucgacgugaccgaccuguucgccgcgcagcccggccugacgagcgccgucaucgaggcccucccccgcaacauggugaucacgugccagggguccgaggacauccggaagcugcuggagagccagggccgccgcgacaucaagcucaucgacaucacccuguccaaggccgacagccggaaguucgagaacgccgugugggaccaguucaaggaccugugccacaugcacaccggggucgugguggagaagaagaagcgcggcggcaaggaggagaucacgccccacugcgcgcucauggacugcaucauguucgacgccgccgucuccgggggccuggacgccaaggugcugcgggugguccucccgcgcgacaugguguuccggaccagcacccccaaggugguccugugaggacuagucccuguucccagagcccacuuuuuuuucuuuuuuugaaauaaaauagccugucuuucagaucuaaaaaaaaaaaaaaaaaaaaaaaaaaaaaaaaaaaaaaaaaaaaaaaaaaaaaaaaaaaaaaaaugcaucccccccccccccccccccccccccccccccaaaggcucuuuucagagccaccagaauu

SEQ ID NO: 10116 - RNA, 2005 nt, Artificial Sequence
  mRNA product Design a-2 comprising derived and/or modified sequence from LASV(AV;Clade V)__CCA30315__NP (opt1)
gggagaguccgcucagccagguugcagaagcggcuuagcguguguccuaaucuucucucugcguguagguaggccugugccgcaaacaagcuuaccaugagcgccuccaaggaggugaaguccuuccuguggacccagagccuccgccgggagcugagcggcuacugcuccaacaucaagcugcaggucgugaaggacgcccaggcgcuccugcacgggcuggacuucagcgagguguccaacguccagcgccucaugcggaagcagcgccgggacgacagcgaccugaagcgccugcgggaccucaaccaggccgugaacaaccugguggagcugaaguccacccagcagaaguccguccuccgcgugggcacgcugagcagcgacgaccugcucacccuggccgccgaccuggagaagcucaaguccaaggugacccggaccgagcgcccccugagcuccggggucuacaugggcaaccugagcucccagcagcucgaccagcggcgcgcccugcugaaccucaucgggaugacgaacggcagccagggcucccaggcggggcgggacggcguggugcgcgucugggacgugaagaacgccgagcugcugaacaaccaguucgggaccaugccgagccucacccuggccugccugaccaagcagggccagguggaccucaacgacgucgugcaggcccugacggaccuggggcucaucuacaccgcgaaguaccccaacaccagcgaccuggaccggcugacccagucccaccccauccucaacaugaucgacacgaagaaguccagccugaacaucagcggcuacaacuucucccugggcgccgccgugaaggccggggccugcaugcucgacggcgggaacaugcuggagaccaucaaggucagcccccaguccauggacggcauccucaagagcauccugaaggugaagcgcgcgcugggcauguucguguccgacaccccgggggagcggaaccccuacgagaacauccuguacaagaucugccucagcggcgacggguggcccuacaucgccucccgcaccagcaucgucggccgggccugggagaacacggugguggaccuggagaccgacgggaagccccagaagaucggcuccggcaacagcaacaagucccugcagagcgccggguucuccgccggccucaccuacagccagcugaugacccugaaggacgcgaugcugcagcucgacccgaacgccaagacguggauggacaucgaggggcgccccgaggaccccgucgagguggcccuguaccagcccaucuccggcugcuacauccacuucuuccgggagccgaccgaccugaagcaguucaagcaggacgccaaguacagccacgggaucgacaucgccgaccucuucgcggcccagcccggccugaccagcgccgucaucgaggcccugccccgcaacauggugaucacgugccagggcuccgaggacaucaagaagcuccuggagagccaggggcgcaaggacaucaagcugaucgacaucgcccucuccaagaucgacagccggaaguucgagaacgcggugugggaccaguacaaggaccugugccacaugcacaccggcgucgugguggagaagaagaagcgcgggggcaaggaggagaucaccccgcacugcgcccugauggacugcaucauguucgacgccgccgucuccgggggccucaacacccuggugcugcgggcggugcucccccgcgacauggucuuccggaccagcacgccccgcguggugcugugaggacuagucccuguucccagagcccacuuuuuuuucuuuuuuugaaauaaaauagccugucuuucagaucuaaaaaaaaaaaaaaaaaaaaaaaaaaaaaaaaaaaaaaaaaaaaaaaaaaaaaaaaaaaaaaaaugcaucccccccccccccccccccccccccccccccaaaggcucuuuucagagccaccagaauu

SEQ ID NO: 10117 - RNA, 2005 nt, Artificial Sequence
  mRNA product Design a-2 comprising derived and/or modified sequence from LASV(Togo/2016/7082;Clade VI)__AMR44578__NP (opt1)
gggagaguccgcucagccagguugcagaagcggcuuagcguguguccuaaucuucucucugcguguagguaggccugugccgcaaacaagcuuaccaugagcaacuccaaggaggugaaguccuuccuguggacccagagccuccgccgggagcugagcggcuacugcuccaacaucaagcugcaggucgugaaggacgcccaggcccuccugcacgggcuggacuucagcgagguguccaacguccagcgccucaugcggaagcagaagcgcgacgacggcgaccugaagcggcugcgcgaccucaaccaggcggugaacaaccugguggagcucaagagcguccagcagaaguccauccugcggguggggacccugaccagcgacgaccugcucacccuggccgccgaccuggagaagcucaaguccaaggugacccgcaccgagcggccccugagcuccggcgucuacauggggaaccugagcucccagcagcucgaccagcgccgggcccugcugagcaugaucggcauguccggcgggaaccagaacagccagccgaagggcgacgggguggugcgcgucugggacgugaagaacgccgaccuccugaacaaccaguucggcacgaugcccucccugacccucgcgugccugaccaagcagggccagguggaccugaacgacgccguccaggcccucaccgaccuggggcugaucuacacggccaaguaccccaacagcagcgaccucgaccggcugucccagagccaccccauccugaacaugaucgacaccaagaaguccagccucaacaucuccggcuacaacuucagccugggggcggccaucaagaccggcgccugcaugcuggacgggggcaacaugcucgagaccaucaaggugacgccgcagaccauggacggcauccugaaguccauccugaaggugaagcgcagccucgggauguucaucuccgacacccccggcgagcggaaccccuacgagaacauccuguacaagaucugccugagcggggacggcuggcccuacaucgccucccgcaccgccaucaucgggcgggcgugggagaacacggucguggaccucgagagcgacuccaagccgcagaagaucggcagcaacggcuccaacaagagccugcaguccgccggguucgcccccggccugaccuacagccagcucaugacccugaaggacuccaugcugcagcuggaccccaacgccaagaccuggaucgacaucgaggggcgccccgaggacccgguggaggucgcccucuuccagcccaucagcggcugcuacauccacuucuuccgggagcccacggaccugaagcaguucaagcaggacgcgaaguacagccacgggaucgacgugaccgaccuguucgccgcccagcccggccucaccuccgccgugaucgaggcccugccgcgcaacaugguccugaccugccagggcagcgacgacaucaagaagcuccuggacucccaggggcggcgcgacaucaagcugaucgacgugagccucaacaagaucgacucccgcaaguucgagaacgcggucugggaccaguacaaggaccugugccacaugcacacgggcgugguggucgagaagaagaagaagggcgggaaggaggagaucacgccccacugcgcccugcucgacugcaucauguucgacgccgccgugagcgggggccugaacgccaccgugcugcgggcgguccucccccgcgacaugguguuccggaccuccagccccaaggugguccugugaggacuagucccuguucccagagcccacuuuuuuuucuuuuuuugaaauaaaauagccugucuuucagaucuaaaaaaaaaaaaaaaaaaaaaaaaaaaaaaaaaaaaaaaaaaaaaaaaaaaaaaaaaaaaaaaaugcaucccccccccccccccccccccccccccccccaaaggcucuuuucagagccaccagaauu

SEQ ID NO: 10118 - RNA, 2005 nt, Artificial Sequence
  mRNA product Design a-2 comprising derived and/or modified sequence from LASV(KAK-428;Clade n.d. (VII))__ANH09741__NP (opt1)
gggagaguccgcucagccagguugcagaagcggcuuagcguguguccuaaucuucucucugcguguagguaggccugugccgcaaacaagcuuaccaugagcaacuccaaggaggugaaguccuuccuguggacccagagccuccgccgggagcugagcggcuacugcaccaacaucaagcugcaggucgugaaggacgcccaggcccuccugcacgggcuggacuucuccgaggugagcaacguccagcgccucaugcggaagcagaagcgcgacgacaacgaccugaagcggcugcgcgaccucaaccaggcggugaacaaccugguggagcugaaguccguccagcagaaguccgugcucaaggugggcacgcugaacagcgacgaccugcucacccuggccgccgaccuggagaagcucaagagcaaggucgugcggaccgagcgcccccuguccagcgggguguacaugggcaaccuguccagccagcagcucgaccagcggcgcgcccugcugaacaugaucgggauggccggcggcucccaggggaaccagccgagccgggacggcgucgugcgcgugugggacgucaagaacgcggaccuccugaacaaccaguucgggaccaugcccucccugacgcucgccugccugaccaagcagggccagguggaccugaacgacgugguccucgcccugaccgaccuggggcucaucuacaccgccaaguaccccaacagcuccgaccuggaccggcugagccagaaccaccccgugcucaacaugaucgacgugaacaagagcucccugaacaucagcggcuacaacuucucccugggcgcggccgucaaggccggggccugcaugcucgacggcgggaacaugcuggagacgaucaagaucagcccgcagaccguggacggcauccugaaguccauccucaaggugaagcgcgcccugggcauguucgucagcgacacccccggggagcggaaccccuacgagaacauccuguacaaggugugccucuccggcaacggguggcccuacaucgcgagccgcaccuccaucgucggccgggccugggagaacacggugguggaccuggagagcaacaagaaccagccgaaggucgggaacaacggcuccaacaagaugcugcagagcuccggcuucgccaccgggcucaccuacagccagcugaugacccugcgcgacuccaugcugcagcucgaccccacggccaagaccuggaucgacaucgagggccggcccgaggaccccguggagcuggcccuguuccagccgagcuccgggugcuacauccacuucuuccgcgagcccaccgaccucaagcaguucaagcaggacgcgaaguacagccacggcaucgacgugaacgaccuguucuccgcccagcccgggcugaccagcgccguccucgaggcccugccccggaacauggugcugacgugccagggcagcgacgacauccgcaagcuccuggacucccaggaccgcaaggacaucaagcugaucgacaucagccucuccaaggccgacgcgcggaaguucgagaacgacgugugggaccaguucaaggaccugugccacaugcacaccggcaucgucguggagaagaagaagaagggcgggaagcaggagaugaccccgcacugcgcccugcucgacugcaucauguucgacgccgccgugagcgggggccugaacguccccacccugcgcgccgugcuccccacggacaugguguuccggaccaucaccaccaaggucgugcugugaggacuagucccuguucccagagcccacuuuuuuuucuuuuuuugaaauaaaauagccugucuuucagaucuaaaaaaaaaaaaaaaaaaaaaaaaaaaaaaaaaaaaaaaaaaaaaaaaaaaaaaaaaaaaaaaaugcaucccccccccccccccccccccccccccccccaaaggcucuuuucagagccaccagaauu

SEQ ID NO: 10119 - RNA, 2005 nt, Artificial Sequence; identical to SEQ ID NO: 10113
  mRNA product Design a-2 comprising derived and/or modified sequence from LASV(Pinneo-NIG-1969;Clade I)__AIT17837__NP (opt1)

SEQ ID NO: 10120 - RNA, 2005 nt, Artificial Sequence
  mRNA product Design a-2 comprising derived and/or modified sequence from LASV(ISTH0009-NIG-2011;Clade II)__AIT17405__NP (opt1)
gggagaguccgcucagccagguugcagaagcggcuuagcguguguccuaaucuucucucugcguguagguaggccugugccgcaaacaagcuuaccaugagcguguccaaggaggucaagagcuuccuguggacccagucccuccgccgggagcugagcggcuacugcuccaacaucaagcuccagguggugaaggacgcccaggcccugcugcacgggcuggacuucagcgaggucuccaacgugcagcgccucaugcggaagcagaagcgcgacgacagcgaccugaagcggcugcgcgaccucaaccaggcggugaacaaccuggucgagcugaaguccacccagcagaaguccauccuccgggugggcacccugaccagcgacgaccugcucacccuggccgccgaccuggagaagcucaagagcaaggugauccgcaccgagcggccccuguccagcggggucuacaugggcaaccuguccacgcagcagcucgagcagcgccgggcccugcugaacaugaucgggauggugggcggcgcccaggggacccagccgggccgcgacggggugguccgggugugggacgugaagaaccccgaccuccugaacaaccaguucggcaccaugcccagccugacccucgcgugccugacgaagcaggggcaggucgaccugaacgacgccgugcucgcccugaccgaccugggccucaucuacaccgccaaguaccccaacuccagcgaccuggaccgccugucccagagccacccgauccucaacaugguggacaucaagaaguccagccugaacaucagcggcuacaacuucucccugggggcggccgucaaggccggcgccugcaugcucgacgggggcaacaugcuggagaccaucaaggugacgccccagaccauggacggcauccucaagagcauccugaaggugaagcggucccuggggauguucgucagcgacacccccggcgagcgcaaccccuacgagaacauccuguacaagaucugccucuccggggacggcuggccguacaucgccagccggaccuccaucguggggcgcgcgugggagaacacgaccguggaccuggagagcgacggcaagccccagaaggucggcuccgccgggagcaacaagucccugcagagcgccggcuuccccaccgggcucaccuacucccagcugaugacgcugaaggacagcaugaugcagcuggaccccuccgccaagaccuggaucgacaucgagggccggccggaggaccccguggagaucgcccucuaccagcccaugagcgggugcuacauccacuucuuccgcgagcccaccgaccugaagcaguucaagcaggacgcgaaguacucccacggcaucgacgucgccgaccuguucccggcccagcccggccucaccagcgccgugaucgaggcccugccccggaacauggugcugacgugccaggggagcgacgacaucaagcgccuccuggacucccagggccgccgggacaucaagcugaucgacaucgcgcucagcaaggccgacucccgccgguucgagaacgccgucugggaccagugcaaggaccugugccacaugcacaccggggugguggucgagaagaagaagcgcggcgggaaggaggagaucacgccccacugcgcccugauggacugcaucauguacgacgccgcggugagcggcggccucaacaucccggugcugcgggccguccugccccgcgacaugguguuccggaccuccagccccaaggugguccucugaggacuagucccuguucccagagcccacuuuuuuuucuuuuuuugaaauaaaauagccugucuuucagaucuaaaaaaaaaaaaaaaaaaaaaaaaaaaaaaaaaaaaaaaaaaaaaaaaaaaaaaaaaaaaaaaaugcaucccccccccccccccccccccccccccccccaaaggcucuuuucagagccaccagaauu

SEQ ID NO: 10121 - RNA, 2005 nt, Artificial Sequence
  mRNA product Design a-2 comprising derived and/or modified sequence from LASV(ISTH2010-NIG-2012;Clade II)__AIT17483__NP (opt1)
gggagaguccgcucagccagguugcagaagcggcuuagcguguguccuaaucuucucucugcguguagguaggccugugccgcaaacaagcuuaccaugagcgccuccaaggaggugaaguccuuccuguggacccagagccuccgccgggagcugagcggcuacugcuccaacaucaagcugcaggucgugaaggacgcccaggcgcuccugcacgggcuggacuucagcgagguguccaacguccagcgccucaugcggaagcagaagcgcgacgacagcgaccugaagcggcugcgcgaccucaaccaggccgugaacaaccugguggagcugaaguccacccagcagaaguccauccuccgggucggcacgcugaccagcgacgaccugcucacccuggccgccgaccuggagaagcucaagagcaaggugauccgcaccgagcggccccuguccagcgggguguacaugggcaaccuguccacgcagcagcucgagcagcgccgggcccugcugaaccucaucgggauggucggcggcgcgcaggggacccagccgggccgcgacgggguggugcgggucugggacgugaagaaccccgaccugcugaacaaccaguucggcaccaugcccagccucacccuggccugccugacgaagcagggccagguggaccucaacgacgccguccuggcccugaccgaccucgggcugaucuacaccgcgaaguaccccaacuccagcgaccuggaccgccucucccagagccacccgauccugaacaugguggacaccaagaaguccagccugaacaucagcggcuucaacuucucccucggggccgccgugaaggccggcgccugcaugcuggacgggggcaacaugcuggagacgaucaaggucacgccccagaccauggacggcauccucaagagcauccugaaggugaagaagucccuggggauguucgugagcgacacccccggcgagcggaaccccuacgagaacauccucuacaagaucugccuguccggggacggcuggccguacaucgcgagccgcaccuccaucgucgggcgggccugggagaacaccaccguggaccuggagagcgacggcaagccccacaaggugggcaccgccggguccaacaagagccuccaguccgccggcuuccccacggggcugaccuacagccagcugaugacccugaaggacuccaugaugcagcucgaccccagcgccaagaccuggaucgacaucgagggccgcccggaggaccccgucgagaucgcgcuguaccagcccauguccgggugcuacauccacuucuuccgggagcccacggaccugaagcaguucaagcaggacgccaaguacagccacggcaucgacguggccgaccucuucccggcccagcccggccugaccuccgccgucaucgaggcgcugccccgcaacauggugcugaccugccaggggagcgacgacaucaagcggcuccuggacagccagggccgccgcgacaucaagcucaucgacaucgcccuguccaaggccgacagccggcgcuucgagaacgccgugugggaccagugcaaggaccugugccacaugcacaccggggucgugguggagaagaagaagcggggcgggaaggaggagaucacgccccacugcgcccucauggacugcaucauguacgacgcggccgucuccggcggccugaacaucccggugcugcgcgccgugcucccccgggacauggucuuccgcaccagcucccccaagguggugcugugaggacuagucccuguucccagagcccacuuuuuuuucuuuuuuugaaauaaaauagccugucuuucagaucuaaaaaaaaaaaaaaaaaaaaaaaaaaaaaaaaaaaaaaaaaaaaaaaaaaaaaaaaaaaaaaaaugcaucccccccccccccccccccccccccccccccaaaggcucuuuucagagccaccagaauu

SEQ ID NO: 10122 - RNA, 2005 nt, Artificial Sequence
  mRNA product Design a-2 comprising derived and/or modified sequence from LASV(Lassa virus/H.sapiens-wt/NGA/2015/ISTH_0543;Clade II)__AVO03640__NP (opt1)
gggagaguccgcucagccagguugcagaagcggcuuagcguguguccuaaucuucucucugcguguagguaggccugugccgcaaacaagcuuaccaugagcgccuccaaggaggugaaguccuuccuguggacccagagccuccgccgggagcugagcggcuacugcuccaacaucaagcugcaggucgugaaggacgcccaggcgcuccugcacgggcuggacuucagcgagguguccaacguccagcgccucaugcggaagcagaagcgcgacgacagcgaccugaagcggcugcgcgaccucaaccaggccgugaacaaccugguggagcugaaguccacccagcagaaguccauccuccgggucggcacgcugaccagcgacgaccugcucacccuggccgccgaccuggagaagcucaagagcaaggugauccgcaccgagcggccccuguccagcgggguguacaugggcaaccuguccacgcagcagcucgagcagcgccgggcccugcugaacaugaucgggauggucggcggcgcgcaggggacccagccgggccgcgacgggguggugcgggucugggacgugaagaaccccgaccuccugaacaaccaguucggcaccaugcccagccugacccucgccugccugacgaagcagggccagguggaccugaacgacgccguccucgcccugaccgaccuggggcucaucuacaccgcgaaguaccccaacuccagcgaccuggaccgccugucccagagccacccgauccucaacaugguggacaccaagaaguccagccugaacaucagcggcuacaacuucucccugggggccgccgugaaggccggcgccugcaugcucgacgggggcaacaugcuggagacgaucaaggucacgccccagaccauggacggcauccucaagagcauccugaaggugaagaagucccuggggauguucgugagcgacacccccggcgagcggaaccccuacgagaacauccuguacaagaucugccucuccggggacggcuggccguacaucgcgagccgcaccuccaucgucgggcgggccugggagaacaccaccguggaccuggagagcgacggcaagccccagaaggugggcuccgccgggagcaacaagucccugcagagcgccggcuuccccaccgggcucacguacucccagcugaugacccugaaggacagcaugaugcagcuggaccccuccgccaagaccuggaucgacaucgagggccgcccggaggaccccgucgagaucgcgcucuaccagcccaugagcgggugcuacauccacuucuuccgggagcccaccgaccugaagcaguucaagcaggacgccaaguacucccacggcaucgacguggccgaccuguucccggcccagcccggccucacgagcgccgucaucgaggcgcugccccgcaacauggugcugaccugccaggggagcgacgacaucaagcggcuccuggacucccagggccgcaaggacaucaagcugaucgacaucgcccucagcaaggccgacucccgccgguucgagaacgccgugugggaccagugcaaggaccugugccacaugcacaccggggucgugguggagaagaagaagcgcggcgggaaggaggagaucacgccccacugcgcccugauggacugcaucauguacgacgcggccgucagcggcggccucaacaucccggugcugcgggccgugcugccccgcgacauggucuuccggaccuccagccccaagguggugcucugaggacuagucccuguucccagagcccacuuuuuuuucuuuuuuugaaauaaaauagccugucuuucagaucuaaaaaaaaaaaaaaaaaaaaaaaaaaaaaaaaaaaaaaaaaaaaaaaaaaaaaaaaaaaaaaaaugcaucccccccccccccccccccccccccccccccaaaggcucuuuucagagccaccagaauu

SEQ ID NO: 10123 - RNA, 2005 nt, Artificial Sequence
  mRNA product Design a-2 comprising derived and/or modified sequence from LASV(Lassa virus/H.sapiens-wt/NGA/2016/ISTH_0009;Clade II)__AVO03572__NP (opt1)
gggagaguccgcucagccagguugcagaagcggcuuagcguguguccuaaucuucucucugcguguagguaggccugugccgcaaacaagcuuaccaugagcgccuccaaggaggugaaguccuuccuguggacccagagccuccgccgggagcugagcggcuacugcuccaacaucaagcugcaggucgugaaggacgcccaggcgcuccugcacgggcuggacuucagcgagguguccaacguccagcgccucaugcggaagcagaagcgcgacgacagcgaccugaagcggcugcgcgaccucaaccaggccgugaacaaccugguggagcugaaguccacccagcagaaguccauccuccgggucggcacgcugaccagcgacgaccugcucacccuggccgccgaccuggagaagcucaagagcaaggugauccgcaccgagcggccccuguccagcgggguguacaugggcaaccuguccacgcagcagcucgagcagcgccgggcccugcugaacaugaucgggauggucggcggcgcgcaggggacccagccgggccgcgacgggguggugcgggucugggacgugaagaaccccgaccuccugaacaaccaguucggcaccaugcccagccugacccucgccugccugacgaagcagggccagguggaccugaacgacgccguccucgcccugaccgaccuggggcucaucuacaccgcgaaguaccccaacuccagcgaccuggaccgccugucccagagccacccgauccucaacaugguggacaccaagaaguccagccugaacaucagcggcuacaacuucucccugggggccgccgugaaggccggcgccugcaugcucgacgggggcaacaugcuggagacgaucaaggucacgccccagaccauggacggcauccucaagagcauccugaaggugaagaagucccuggggauguucgugagcgacacccccggcgagcggaaccccuacgagaacauccuguacaagaucugccucuccggggacggcuggccguacaucgcgagccgcaccuccaucgucgggcgggccugggagaacaccaccguggaccuggagagcgacggcaagccccagaaggugggcuccgccgggagcaacaagucccugcagagcgccggcuuccccaccgggcucacguacucccagcugaugacccugaaggacagcaugaugcagcuggaccccuccgccaagaccuggaucgacaucgagggccgcccggaggaccccgucgagaucgcgcucuaccagcccaugagcgggugcuacauccacuucuuccgggagcccaccgaccugaagcaguucaagcaggacgccaaguacucccacggcaucgacguggccgaccuguucccggcccagcccggccucacgagcgccgucaucgaggcgcugccccgcaacauggugcugaccugccaggggagcgacgacaucaagcggcuccuggacucccagggccgccgcgacaucaagcugaucgacaucgcccucagcaaggccgacucccggcgcuucgagaacgccgugugggaccagugcaaggaccugugccacaugcacaccggggucgugguggagaagaagaagcggggcgggaaggaggagaucacgccccacugcgcccugauggacugcaucauguacgacgcggccgucagcggcggccucaacaucccggugcugcgcgccgugcugccccgggacauggucuuccgcaccuccagccccaagguggugcucugaggacuagucccuguucccagagcccacuuuuuuuucuuuuuuugaaauaaaauagccugucuuucagaucuaaaaaaaaaaaaaaaaaaaaaaaaaaaaaaaaaaaaaaaaaaaaaaaaaaaaaaaaaaaaaaaaugcaucccccccccccccccccccccccccccccccaaaggcucuuuucagagccaccagaauu

SEQ ID NO: 10124 - RNA, 2005 nt, Artificial Sequence
  mRNA product Design a-2 comprising derived and/or modified sequence from LASV(Lassa virus/H.sapiens-wt/NGA/2016/ISTH_0017;Clade II)__AVO03568__NP (opt1)
gggagaguccgcucagccagguugcagaagcggcuuagcguguguccuaaucuucucucugcguguagguaggccugugccgcaaacaagcuuaccaugagcgccuccaaggaggugaaguccuuccuguggacccagagccuccgccgggagcugagcggcuacugcuccagcaucaagcugcaggucgugaaggacgcccaggcgcuccugcacgggcuggacuucuccgaggugagcaacguccagcgccucaugcggaagcagaagcgcgacgacuccgaccugaagcggcugcgcgaccucaaccaggccgugaacaaccugguggagcucaagagcacccagcagaaguccauccugcgggucggcacgcugaccagcgacgaccugcucacccuggccgccgaccuggagaagcucaaguccaaggugauccgcaccgagcggccccugagcuccgggguguacaugggcaaccugagcacgcagcagcucgagcagcgccgggcccugcugaacaugaucgggauggcgggcggcgcccaggggacccagccgggccgcgacggggucgugcgggugugggacgucaagaaccccgaccuccugaacaaccaguucggcaccaugcccucccugacccucgccugccugacgaagcagggccagguggaccugaacgacgccgugcucgcgcugaccgaccuggggcucaucuacaccgccaaguaccccaacagcuccgaccuggaccgccugagccagagccacccgauccucaacauggucgacaccaagaaguccagccugaacaucuccggcuacaacuucagccugggggccgccgugaaggccggcgcgugcaugcucgacgggggcaacaugcuggagacgaucaaggugacgccccagaccauggacggcauccugaaguccauccucaaggucaagcggagccuggggauguucguguccgacgcccccggcgagcgcaaccccuacgagaacauccuguacaagaucugccucagcggggacggcuggccguacaucgccucccggaccagcaucguggggcgcgccugggagaacaccaccgucgaccuggaguccgacggcaagccccagaaggugggcgccaccgggagcaacaagucccugcagagcgcgggcuuccccaccgggcucacguacucccagcugaugacccugaaggacagcaugaugcagcuggaccccuccgccaagaccuggaucgacaucgagggccggccggaggaccccguggaggucgcccucuaccagcccgugagcgggugcuacauccacuucuuccgcgagcccaccgaccugaagcaguucaagcaggacgccaaguacucccacggcaucgacgucgccgaccuguucccggcgcagcccggccucacgagcgccgugaucgaggcccugccccggaacauggugcugaccugccaggggagcgacgacaucaagaagcuccuggacucccagggccgcaaggacaucaagcugaucgacaucgcccucagcaaggccgacucccgccgguucgagaacgcggucugggaccagugcaaggaccugugccacaugcacaccggggugguggucgagaagaagaagcgcggcgggaaggaggagaucacgccccacugcgcccugauggacugcaucauguacgacgccgccgugagcggcggccucaacaucccggugcugcgggcgguccugccccgcgacaugguguuccggaccuccagccccaaggugguccucugaggacuagucccuguucccagagcccacuuuuuuuucuuuuuuugaaauaaaauagccugucuuucagaucuaaaaaaaaaaaaaaaaaaaaaaaaaaaaaaaaaaaaaaaaaaaaaaaaaaaaaaaaaaaaaaaaugcaucccccccccccccccccccccccccccccccaaaggcucuuuucagagccaccagaauu

SEQ ID NO: 10125 - RNA, 2005 nt, Artificial Sequence
  mRNA product Design a-2 comprising derived and/or modified sequence from LASV(Lassa virus/H.sapiens-wt/NGA/2018/ISTH_0959;Clade II)__AVV65100__NP (opt1)
gggagaguccgcucagccagguugcagaagcggcuuagcguguguccuaaucuucucucugcguguagguaggccugugccgcaaacaagcuuaccaugagcgccuccaaggaggugaaguccuuccuguggacccagagccuccgccgggagcugagcggcuacugcuccaacaucaagcugcaggucgugaaggacgcccaggcgcuccugcacgggcuggacuucagcgagguguccaacguccagcgccucaugcggaagcagaagcgcgacgacagcgaccugaagcggcugcgcgaccucaaccaggccgugaacaaccugguggagcugaaguccacccagcagaaguccauccuccgggucggcacccugaccagcgacgaccugcucacccuggccgccgaccuggagaagcucaagagcaaggugauccgcaccgagcggccccuguccagcgggguguacaugggcaaccuguccacgcagcagcucgagcagcgccgggcccugcugaaccucaucgggauggucggcggcgcgcaggggacccagccgggccgcgacgggguggugcgggucugggacgugaagaaccccgaccugcugaacaaccaguucggcaccaugcccagccucacccuggccugccugacgaagcagggccagguggaccucaacgacgucgugcuggcccugaccgaccucgggcugaucuacaccgccaaguaccccaacuccagcgaccuggaccgccucucccagagccacccgauccugaacaugguggacaccaagaaguccagccugaacaucagcggcuucaacuucucccucggggcggccgucaaggccggcgccugcaugcuggacgggggcaacaugcuggagacgaucaaggugacgccccagaccauggacggcauccucaagagcauccugaaggugaagaagucccuggggauguucgucagcgacacccccggcgagcggaaccccuacgagaacauccucuacaagaucugccuguccggggacggcuggccguacaucgccagccgcaccuccaucguggggcgggcgugggagaacaccaccguggaccuggagagcgacggcaagccccacaaggucggcaccgccggguccaacaagagccuccaguccgccggcuuccccacggggcugaccuacagccagcugaugacccugaaggacuccaugaugcagcucgaccccagcgccaagaccuggaucgacaucgagggccgcccggaggaccccguggagaucgcccuguaccagcccauguccgggugcuacauccacuucuuccgggagcccacggaccugaagcaguucaagcaggacgcgaaguacagccacggcaucgacgucgccgaccucuucccggcccagcccggccugaccuccgccgugaucgaggcccugccccgcaacauggugcugaccugccaggggagcgacgacaucaagcggcuccuggacagccagggccgcaaggacaucaagcucaucgacaucgcgcuguccaagaccgacagccgccgguucgagaacgccgucugggaccagugcaaggaccugugccacaugcacacgggggugguggucgagaagaagaagcgcggcgggaaggaggagaucacgccccacugcgcccucauggacugcaucauguacgacgccgccguguccggcggccugaacaucccggugcugcgggcgguccucccccgcgacaugguguuccggaccagcucccccaaggugguccugugaggacuagucccuguucccagagcccacuuuuuuuucuuuuuuugaaauaaaauagccugucuuucagaucuaaaaaaaaaaaaaaaaaaaaaaaaaaaaaaaaaaaaaaaaaaaaaaaaaaaaaaaaaaaaaaaaugcaucccccccccccccccccccccccccccccccaaaggcucuuuucagagccaccagaauu

SEQ ID NO: 10126 - RNA, 2005 nt, Artificial Sequence
  mRNA product Design a-2 comprising derived and/or modified sequence from LASV(LASV003-NIG-2008;Clade II)__AIT17581__NP (opt1)
gggagaguccgcucagccagguugcagaagcggcuuagcguguguccuaaucuucucucugcguguagguaggccugugccgcaaacaagcuuaccaugagcgccuccaaggaggugaaguccuuccuguggacccagagccuccgccgggagcugagcggcuacugcuccagcaucaagcugcaggucgugaaggacgcccaggcgcuccugcacgggcuggacuucuccgaggugagcaacguccagcgccucaugcggaagcagaagcgcgacgacuccgaccugaagcggcugcgcgaccucaaccaggccgugaacaaccugguggagcucaagagcacccagcagaaguccguccugcgggugggcacccugaccagcgacgaccugcucacccuggccgccgaccuggagaagcucaaguccaaggugauccgcaccgagcggccccugagcuccggggucuacaugggcaaccugagcgcccagcagcucgagcagcgccggacgcugcugaacaugaucgggauggugggcggcgcgcaggggacccagccgggccgcgacggggugguccgggugugggacgugaagaaccccgaccuccugaacaaccaguucggcaccaugcccucccugacccucgccugccugacgaagcaggggcaggucgaccugaacgacguggugcucgcccugaccgaccugggccucaucuacaccgccaaguaccccaacagcuccgaccuggaccgccugagccagagccacccgauccucuccauggucgacaccaagaaguccagccugaacaucagcggcuacaacuucucccugggggcggccgugaaggccggcgccugcaugcucgacgggggcaacaugcuggagacgaucaaggugacgccccagaccauggacggcauccucaagagcauccugaaggucaagaagucccuggggauguucgugagcgacacccccggcgagcggaaccccuacgagaacauccuguacaagaucugccucuccggggacggcuggccguacaucgccagccgcaccuccaucguggggcgggcgugggagaacaccaccgucgaccuggagagcgacggcaagccccagaaggugggcaccgccggguccaacaagagccugcaguccgccggcuuccccacggggcucaccuacagccagcugaugacccugaaggacuccaugaugcagcuggaccccagcgccaagaccuggaucgacaucgagggccgcccggaggaccccgucgagaucgcccucuaccagcccauguccgggugcuacauccacuucuuccgggagcccacggaccugaagcaguucaagcaggacgcgaaguacagccacggcaucgacgugaccgaccuguucccggcccagcccggccucaccagcgccgugaucgaggcccugccccgcaacaugguccugaccugccagggguccgacgacaucaagcggcuccuggacagccagggccgccgcgacaucaagcugaucgacaucgcccucuccaaggcggacagccggcgcuucgagaacgccgugugggaccagugcaaggaccugugccacaugcacacggggguggucguggagaagaagaagcggggcgggaaggaggagaucacgccccacugcgcccugauggacugcaucauguacgacgccgccguguccggcggccucaacaucccgguccugcgcgcggugcugccccgggacaugguguuccgcaccagcucccccaaggucgugcucugaggacuagucccuguucccagagcccacuuuuuuuucuuuuuuugaaauaaaauagccugucuuucagaucuaaaaaaaaaaaaaaaaaaaaaaaaaaaaaaaaaaaaaaaaaaaaaaaaaaaaaaaaaaaaaaaaugcaucccccccccccccccccccccccccccccccaaaggcucuuuucagagccaccagaauu

SEQ ID NO: 10127 - RNA, 2005 nt, Artificial Sequence
  mRNA product Design a-2 comprising derived and/or modified sequence from LASV(LASV035-NIG-2009;Clade II)__AIT17589__NP (opt1)
gggagaguccgcucagccagguugcagaagcggcuuagcguguguccuaaucuucucucugcguguagguaggccugugccgcaaacaagcuuaccaugagcgccuccaaggaggugaaguccuuccuguggacccagagccuccgccgggagcugagcggcuacugcuccagcaucaagcugcaggucgugaaggacgcccaggcgcuccugcacgggcuggacuucuccgaggugagcaacguccagcgccucaugcggaagcagaagcgcgacgacuccgaccugaagcggcugcgcgaccucaaccaggccgugaacaaccugguggagcucaagagcacccagcagaaguccauccugcgggucggcacgcugaccagcgacgaccugcucacccuggccgccgaccuggagaagcucaaguccaaggugauccgcaccgagcggccccugagcuccgggguguacaugggcaaccugagcgcccagcagcucgagcagcgccgggcgcugcugaacaugaucgggauggucggcggcgcccaggggacgcagccgggccgcgacgggguggugcgggucugggacgugaagaaccccgaccuccugaacaaccaguucggcaccaugcccucccugacccucgccugccugaccaagcagggccagguggaccugaacgacgccguccucgcgcugacggaccuggggcucaucuacaccgccaaguaccccaacagcuccgaccuggaccgccugagccagagccacccgauccucaacaugguggacaccaagaaguccagccugaacaucuccggcuacaacuucagccugggggccgccgugaaggccggcgcgugcaugcucgacgggggcaacaugcuggagaccaucaaggucacgccccagaccauggacggcauccugaaguccauccucaaggugaagcggagccuggggauguucguguccgacacccccggcgagcgcaaccccuacgagaacauccuguacaagaucugccucagcggggacggcuggccguacaucgccucccggaccagcaucgucgggcgcgccugggagaacacgaccguggaccuggaguccgacggcaagccccagaaggugggcaccaccgggagcaacaagucccugcagagcgccggcuuccccacggggcucaccuacucccagcugaugacccugaaggacagcaugaugcagcuggaccccuccgccaagaccuggaucgacaucgagggccggccggaggaccccgucgagaucgcgcucuaccagcccaugagcgggugcuacauccacuucuuccgcgagcccacggaccugaagcaguucaagcaggacgccaaguacucccacggcaucgacguggccgaccuguucccggcccagcccggccucaccagcgccgucaucgaggcgcugccccggaacauggugcugaccugccaggggagcgacgacaucaagaagcuccuggacucccagggccgccgcgacaucaagcugaucgacaucgcccucagcaaggccgacucccggaaguucgagaacgccgugugggaccagugcaaggaccugugccacaugcacaccggggucgugguggagaagaagaagcgcggcgggaaggaggagaucacgccccacugcgcccugauggacugcaucauguacgacgcggccgucagcggcggccucaacaucccggugcugcgggccgugcugccccgcgacauggucuuccggaccuccagccccaagguggugcucugaggacuagucccuguucccagagcccacuuuuuuuucuuuuuuugaaauaaaauagccugucuuucagaucuaaaaaaaaaaaaaaaaaaaaaaaaaaaaaaaaaaaaaaaaaaaaaaaaaaaaaaaaaaaaaaaaugcaucccccccccccccccccccccccccccccccaaaggcucuuuucagagccaccagaauu

SEQ ID NO: 10128 - RNA, 2005 nt, Artificial Sequence
  mRNA product Design a-2 comprising derived and/or modified sequence from LASV(LASV1000-NIG-2009;Clade II)__AIT17783__NP (opt1)
gggagaguccgcucagccagguugcagaagcggcuuagcguguguccuaaucuucucucugcguguagguaggccugugccgcaaacaagcuuaccaugagcgccuccaaggaggugaaguccuuccuguggacccagagccuccgccgggagcugagcggcuacugcuccaacaucaagcugcaggucgugaaggacgcccaggcgcuccugcacgggcuggacuucagcgagguguccaacguccagcgccucaugcggaagcagaagcgcgacgacagcgaccugaagcggcugcgcgaccucaaccaggccgugaacaaccugguggagcugaaguccacccagcagaaguccauccuccgggucggcacgcugaccagcgacgaccugcucacccuggccgccgaccuggagaagcucaagagcaaggugauccgcaccgagcggccccuguccagcgggguguacaugggcaaccuguccacgcagcagcucgagcagcgccgggcccugcugaacaugaucgggauggucggcggcgcgcaggggacccagccgggccgcgacgggguggugcgggucugggacgugaagaaccccgaccuccugaacaaccaguucggcaccaugcccagccugacccucgccugccugacgaagcagggccagguggaccugaacgacgucgugcucgcccugaccgaccuggggcucaucuacaccgccaaguaccccaacuccagcgaccuggaccgccugucccagagccacccgauccucaacaugguggacaccaagaaguccagccugaacaucagcggcuacaacuucucccugggggcggccgucaaggccggcgccugcaugcucgacgggggcaacaugcuggagacgaucaaggugacgccccagaccauggacggcauccucaagagcauccugaaggugaagaagucccuggggauguucgucagcgacacccccggcgagcggaaccccuacgagaacauccuguacaagaucugccucuccggggacggcuggccguacaucgccagccgcaccuccaucguggggcgggcgugggagaacaccaccguggaccuggagagcgacggcaagccccagaaggucggcaccgccggguccaacaagagccugcaguccgccggcuuccccacggggcucaccuacagccagcugaugacccugaaggacuccaugaugcagcuggaccccagcgccaagaccuggaucgacaucgagggccgcccggaggaccccguggagaucgcccucuaccagcccgucuccgggugcuacauccacuucuuccgggagcccacggaccugaagcaguucaagcaggacgcgaaguacagccacggcaucgacguggccgaccuguucccggcccagcccggccucaccuccgccgugaucgaggcccugccccgcaacaugguccugaccugccaggggagcgacgacaucaagcggcuccuggacagccagggccgccgcgacaucaagcugaucgacaucgcgcucuccaaggccgacagccggcgcuucgagaacgccgugugggaccagugcaaggaccugugccacaugcacaccgggguggucguggagaagaagaagcggggcgggaaggaggagaucacgccccacugcgcccugauggacugcaucauguacgacgccgcgguguccggcggccucaacaucccgguccugcgcgccgugcugccccgggacaugguguuccgcaccagcucccccaaggucgugcucugaggacuagucccuguucccagagcccacuuuuuuuucuuuuuuugaaauaaaauagccugucuuucagaucuaaaaaaaaaaaaaaaaaaaaaaaaaaaaaaaaaaaaaaaaaaaaaaaaaaaaaaaaaaaaaaaaugcaucccccccccccccccccccccccccccccccaaaggcucuuuucagagccaccagaauu

SEQ ID NO: 10129 - RNA, 2005 nt, Artificial Sequence
  mRNA product Design a-2 comprising derived and/or modified sequence from LASV(LASV221-NIG-2010;Clade II)__AIT17625__NP (opt1)
gggagaguccgcucagccagguugcagaagcggcuuagcguguguccuaaucuucucucugcguguagguaggccugugccgcaaacaagcuuaccaugagcgccuccaaggaggugaaguccuuccuguggacccagagccuccgccgggagcugagcggcuacugcuccagcaucaagcugcaggucgugaaggacgcccaggcgcuccugcacgggcuggacuucuccgaggugagcaacguccagcgccucaugcggaagcagcgccgggacgacuccgaccugaagcgccugcgggaccucaaccaggccgugaacaaccugguggagcucaagagcacccagcagaaguccauccugcgcgucggcacgcugaccagcgacgaccugcucacccuggccgccgaccuggagaagcucaaguccaaggugauccggaccgagcgcccccugagcuccgggguguacaugggcaaccugagcacgcagcagcucgagcagcggcgcgcccugcugaacaugaucgggauggucggcggcgcgcaggggacccagccgggccgggacgggguggugcgcgucugggacgugaagaaccccgaccuccugaacaaccaguucggcaccaugcccucccugacccucgccugccugacgaagcagggccagguggaccugaacgacgccguccucgcccugaccgaccuggggcucaucuacaccgcgaaguaccccaacagcuccgaccuggaccggcugagccagagccacccgauccucaacaugguggacaccaagaaguccagccugaacaucuccggcuacaacuucagccugggggccgccgugaaggccggcgccugcaugcucgacgggggcaacaugcuggagacgaucaaggucacgccccagaccguggacggcauccugaaguccauccucaaggugaagcgcagccuggggauguucgucuccgacacccccggcgagcggaaccccuacgagaacauccuguacaagaucugccucagcggggacggcuggccguacaucgcgucccgcaccagcaucguggggcgggccugggagaacaccaccguggaccuggaguccgacggcaagccccagaaggucggcaccgccgggagcaacaagucccugcagagcgccggcuuccccacggggcucaccuacucccagcugaugacccugaaggacagcaugaugcagcuggaccccuccgccaagaccuggaucgacaucgagggccgcccggaggaccccguggagaucgcgcucuaccagcccaugagcgggugcuacauccacuucuuccgggagcccacggaccugaagcaguucaagcaggacgccaaguacucccacggcaucgacgucgccgaccuguucccggcccagcccggccucaccagcgccgugaucgaggcgcugccccgcaacauggugcugaccugccaggggagcgacgacaucaagcgccuccuggacucccagggccggcgcgacaucaagcugaucgacaucgcccucagcaaggccgacucccggaaguucgagaacgccgucugggaccagugcaaggaccugugccacaugcacaccggggugguggucgagaagaagaagcgcggcgggaaggaggagaucacgccccacugcgcccugauggacugcaucauguacgacgcggccgugagcggcggccucaacaucccggugcugcgggccguccugccccgcgacaugguguuccggaccuccagccccaaggugguccucugaggacuagucccuguucccagagcccacuuuuuuuucuuuuuuugaaauaaaauagccugucuuucagaucuaaaaaaaaaaaaaaaaaaaaaaaaaaaaaaaaaaaaaaaaaaaaaaaaaaaaaaaaaaaaaaaaugcaucccccccccccccccccccccccccccccccaaaggcucuuuucagagccaccagaauu

SEQ ID NO: 10130 - RNA, 2005 nt, Artificial Sequence
  mRNA product Design a-2 comprising derived and/or modified sequence from LASV(LASV237-NIG-2010;Clade II)__AIT17639__NP (opt1)
gggagaguccgcucagccagguugcagaagcggcuuagcguguguccuaaucuucucucugcguguagguaggccugugccgcaaacaagcuuaccaugagcgccuccaaggaggugaaguccuuccuguggacccagagccuccgccgggagcugagcggcuacugcuccaacaucaagcugcaggucgugaaggacgcccaggcgcuccugcacgggcuggacuucagcgagguguccaacguccagcgccucaugcggaagcagaagcgcgacgacagcgaccugaagcggcugcgcgaccucaaccaggccgugaacaaccugguggagcugaaguccacccagcagaaguccauccuccgggucggcacccugaccagcgacgaccugcucacccuggccgccgaccuggagaagcucaagagcaaggugauccgcaccgagcggccccuguccagcgggguguacaugggcaaccuguccacgcagcagcucgagcagcgccgggcccugcugaacaugaucgggauggucggcggcgcgcaggggacccagccgggccgcgacgggguggugcgggucugggacgugaagaaccccgaccuccugaacaaccaguucggcaccaugcccagccugacccucgccugccugacgaagcagggccagguggaccugaacgacgccguccucgcccugaccgaccuggggcucaucuacaccgcgaaguaccccaacuccagcgaccuggaccgccugucccagagccacccgauccucaacaugguggacaucaagaaguccagccugaacaucagcggcuacaacuucucccugggggccgccgugaaggccggcgccugcaugcucgacgggggcaacaugcuggagaccaucaaggucacgccccagaccauggacggcauccucaagagcauccugaaggugaagcggucccuggggauguucgugagcgacacccccggcgagcgcaaccccuacgagaacauccuguacaagaucugccucuccggggacggcuggccguacaucgcgagccggaccuccaucgucgggcgcgccugggagaacacgaccguggaccuggagagcgacggcaagccccagaaggugggcuccgccgggagcaacaagucccugcagagcgccggcuuccccaccgggcucaccuacucccagcugaugacgcugaaggacagcaugaugcagcuggaccccuccgccaagaccuggaucgacaucgagggccggccggaggaccccgucgagaucgcgcucuaccagcccaugagcgggugcuacauccacuucuuccgcgagcccaccgaccugaagcaguucaagcaggacgccaaguacucccacggcaucgacguggccgaccuguucccggcccagcccggccucaccagcgccgucaucgaggcgcugccccggaacauggugcugacgugccaggggagcgacgacaucaagcgccuccuggacucccagggccgccgggacaucaagcugaucgacaucgcccucagcaaggccgacucccgccgguucgagaacgccgugugggaccagugcaaggaccugugccacaugcacaccggggucgugguggagaagaagaagcgcggcgggaaggaggagaucacgccccacugcgcccugauggacugcaucauguacgacgcggccgucagcggcggccucaacaucccggugcugcgggccgugcugccccgcgacauggucuuccggaccuccagccccaagguggugcucugaggacuagucccuguucccagagcccacuuuuuuuucuuuuuuugaaauaaaauagccugucuuucagaucuaaaaaaaaaaaaaaaaaaaaaaaaaaaaaaaaaaaaaaaaaaaaaaaaaaaaaaaaaaaaaaaaugcaucccccccccccccccccccccccccccccccaaaggcucuuuucagagccaccagaauu

SEQ ID NO: 10131 - RNA, 2005 nt, Artificial Sequence
  mRNA product Design a-2 comprising derived and/or modified sequence from LASV(LASV253-NIG-2011;Clade II)__AIT17671__NP (opt1)
gggagaguccgcucagccagguugcagaagcggcuuagcguguguccuaaucuucucucugcguguagguaggccugugccgcaaacaagcuuaccaugagcgccuccaaggaggugaaguccuuccuguggacccagagccuccgccgggagcugagcggcuacugcuccagcaucaagcugcaggucgugaaggacgcccaggcgcuccugcacgggcuggacuucuccgaggugagcaacguccagcgccucaugcggaagcagaagcgcgacgacuccgaccugaagcggcugcgcgaccucaaccaggccgugaacaaccugguggagcucaagagcacccagcagaaguccguccugcgggugggcacccugaccagcgacgaccugcucacccuggccgccgaccuggagaagcucaaguccaaggugauccgcaccgagcggccccugagcuccggggucuacaugggcaaccugagcacgcagcagcucgagcagcgccgggcccugcugaacaugaucgggauggugggcggcgcgcaggggacccagccgggccgcgacggggugguccgggugugggacgugaagaaccccgaccuccugaacaaccaguucggcaccaugcccucccugacccucgccugccugacgaagcaggggcaggucgaccugaacgacguggugcucgcccugaccgaccugggccucaucuacaccgccaaguaccccaacagcuccgaccuggaccgccugagccagagccacccgauccucaacauggucgacaccaagaaguccagccugaacaucuccggcuacaacuucagccugggggcggccgugaaggccggcgccugcaugcucgacgggggcaacaugcuggagacgaucaaggugacgccccagaccauggacggcauccugaaguccauccucaaggucaagaagucccuggggauguucgugagcgacacccccggcgagcggaaccccuacgagaacauccuguacaagaucugccucagcggggacggcuggccguacaucgccucccgcaccagcaucguggggcgggcgugggagaacaccaccgucgaccuggaguccgacggcaagccccagaaggugggcaccgccgggagcaacaagucccugcagagcgccggcuuccccacggggcucaccuacucccagcugaugacccugaaggacagcaugaugcagcuggaccccuccgccaagaccuggaucgacaucgagggccgcccggaggaccccgucgagaucgcccucuaccagcccaugagcgggugcuacauccacuucuuccgggagcccacggaccugaagcaguucaagcaggacgcgaaguacucccacggcaucgacgugaccgaccuguucccggcccagcccggccucaccagcgccgugaucgaggcccugccccgcaacaugguccugaccugccaggggagcgacgacaucaagcggcuccuggacucccagggccgccgcgacaucaagcugaucgacaucgcccucagcaaggcggacucccggcgcuucgagaacgccgugugggaccagugcaaggaccugugccacaugcacacggggguggucguggagaagaagaagcggggcgggaaggaggagaucacgccccacugcgcccugauggacugcaucauguacgacgccgccgugagcggcggccucaacaucccgguccugcgcgcggugcugccccgggacaugguguuccgcaccuccagccccaaggucgugcucugaggacuagucccuguucccagagcccacuuuuuuuucuuuuuuugaaauaaaauagccugucuuucagaucuaaaaaaaaaaaaaaaaaaaaaaaaaaaaaaaaaaaaaaaaaaaaaaaaaaaaaaaaaaaaaaaaugcaucccccccccccccccccccccccccccccccaaaggcucuuuucagagccaccagaauu

SEQ ID NO: 10132 - RNA, 2005 nt, Artificial Sequence
  mRNA product Design a-2 comprising derived and/or modified sequence from LASV(LASV254-NIG-2011;Clade II)__AIT17675__NP (opt1)
gggagaguccgcucagccagguugcagaagcggcuuagcguguguccuaaucuucucucugcguguagguaggccugugccgcaaacaagcuuaccaugagcgccuccaaggaggugaaguccuuccuguggacccagagccuccgccgggagcugagcggcuacugcuccagcaucaagcugcaggucgugaaggacgcccaggcgcuccugcacgggcuggacuucuccgaggugagcaacguccagcgccucaugcggaagcagaagcgcgacgacuccgaccugaagcggcugcgcgaccucaaccaggccgugaacaaccugguggagcucaagagcacccagcagaaguccguccugcgggugggcacgcugaccagcgacgaccugcucacccuggccgccgaccuggagaagcucaaguccaaggugauccgcaccgagcggccccugagcuccggggucuacaugggcaaccugagcacgcagcagcucgagcagcgccgggcccugcugaacaugaucgggauggugggcggcgcgcaggggacccagccgggccgcgacggggugguccgggugugggacgugaagaaccccgaccuccugaacaaccaguucggcaccaugcccucccugacccucgccugccugacgaagcaggggcaggucgaccugaacgacgccgugcucgcccugaccgaccugggccucaucuacaccgcgaaguaccccaacagcuccgaccuggaccgccugagccagagccacccgauccucaacaugguggacaccaagaaguccagccugaacaucuccggcuacaacuucagccugggggccgccgucaaggccggcgccugcaugcucgacgggggcaacaugcuggagacgaucaaggugacgccccagaccauggacggcauccugaaguccauccucaaggugaagaagucccuggggauguucgucagcgacacccccggcgagcggaaccccuacgagaacauccuguacaagaucugccucagcggggacggcuggccguacaucgcgucccgcaccagcaucguggggcgggccugggagaacaccaucguggaccuggaguccgacggcaagccccagaaggucggcaccgccgggagcaacaagucccugcagagcgccggcuuccccaccgggcucacguacucccagcugaugacccugaaggacagcaugaugcagcuggaccccuccgccaagaccuggaucgacaucgagggccgcccggaggaccccguggagaucgcgcucuaccagcccaugagcgggugcuacauccacuucuuccgggagcccaccgaccugaagcaguucaagcaggacgccaaguacucccacggcaucgacgucgccgaccuguucccggcccagcccggccucacgagcgccgugaucgaggcgcugccccgcaacauggugcugaccugccaggggagcgacgacaucaagcggcuccuggacucccagggccgccgcgacaucaagcugaucgacaucgcccucagcaaggccgacucccggcgcuucgagaacgccgucugggaccagugcaaggaccugugccacaugcacaccggggugguggucgagaagaagaagcggggcgggaaggaggagaucacgccccacugcgcccugauggacugcaucauguacgacgcggccgugagcggcggccucaacaucccggugcugcgcgccguccugccccgggacaugguguuccgcaccuccagccccaaggugguccucugaggacuagucccuguucccagagcccacuuuuuuuucuuuuuuugaaauaaaauagccugucuuucagaucuaaaaaaaaaaaaaaaaaaaaaaaaaaaaaaaaaaaaaaaaaaaaaaaaaaaaaaaaaaaaaaaaugcaucccccccccccccccccccccccccccccccaaaggcucuuuucagagccaccagaauu

SEQ ID NO: 10133 - RNA, 2005 nt, Artificial Sequence
  mRNA product Design a-2 comprising derived and/or modified sequence from LASV(Nig08-04;Clade II)__ADU56611__NP (opt1)
gggagaguccgcucagccagguugcagaagcggcuuagcguguguccuaaucuucucucugcguguagguaggccugugccgcaaacaagcuuaccaugagcgccuccaaggaggugaaguccuuccuguggacccagagccuccgccgggagcugagcggcuacugcuccaacaucaagcugcaggucgugaaggacgcccaggcgcuccugcacgggcuggacuucagcgagguguccaacguccagcgccucaugcggaagcagaagcgcgacgacggcgaccugaagcggcugcgcgaccucaaccaggccgugaacaaccugguggagcucaagagcacccagcagaaguccguccugcggguggggacccugaccagcgacgaccugcucacccuggccgccgaccuggagaagcucaaguccaaggugauccgcaccgagcggccccugagcuccggcgucuacauggggaaccugagcacgcagcagcucgagcagcgcaaggcccugcuguccaugaucggcauggugggcggggcgcagggcacccagccggggcgggacggcgugguccgcgugugggacgugaagaaccccgaccuccugaacaaccaguucgggaccaugcccagccugacccucgccugccugacgaagcagggccaggucgaccugaacgacgccgugcucgcccugaccgaccugggccucaucuacaccgcgaaguaccccaacuccagcgaccuggaccggcugucccagagccacccgauccucaacaugguggacaccaagaaguccagccugaacaucagcggguacaacuucucccugggcgccgccgucaaggccggggccugcaugcucgacggcggcaacaugcuggagacgaucaaggugacgccccagaccauggacgggauccucaagagcauccugaaggugaagcgcucccugggcauguucgucagcgacacccccggggagcggaaccccuacgagaacauccuguacaagaucugccucuccggcgacggguggccguacaucgcgagccgcaccuccaucgugggccgggccugggagaacaccaccguggaccuggagagcgacggcaagccccagaaggucgggaccgccggcuccaacaagagccugcaguccgccggguuccccacgggccucaccuacagccagcugaugacccugaaggacuccaugaugcagcuggaccccagcgccaagaccuggaucgacaucgaggggcgcccggaggaccccguggagaucgcgcucuaccagcccauguccggcugcuacauccacuucuuccgggagcccacggaccugaagcaguucaagcaggacgccaaguacagccacggcaucgacgucaccgaccuguucuccgcccagccggggcucaccagcgccgugaucgaggcccugccccgcaacauggugcugaccugccagggcagcgacgacaucaagaagcuccuggacucccaggggcggcgcgacaucaagcugaucgacaucagccucaacaaggcggacucccgccgguucgagaacgccgucugggaccagugcaaggaccugugccacaugcacacgggcgugguggucgagaagaagaagcgcgggggcaaggaggagaucacgccccacugcgcccugauggacugcaucauguucgacgccgccgugagcggcgggcucaacauccccauccugcgggcggugcugccgcgcgacauggucuuccggaccuccagccccaagguggugcucugaggacuagucccuguucccagagcccacuuuuuuuucuuuuuuugaaauaaaauagccugucuuucagaucuaaaaaaaaaaaaaaaaaaaaaaaaaaaaaaaaaaaaaaaaaaaaaaaaaaaaaaaaaaaaaaaaugcaucccccccccccccccccccccccccccccccaaaggcucuuuucagagccaccagaauu

SEQ ID NO: 10134 - RNA, 2008 nt, Artificial Sequence
  mRNA product Design a-2 comprising derived and/or modified sequence from LASV(GA391;Clade III)__AAA46284__NP (opt1)
gggagaguccgcucagccagguugcagaagcggcuuagcguguguccuaaucuucucucugcguguagguaggccugugccgcaaacaagcuuaccaugagcgccuccaaggaggugcgcagcugccuguggacccagucccuccggcgcgagcugagcggcuacugcuccaacaucaagcugcaggucgugaaggacgcccaggcgcuccugcacgggcuggacuucagcgagguguccaacguccagcggcucaugcgcaagcagaagcgggacgacggcgaccugaagcgccugcgggaccucaaccaggccgugaacaaccugguggagcugaaguccacccagcagaaguccguccuccgcguggggacgcugagcuccgacgaccugcucauccuggccgccgaccuggagaagcucaagagcaaggugacccggaccgagcgcccccuguccagcggcgucuacauggggaaccuguccagccagcagcucgaccagcggcgcgcccugcugaacaugaucggcaugaccggcguguccgggggcgggaagggcgcgagcaacgggaucgugcgggucugggacgugaagaacgccgagcuccugaacaaccaguucggcacgaugccgucccugacccucgccugccugaccaagcagggccagguggaccugaacgacgccguccaggcgcucaccgaccuggggcugaucuacacggccaaguaccccaacagcagcgaccucgaccgccugucccagagccaccccauccugaacaugaucgacaccaagaaguccagccucaacaucuccggcuacaacuucagccugggggccgccgugaaggccggcgcgugcaugcuggacggcgggaacaugcucgagaccaucaaggugagcccccagaccauggacggcauccucaagagcauccugaaggucaagaagucccuggggauguucgugagcgacacgccgggcgagcggaaccccuacgagaacauccuguacaagaucugccuguccggggacggcuggagcuacaucgccucccgcaccagcaucgugggccgggccugggagaacaccgucguggaccucgagcaggacaacaagccccagaagaucgggaacggcggguccaacaagagccugcaguccgccggcuucgccgcggggcugaucuacagccagcucaugacccugaaggacuucaagugcuucaaccugauccccaacgccaagacguggauggacaucgagggccgcccggaggaccccguggagaucgcccuguaccagcccuccagcggcugcuacguccacuucuuccgggagcccaccgaccucaagcaguucaagcaggacgccaaguacagccacgggcgcgacgugaccgaccuguucgccgcgcagccgggccugaccuccgccgucaucgaggcccucccccggaacauggugaucacgugccaggggagcgaggacauccgcaagcugcuggagucccagggccgccgggacaucaagcucaucgacaucacccugagcaaggccgacucccgcaaguucgagaacgccgugugggaccaguucaaggaccugugccacaugcacaccggggucgugguggagaagaagaagcggggcggcaaggaggagaucacgccccacugcgcgcucauggacugcaucauguucgacgccgccgucagcgggggccuggacgccaaggugcugcgcgugguccucccccgggacaugguguuccgcaccuccaccccgaaggugguccugugaggacuagucccuguucccagagcccacuuuuuuuucuuuuuuugaaauaaaauagccugucuuucagaucuaaaaaaaaaaaaaaaaaaaaaaaaaaaaaaaaaaaaaaaaaaaaaaaaaaaaaaaaaaaaaaaaugcaucccccccccccccccccccccccccccccccaaaggcucuuuucagagccaccagaauu

SEQ ID NO: 10135 - RNA, 2005 nt, Artificial Sequence
  mRNA product Design a-2 comprising derived and/or modified sequence from LASV(Nig08-A19;Clade III)__ADU56619__NP (opt1)
gggagaguccgcucagccagguugcagaagcggcuuagcguguguccuaaucuucucucugcguguagguaggccugugccgcaaacaagcuuaccaugagcgccuccaaggaggugaaguccuuccuguggacccagucccuccgccgggagcugagcggcuacugcuccaacaucaagcugcaggucgugaaggacgcccaggcgcuccugcacgggcuggacuucagcgagguguccaacguccagcgccucaugcggaagcagaagcgcgacgacggcgaccugaagcggcugcgcgaccucaaccaggccgugaacaaccugguggagcucaagagcacccagcagaaguccguccugcggguggggacccugagcuccgacgaccugcucgugcuggccgccgaccuggagaagcucaagagcaaggucgugcgcaccgagcggccccuguccagcggcaucuacauggggaaccuguccagccagcagcucgaccagcgcaaggcccugcugaacaugaucggcaugaccggcgggaacggcgggcggaacaccacguccgacggcaucgugcgcgucugggacgugaagaacgcggagcuccugaacaaccaguucgggaccaugccgagccugacccucgccugccugaccaagcagggccagguggaccugaacgacgccguccaggcccucacggaccugggccugaucuacaccgcgaaguaccccaacuccagcgaccucgaccggcuggcccagagccaccccauccugaacaugaucgacaccaagaaguccagccucaacaucuccggguacaacuucagccugggcgccgccgugaaggccggggcgugcaugcuggacggcggcaacaugcucgagaccaucaaggugagcccccagacgauggacgggauccucaagagcauccugaaggucaagcgcucccugggcauguucaucagcgacaccccgggggagcggaaccccuacgagaacauccuguacaagaucugccuguccggcgacggguggcccuacaucgccagccgcaccuccaucgugggccgggccugggagaacaccguggucgaccucgagagcgacaacaagccccagaagacgggcaacgggggcuccaacaagagccugcaguccgccggguucgccgcgggccugaccuacagccagcucaugacccugaaggacuccaugcugcagcuggacccgaacgccaagaccuggauggacaucgaggggcgccccgaggaccccguggagaucgcccucuaccagcccagcuccggcugcuacauccacuucuuccgggagccgacggaccugaagcaguucaagcaggacgccaaguacagccacggcaucgacgugaccgaccuguucgccgcgcagcccgggcucaccagcgccgucaucgaggcccugccccgcaacauggugaucacgugccagggcuccgaggacauccggaagcugcucgagagccaggggcgccgcgacaucaagcugaucgacaucucccugagcaaggucgacucccggaaguucgagaacgccgugugggaccaguucaaggaccucugccacaugcacaccggcaucguggucgagaagaagaagcgcgggggcaaggaggagaucacgccccacugcgcccugauggacugcaucauguucgacgcggccgugagcggcgggguggacgccaagguccugcgggccgugcucccgcgcgacaugguguuccggaccuccacccccaaggucgugcugugaggacuagucccuguucccagagcccacuuuuuuuucuuuuuuugaaauaaaauagccugucuuucagaucuaaaaaaaaaaaaaaaaaaaaaaaaaaaaaaaaaaaaaaaaaaaaaaaaaaaaaaaaaaaaaaaaugcaucccccccccccccccccccccccccccccccaaaggcucuuuucagagccaccagaauu

SEQ ID NO: 10136 - RNA, 2005 nt, Artificial Sequence
  mRNA product Design a-2 comprising derived and/or modified sequence from LASV(G1180-SLE-2010;Clade IV)__AIT17169__NP (opt1)
gggagaguccgcucagccagguugcagaagcggcuuagcguguguccuaaucuucucucugcguguagguaggccugugccgcaaacaagcuuaccaugagcgccuccaaggagaucaagagcuuccuguggacccagucccuccgccgggagcugagcggcuacugcuccaacaucaagcuccagguggucaaggacgcccaggcgcugcugcacgggcuggacuucagcgagguguccaacgugcagcgccucaugcggaaggagcgccgggacgacaacgaccugaagcgccugcgggaccucaaccaggccgucaacaaccugguggagcucaagagcacccagcagaaguccauccugcgcgugggcacccugaccagcgacgaccugcucauccuggccgccgaccuggagaagcucaaguccaaggucauccggaccgagcgcccccugagcgccgggguguacaugggcaaccuguccagccagcagcucgaccagcggcgcgcgcugcuguccaugaucgggaugagcuccggcaaccagcgggcccaggccggccgcgacggggugguccgggugugggacgugaagaacgucgagcuccugaacaaccaguucggcaccaugccgagccugacgcucgccugccugaccaagcagggccagguggaccugaacgacgcggugcaggcccucaccgaccuggggcugaucuacaccgccaaguaccccaacacguccgaccucgaccgccugacccagagccaccccauccugaacaugaucgacaccaagaaguccagccucaacaucagcggguacaacuucucccugggcgccgccgucaaggcgggcgccugcaugcuggacgggggcaacaugcucgagaccaucaaggugagcccccagacgauggacgggauccugaaguccauccugaaggugaagaaggcccucggcauguucaucagcgacaccccgggcgagcggaaccccuacgagaacauccuguacaagaucugccuguccggggacggcuggcccuacaucgccagccgcaccuccaucaccgggcgggccugggagaacacggucguggaccucgagagcgacggcaagccccagaaggcgggguccaacaacagcaacaagucccugcagagcgugggcuucaccgccggccugaccuacucccagcucaugacccugaaggacgccaugcugcagcuggacccgaacgccaagacguggauggacaucgaggggcgccccgaggaccccgucgagaucgcccucuaccagcccagcuccggcugcuacauccacuucuuccgggagccgaccgaccugaagcaguucaagcaggacgcgaaguacagccacgggaucgacgugaccgaccuguucgccgcccagcccggccucaccuccgccgugaucgacgcccugccccgcaacauggucaucacgugccaggggagcgacgacauccgcaagcugcucgagagccagggccggaaggacaucaagcugaucgacaucgcgcuguccaagaccgacagccgcaaguacgagaacgccgugugggaccaguacaaggaccucugccacaugcacaccggcgucgugguggagaagaagaagcgcgggggcaaggaggagaucacgccccacugcgcccugauggacugcaucauguucgacgccgcggucuccgggggccugaacaccagcgugcuccgggccgugcugccgcgggacauggucuuccgcaccuccacgccccggguggugcugugaggacuagucccuguucccagagcccacuuuuuuuucuuuuuuugaaauaaaauagccugucuuucagaucuaaaaaaaaaaaaaaaaaaaaaaaaaaaaaaaaaaaaaaaaaaaaaaaaaaaaaaaaaaaaaaaaugcaucccccccccccccccccccccccccccccccaaaggcucuuuucagagccaccagaauu

SEQ ID NO: 10137 - RNA, 2005 nt, Artificial Sequence
  mRNA product Design a-2 comprising derived and/or modified sequence from LASV(G1442-SLE-2011;Clade IV)__AIT17181__NP (opt1)
gggagaguccgcucagccagguugcagaagcggcuuagcguguguccuaaucuucucucugcguguagguaggccugugccgcaaacaagcuuaccaugagcgccuccaaggaggugaaguccuuccuguggacccagagccuccgccgggagcugagcggcuacugcuccaacaucaagcugcaggucgugaaggacgcccaggcgcuccugcacgggcuggacuucagcgagguguccaacguccagcgccucaugcggaagcagcgccgggacgacaacgaccugaagcgccugcgggaccucaaccaggccgugaacaaccugguggagcucaagagcacccagcagaaguccguccugcgcgugggcacccugaccagcgacgaccugcucgugcuggccgccgaccuggagaagcucaaguccaaggucauccggaccgagcgcccccugagcgccgggguguacaugggcaaccuguccagccagcagcucgaccagcggcgcgcgcugcugaacaugaucgggauguccggcggcauccaggggacccggacgggccgcgacggggugguccgggugugggacgugaagaacgccgaccuccugaacaaccaguucggcaccaugccgagccugacccucgccugccugaccaagcaggggcaggucgaccugaacgacguggugcaggcccucacggaccugggccugaucuacaccgcgaaguaccccaacgccuccgaccucgaccgccugacccagagccaccccauccugaacaugaucgacaccaagaaguccagccucaacaucagcggcuacaacuucucccugggggccgccgucaaggccggcgcgugcaugcuggacgggggcaacaugcucgagacgaucaaggugagcccccagaccauggacggcauccugaaguccauccugaaggugaagaagacccucgggauguucaucagcgacaccccgggcgagcggaaccccuacgagaacauccuguacaagaucugccuguccggggacggcuggcccuacaucgccagccgcacguccaucaccgggcgggccugggagaacaccgucguggaccucgagagcgacggcaagccccagaaggccggcuccaacaacagcaacaagucccugcagagcgccggguucgcggccggccugaccuacucccagcucaugacgcugaaggacgccaugcugcagcuggacccgaacgccaagaccuggauggacaucgaggggcgccccgaggaccccguggagaucgcccucuaccagcccagcuccggcugcuacauccacuucuuccgggagccgaccgaccugaagcaguucaagcaggacgcgaaguacagccacgggaucgacgucaccgaccuguucgccgcccagcccggccucacguccgccgugaucgaggcccugccccgcaacauggucaucacgugccagggcagcgacgacaucaagaagcugcucgagucccaggggcgcaaggacaucaagcugaucgacaucgcgcugagcaagaccgacagccggaaguacgagaacgccgugugggaccaguacaaggaccucugccacaugcacaccggcguggucguggagaagaagaagcgcgggggcaaggaggagaucaccccgcacugcgcccugauggacugcaucauguucgacgccgcgguguccgggggccugaacacccucguccugcgggccgugcugccccgcgacaugguguuccggaccagcacgccccgcgucgugcucugaggacuagucccuguucccagagcccacuuuuuuuucuuuuuuugaaauaaaauagccugucuuucagaucuaaaaaaaaaaaaaaaaaaaaaaaaaaaaaaaaaaaaaaaaaaaaaaaaaaaaaaaaaaaaaaaaugcaucccccccccccccccccccccccccccccccaaaggcucuuuucagagccaccagaauu

SEQ ID NO: 10138 - RNA, 2005 nt, Artificial Sequence
  mRNA product Design a-2 comprising derived and/or modified sequence from LASV(G3010-SLE-2013;Clade IV)__AIT17345__NP (opt1)
gggagaguccgcucagccagguugcagaagcggcuuagcguguguccuaaucuucucucugcguguagguaggccugugccgcaaacaagcuuaccaugagcgccuccaaggagaucaagagcuuccuguggacccagucccuccgccgggagcugagcggcuacugcuccaacaucaagcuccagguggucaaggacgcccaggcgcugcugcacgggcuggacuucagcgagguguccaacgugcagcgccucaugcggaaggagcgccgggacgacaacgaccugaagcgccugcgggaccucaaccaggccgucaacaaccugguggagcucaagagcacccagcagaaguccauccugcgcgugggcacccugaccagcgacgaccugcucauccuggccgccgaccuggagaagcucaaguccaaggucacccggaccgagcgcccccugagcgccgggguguacaugggcaaccuguccagccagcagcucgaccagcggcgcgcgcugcuguccaugaucgggaugagcuccggcgugcagggcgcccgggccgggcgcgacggcgucgugcgggugugggacgucaagaacgccgagcuccugaacaaccaguucgggacgaugccgagccugacccucgcgugccugaccaagcagggccagguggaccugaacgacgugguccaggcccucaccgaccuggggcugaucuacacggccaaguaccccaacaccuccgaccucgaccgccugacccagagccaccccauccugaacaugaucgacaccaagaaguccagccucaacaucagcggcuacaacuucucccugggcgccgccgugaaggcgggggccugcaugcuggacggcgggaacaugcucgagacgaucaaggugagcccccagaccauggacggcauccugaaguccauccugaaggucaagaaggcccucggcauguucaucagcgagaccccgggggagcggaaccccuacgagaacauccuguacaagaucugccuguccggcgacggguggcccuacaucgccagccgcaccuccaucacgggccgggccugggagaacaccgugguggaccucgagagcgacgggaagccccagaaggcgggcuccaacaacagcaacaagucccugcagagcgccggcuucaccgccgggcugaccuacucccagcucaugacgcugaaggacgccaugcugcagcuggacccgaacgccaagaccuggauggacaucgagggccgccccgaggaccccgucgagguggcgcucuaccagcccagcuccgggugcuacauccacuucuuccgggagccgaccgaccugaagcaguucaagcaggacgccaaguacagccacggcaucgacgugaccgaccuguucgccgcccagcccgggcucacguccgccgucaucgacgcgcugccccgcaacauggugaucacgugccagggcagcgacgacaucaagaagcugcucgagagccagggccgcaaggacaucaagcugaucgacaucgcccuguccaagaccgacagccggaaguacgagaacgccgucugggaccaguacaaggaccucugccacaugcacaccggggugguggucgagaagaagaagcgcggcgggaaggaggagaucaccccgcacugcgcccugauggacugcaucauguucgacgcggccguguccggcgggcugaacaccagcgugcuccgggccguccugccccgcgacaugguguuccggaccuccacgccccgcgugguccugugaggacuagucccuguucccagagcccacuuuuuuuucuuuuuuugaaauaaaauagccugucuuucagaucuaaaaaaaaaaaaaaaaaaaaaaaaaaaaaaaaaaaaaaaaaaaaaaaaaaaaaaaaaaaaaaaaugcaucccccccccccccccccccccccccccccccaaaggcucuuuucagagccaccagaauu

SEQ ID NO: 10139 - RNA, 2005 nt, Artificial Sequence
  mRNA product Design a-2 comprising derived and/or modified sequence from LASV(G502-SLE-2009;Clade IV)__AIT17127__NP (opt1)
gggagaguccgcucagccagguugcagaagcggcuuagcguguguccuaaucuucucucugcguguagguaggccugugccgcaaacaagcuuaccaugagcgccuccaaggagaucaagagcuuccuguggacccagucccuccgccgggagcugagcggcuacugcuccaacaucaagcuccagguggucaaggacgcccaggcgcugcugcacgggcuggacuucagcgagguguccaacgugcagcgccucaugcggaaggagcgccgggacgacaacgaccugaagcgccugcgggaccucaaccaggccgucaacaaccugguggagcucaagagcacccagcagaaguccauccugcgcgugggcacccugaccagcgacgaccugcucauccuggccgccgaccuggagaagcucaaguccaaggucauccggaccgagcgcccccugagcgccgggguguacaugggcaaccuguccagccagcagcucgaccagcggcgcgcgcugcuguccaugaucgggaugagcggcggcaaccagggggugcgggccggcaaggacggggucgugcgcgugugggacgucaagaacgccgagcuccugaacaaccaguucggcaccaugccgucccugacgcucgccugccugaccaagcagggccagguggaccugaacgacgcggugcaggcccucaccgaccuggggcugaucuacaccgccaaguaccccaacacgagcgaccucgaccggcugacccagucccaccccauccugaacaugaucgacaccaagaaguccagccucaacaucuccggcuacaacuucagccugggggccgccgucaaggcgggcgccugcaugcuggacgggggcaacaugcucgagaccaucaaggugagcccccagacgauggacggcauccucaagagcauccugaaggugaagaaggcccuggggauguucaucuccgacaccccgggcgagcgcaaccccuacgagaacauccuguacaagaucugccugagcggggacggcuggcccuacaucgccucccggaccagcaucaccgggcgcgccugggagaacacggucguggaccucgaguccgacggcaagccccagaaggcgggcagcaacaacuccaacaagagccugcaguccgccggguucaccgccggccugaccuacagccagcucaugacccugaaggacgccaugcugcagcuggacccgaacacgaagaccuggauggacaucgaggggcggcccgaggaccccguggagaucgcccucuaccagcccuccagcggcugcuacauccacuucuuccgcgagccgaccgaccugaagcaguucaagcaggacgcgaaguacucccacgggaucgacgucaccgaccuguucgccgcccagcccggccucacgagcgccgugaucgacgcccugccccggaacauggugaucacgugccagggcuccgacgacauccgcaagcugcucgagagccaggggcgcaaggacaucaagcugaucgacaucgcgcugaacaagaccgacagccggaaguacgagaacgccgucugggaccaguacaaggaccucugccacaugcacaccggcguggucguggagaagaagaagcgcgggggcaaggaggagaucaccccgcacugcgcccugauggacugcaucauguucgacgccgcgguguccgggggccugaacaccagcguccuccgggccgugcugccccgcgacaugguguuccggaccuccacgccccgcgucgugcugugaggacuagucccuguucccagagcccacuuuuuuuucuuuuuuugaaauaaaauagccugucuuucagaucuaaaaaaaaaaaaaaaaaaaaaaaaaaaaaaaaaaaaaaaaaaaaaaaaaaaaaaaaaaaaaaaaugcaucccccccccccccccccccccccccccccccaaaggcucuuuucagagccaccagaauu

SEQ ID NO: 10140 - RNA, 2005 nt, Artificial Sequence
  mRNA product Design a-2 comprising derived and/or modified sequence from LASV(G733-SLE-2010;Clade IV)__AIT17155__NP (opt1)
gggagaguccgcucagccagguugcagaagcggcuuagcguguguccuaaucuucucucugcguguagguaggccugugccgcaaacaagcuuaccaugagcgccuccaaggagaucaagagcuuccuguggacccagucccuccgccgggagcugagcggcuacugcuccaacaucaagcuccagguggucaaggacgcccaggcgcugcugcacgggcuggacuucagcgagguguccaacgugcagcgccucaugcggaaggagcgccgggacgacaacgaccugaagcgccugcgggaccucaaccaggccgucaacaaccugguggagcucaagagcacccagcagaaguccgugcugcgcgucggcacccugaccagcgacgagcugcucgugcuggccgccgaccuggagaagcucaaguccaaggugauccggaccgagcgcccccugagcgccggggucuacaugggcaaccuguccagccagcagcucgaccagcggcgcgcgcugcuguccaugaucgggaugagcggcggcaaccagggggcccggaccggccgcgacgggguggugcgggucugggacgugaagaacgccgagcuccugaacaaccaguucggcaccaugccgucccugacccucgccugccugaccaagcagggccagguggaccugaacgacgcgguccaggcccucaccgaccuggggcugaucuacacggccaaguaccccaacaccagcgaccucgaccgccugacccagucccaccccauccugaacaugaucgacaccaagaaguccagccucaacaucuccggcuacaacuucagccugggggccgccgugaaggcgggcgccugcaugcuggacgggggcaacaugcucgagacgaucaaggugagcccccagaccauggacggcauccucaagagcauccugaaggucaagaaggcccuggggauguucaucuccgacaccccgggcgagcggaaccccuacgagaacauccuguacaagaucugccugagcggggacggcuggcccuacaucgccucccgcaccagcaucacggggcgggccugggagaacaccgugguggaccucgaguccgacggcaagccccagaaggcgggcagcaacaacuccaacaagagccugcaguccgccggguucaccgccggccugaccuacagccagcucaugacgcugaaggacgccaugcugcagcuggacccgaacgccaagaccuggauggacaucgaggggcgccccgaggaccccgucgagaucgcgcucuaccagcccuccagcggcugcuacauccacuucuuccgggagccgaccgaccugaagcaguucaagcaggacgccaaguacucccacgggaucgacgugaccgaccuguucgccgcccagcccggccucacgagcgccgugaucgacgcgcugccccgcaacauggucaucacgugccagggcuccgacgacauccgcaagcugcucgagagccaggggcggaaggacaucaagcugaucgacaucgcccugagcaagaucgacucccgcaaguacgagaacgccgugugggaccaguacaaggaccucugccacaugcacaccggcgucgugguggagaagaagaagcgcgggggcaaggaggagaucacgccccacugcgcccugauggacugcaucauguucgacgcggccgucagcgggggccugaacucccucgugcugcgggccgugcugccgcgggacauggucuuccgcaccagcacgccccggguggugcucugaggacuagucccuguucccagagcccacuuuuuuuucuuuuuuugaaauaaaauagccugucuuucagaucuaaaaaaaaaaaaaaaaaaaaaaaaaaaaaaaaaaaaaaaaaaaaaaaaaaaaaaaaaaaaaaaaugcaucccccccccccccccccccccccccccccccaaaggcucuuuucagagccaccagaauu

SEQ ID NO: 10141 - RNA, 2005 nt, Artificial Sequence
  mRNA product Design a-2 comprising derived and/or modified sequence from MOPV/LASV reassortant(IGS-1;Clade IV)__AFY05578__NP (opt1)
gggagaguccgcucagccagguugcagaagcggcuuagcguguguccuaaucuucucucugcguguagguaggccugugccgcaaacaagcuuaccaugagcgccuccaaggagaucaagagcuuccuguggacccagucccuccgccgggagcugagcggcuacugcuccaacaucaagcuccagguggucaaggacgcccaggcgcugcugcacgggcuggacuucagcgagguguccaacgugcagcgccucaugcggaaggagcgccgggacgacaacgaccugaagcgccugcgggaccucaaccaggccgucaacaaccugguggagcucaagagcacccagcagaaguccauccugcgcgugggcacccugaccagcgacgaccugcucauccuggccgccgaccuggagaagcuccgguccaaggucauccgcaccgagcggccccugagcgccgggguguacaugggcaaccuguccagccagcagcucgaccagcgccgggcgcugcugaacaugaucgggauguccggcggcaaccagggggcccgcgccggccgggacggggugguccgcgugugggacgugaagaacgccgagcuccugagcaaccaguucggcaccaugccgucccugacgcucgcgugccugaccaagcaggggcaggucgaccugaacgacgccgugcaggcccucaccgaccugggccugaucuacaccgccaaguaccccaacacgagcgaccucgaccggcugacccagucccaccccauccugaacaugaucgacaccaagaaguccagccucaacaucuccggcuacaacuucagccugggggccgcggugaaggccggcgccugcaugcuggacgggggcaacaugcucgagaccaucaaggucagcccccagacgauggacggcauccucaagagcauccugaaggugaagaaggcccuggggauguucaucuccgacaccccgggcgagcgcaaccccuacgagaacauccuguacaagaucugccugagcggggacggcuggcccuacaucgccucccggaccagcaucaccgggcgcgcgugggagaacacgguggucgaccucgaguccgacggcaagccccagaaggccgacagcaacaacuccagcaagucccugcagagcgccggcuucaccgccgggcugaccuacucccagcucaugacccugaaggacgccaugcugcagcuggacccgaacgcgaagacguggauggacaucgagggccggcccgaggaccccguggagaucgcccucuaccagcccagcuccgggugcuacauccacuucuuccgcgagccgaccgaccugaagcaguucaagcaggacgccaaguacagccacggcaucgacgugaccgaccuguucgccacccagcccgggcucacguccgccgucaucgacgcgcugccccgcaacauggugaucacgugccagggcagcgacgacauccggaagcugcucgagagccagggccgcaaggacaucaagcugaucgacaucgaccuguccaagaccgacagccggaaguacgagaacgccgugugggaccaguacaaggaccucugccacaugcacaccggggucguggucgagaagaagaagcgcggcgggaaggaggagaucaccccgcacugcgcccugauggacugcaucauguucgacgccgcgguguccggcgggcugaacaccagcgugcuccgggccguccugccccgcgacaugguguuccggaccuccacgccccgcgugguccugugaggacuagucccuguucccagagcccacuuuuuuuucuuuuuuugaaauaaaauagccugucuuucagaucuaaaaaaaaaaaaaaaaaaaaaaaaaaaaaaaaaaaaaaaaaaaaaaaaaaaaaaaaaaaaaaaaugcaucccccccccccccccccccccccccccccccaaaggcucuuuucagagccaccagaauu

SEQ ID NO: 10142 - RNA, 2005 nt, Artificial Sequence
  mRNA product Design a-2 comprising derived and/or modified sequence from LASV(LM765-SLE-2012;Clade IV)__AIT17815__NP (opt1)
gggagaguccgcucagccagguugcagaagcggcuuagcguguguccuaaucuucucucugcguguagguaggccugugccgcaaacaagcuuaccaugagcgccuccaaggagaucaagagcuuccuguggacccagucccuccgccgggagcugagcggcuacugcuccaacaucaagcuccagguggucaaggacgcccaggcgcugcugcacgggcuggacuucagcgagguguccaacgugcagcgccucaugcggaaggagcgccgggacgacaacgaccugaagcgccugcgggaccucaaccaggccgucaacaaccugguggagcucaagagcacccagcagaaguccauccugcgcgugggcacccugaccagcgacgaccugcucauccuggccgccgaccuggagaagcucaaguccaaggucacccggaccgagcgcccccugagcgccgggguguacaugggcaaccuguccagccagcagcucgaccagcggcgcgcgcugcuggacaugaucgggauguccggcagcaaccagggcgcccgggccgggcgcgacggcgugguccgggugugggacgugaagaacgccgagcuccugaacaaccaguucgggacgaugccgucccugacccucgcgugccugaccaagcagggccaggucgaccugaacgacgccgugcaggcccucaccgaccuggggcugaucuacacggccaaguaccccaacaccagcgaccucgaccgccugacccagucccaccccauccugaacaugaucgacaccaagaaguccagccucaacaucuccggcuacaacuucagccugggcgccgcggugaaggccggggccugcaugcuggacggcgggaacaugcucgagacgaucaaggucagcccccagaccauggacggcauccucaagagcauccugaaggugaagaaggcccugggcauguucaucuccgacgccccgggggagcggaaccccuacgagaacauccuguacaagaucugccugagcggcgacggguggcccuacaucgcgucccgcaccagcaucaccggccgggccugggagaacacgguggucgaccucgaguccgacgggaagccccagaaggccggcagcaacggcuccaacaagagccugcaguccgccggguucaccgccggccugaccuacagccagcucaugacccugaaggacgcgaugcugcagcuggacccgaacgccaagacguggauggacaucgaggggcgccccgaggaccccguggagaucgcccucuaccagcccuccagcggcugcuacauccacuucuuccgggagccgaccgaccugaagcaguucaagcaggacgccaaguacucccacgggaucgacgugaccgaccuguucgccgcgcagcccggccucaccagcgccgucaucgacgcccugccccgcaacauggugaucacgugccagggcuccgacgacauccgcaagcuguucgagagccaggggcggaaggacaucaagcucaucgacaucgcccugagcaagaccgacucccgcaaguacgagaacgcggugugggaccaguacaaggaccugugccacaugcacaccggcaucgucguggagaagaagaagcgcgggggcaaggaggagaucacgccccacugcgcccucauggacugcaucauguucgacgccgccgucagcgggggccugaacaccuccgugcugcgggccgugcucccgcgggacauggucuuccgcaccagcacgccccggguggugcugugaggacuagucccuguucccagagcccacuuuuuuuucuuuuuuugaaauaaaauagccugucuuucagaucuaaaaaaaaaaaaaaaaaaaaaaaaaaaaaaaaaaaaaaaaaaaaaaaaaaaaaaaaaaaaaaaaugcaucccccccccccccccccccccccccccccccaaaggcucuuuucagagccaccagaauu

SEQ ID NO: 10143 - RNA, 2005 nt, Artificial Sequence
  mRNA product Design a-2 comprising derived and/or modified sequence from LASV(LM776-SLE-2012;Clade IV)__AIT17825__NP (opt1)
gggagaguccgcucagccagguugcagaagcggcuuagcguguguccuaaucuucucucugcguguagguaggccugugccgcaaacaagcuuaccaugagcgccuccaaggagaucaagagcuuccuguggacccagucccuccgccgggagcugagcuccuacugcagcaacaucaagcuccagguggucaaggacgcccaggcgcugcugcacggccuggacuucuccgaggugagcaacgugcagcgccucaugcggaaggagcgccgggacgacaacgaccugaagcgccugcgggaccucaaccaggccgucaacaaccugguggagcugaaguccacccagcagaaguccauccuccgcguggggacccugaccuccgacgaccugcucauccuggccgccgaccuggagaagcucaagagcaaggucacccggaccgagcgcccccuguccgccggcguguacauggggaaccugagcucccagcagcucgaccagcggcgcgcgcugcugagcaugaucggcauguccgggagcaaccagggcgcccgggccggccgcgacggggugguccgggugugggacgugaagaacgccgagcuccugaacaaccaguucggcacgaugccgucccugacccucgcgugccugaccaagcaggggcaggucgaccugaacgacgccgugcaggcccucaccgaccugggccugaucuacacggccaaguaccccaacaccagcgaccucgaccgccugacccagagccaccccauccugaacaugaucgacaccaagaaguccagccucaacaucuccggguacaacuucagccugggcgccgcggugaaggccggcgccugcaugcuggacgggggcaacaugcucgagacgaucaaggucagcccccagaccauggacgggauccucaagagcauccugaaggugaagaaggcccugggcauguucaucuccgacaccccgggcgagcggaaccccuacgagaacauccuguacaagaucugccugagcggggacggcuggcccuacaucgccucccgcaccagcaucacggggcgggcgugggagaacaccguggucgaccucgaguccgacggcaagccccagaaggccgggagcaacaacuccaacaagagccugcaguccgccggcuucaccgccggccugaccuacagccagcucaugacgcugaaggacgccaugcugcagcuggacccgaacgcgaagaccuggauggacaucgaggggcgccccgaggaccccguggagguggcccucuaccagcccuccagcggcugcuacauccacuucuuccgggagccgaccgaccugaagcaguucaagcaggacgccaaguacucccacgggaucgacgucaccgaccuguucgccgcccagcccggccucacgagcgcggugaucgacgcccugccccgcaacauggugaucacgugccaggggagcgacgacauccgcaagcugcucgagucccagggccggaaggacaucaagcugaucgacaucgcccugagcaagaccgacucccgcaaguacgagaacgccgucugggaccaguacaaggaccucugccacaugcacaccggcguggucguggagaagaagaagcgcgggggcaaggaggagaucaccccgcacugcgcgcugauggacugcaucauguucgacgccgccgugagcgggggccugaacaccuccguccuccgggccgugcugccccgggacaugguguuccgcaccagcacgccccgggucgugcugugaggacuagucccuguucccagagcccacuuuuuuuucuuuuuuugaaauaaaauagccugucuuucagaucuaaaaaaaaaaaaaaaaaaaaaaaaaaaaaaaaaaaaaaaaaaaaaaaaaaaaaaaaaaaaaaaaugcaucccccccccccccccccccccccccccccccaaaggcucuuuucagagccaccagaauu

SEQ ID NO: 10144 - RNA, 2005 nt, Artificial Sequence
  mRNA product Design a-2 comprising derived and/or modified sequence from LASV(Mad39;Clade IV)__ANH09723__NP (opt1)
gggagaguccgcucagccagguugcagaagcggcuuagcguguguccuaaucuucucucugcguguagguaggccugugccgcaaacaagcuuaccaugagcgccuccaaggagaucaagagcuuccuguggacccagucccuccgccgggagcugagcggcuacugcuccaacaucaagcuccagguggucaaggacgcccaggcgcugcugcacgggcuggacuucagcgagguguccaacgugcagcgccucaugcggaagcagcgccgggacgacaacgaccugaagcgccugcgggaccucaaccaggccgucaacaaccugguggagcugaaguccacccagcagaaguccgugcuccgcgucggcacgcugaccagcgacgaccugcucacccuggccgccgaccuggagaagcucaaguccaaggugacccggacggagcgcccccugaccgccgggguguacaugggcaaccugagcucccagcagcucgaccagcggcgcgcgcugcugaacaugaucgggaugagcggcggcaaccagggggcccggaccggccgcgacggggucgugcgggugugggacgucaagaacgccgagcuccugaacaaccaguucggcaccaugccgucccugacgcucgccugccugaccaagcagggccagguggaccugaacgacgugguccaggcgcucaccgaccuggggcugaucuacaccgccaaguaccccaacacgagcgaccucgaccgccugacccagucccaccccauccugaacaugaucgacaccaacaagagcucccucaacaucagcggcuacaacuucagccugggggccgccgugaaggccggcgcgugcaugcuggacgggggcaacaugcucgagaccaucaaggugagcccccagacgauggacggcauccucaagagcauccugaaggucaagaagucccuggggauguucaucagcgacaccccgggcgagcggaaccccuacgagaacauccuguacaagaucugccuguccggggacggcuggcccuacaucgccagccgcaccuccaucaccgggcgggccugggagaacacggugguggaccucgagagcggcggcaagccccagaaggccggguccaacaacagcaacaagucccugcagagcgccggcuucgcggccgggcugaccuacucccagcucaugacccugaaggacgccaugcugcagcuggacccgaacgccaagaccuggauggacaucgagggccgccccgaggaccccgucgagaucgcccucuaccagcccaucagcgggugcuacauccacuucuuccgggagccgacggaccugaagcaguucaagcaggacgcgaaguacucccacggcaucgacgugaccgaccuguucgccgcccagcccggccucaccagcgccgugaucgaggcccugccccgcaacauggucaucacgugccagggguccgacgacauccgcaagcuguucgagagccagggccggaaggacaucaagcucaucgacaucgcgcuguccaagaccgacagccgcaaguacgagaacgccgugugggaccaguacaaggaccugugccacaugcacaccggggucgugguggagaagaagaagaagggcgggaaggaggagaucacgccccacugcgcccucauggacugcaucauguucgacgccgcggucagcggcggccugaacacccuggugcuccgggccgugcugccgcgcgacauggucuuccggaccuccacccccaagguggugcugugaggacuagucccuguucccagagcccacuuuuuuuucuuuuuuugaaauaaaauagccugucuuucagaucuaaaaaaaaaaaaaaaaaaaaaaaaaaaaaaaaaaaaaaaaaaaaaaaaaaaaaaaaaaaaaaaaugcaucccccccccccccccccccccccccccccccaaaggcucuuuucagagccaccagaauu

SEQ ID NO: 10145 - RNA, 2005 nt, Artificial Sequence
  mRNA product Design a-2 comprising derived and/or modified sequence from LASV(Z0947-SLE-2011;Clade IV)__AIT17841__NP (opt1)
gggagaguccgcucagccagguugcagaagcggcuuagcguguguccuaaucuucucucugcguguagguaggccugugccgcaaacaagcuuaccaugagcgccuccaaggagaucaagagcuuccuguggacccagucccuccgccgggagcugagcggcuacugcuccaacaucaagcuccagguggucaaggacgcccaggcgcugcugcacgggcuggacuucagcgagguguccaacgugcagcgccucaugcggaaggagcgccgggacgacaacgaccugaagcgccugcgggaccucaaccaggccgucaacaaccugguggagcucaagagcacccagcagaaguccauccugcgcgugggcacccugaccagcgacgaccugcucauccuggccgccgaccuggagaagcucaaguccaaggucacccggaccgagcgcccccugagcgccgggguguacaugggcaaccuguccagccagcagcucgaccagcggcgcgcgcugcugaacaugaucgggauguccggcagcaaccagggcgcccggacggggcgcgacggcgugguccgggugugggacgugaagaacgccgagcuccugaacaaccaguucgggaccaugccgucccugacccucgccugccugaccaagcagggccaggucgaccugaacgacgcggugcaggcccucacggaccuggggcugaucuacaccgccaaguaccccaacaccagcgaccucgaccgccugacccagucccaccccauccugaacaugaucgacacgaagaaguccagccucaacaucuccggcuacaacuucagccugggcgccgccgugaaggcgggggccugcaugcuggacggcgggaacaugcucgagaccaucaaggucagcccccagaccauggacggcauccucaagagcauccugaaggugaagaaggcccugggcauguucaucuccgacgccccgggggagcggaaccccuacgagaacauccuguacaagaucugccugagcggcgacggguggcccuacaucgccucccgcaccagcaucacgggccgggcgugggagaacaccguggucgaccucgaguccgacgggaagccccagaaggccggcagcaacggcuccaacaagagccugcaguccgccggguucaccgccggccugaccuacagccagcucaugacgcugaaggacgccaugcugcagcuggacccgaacgcgaagaccuggauggacaucgaggggcgccccgaggaccccguggagaucgcccucuaccagcccuccagcggcugcuacauccacuucuuccgggagccgaccgaccugaagcaguucaagcaggacgccaaguacucccacgggaucgacgugaccgaccuguucgccgcccagcccggccucacgagcgcggucaucgacgcccugccccgcaacauggugaucacgugccagggcuccgacgacauccgcaagcuguucgagagccaggggcggaaggacaucaagcucaucgacaucgcccugagcaagaccgacucccgcaaguacgagaacgccgugugggaccaguacaaggaccugugccacaugcacaccggcaucgucguggagaagaagaagcgcgggggcaaggaggagaucaccccgcacugcgcgcucauggacugcaucauguucgacgccgccgucagcgggggccugaacaccuccgugcugcgggccgugcucccccgggacauggucuuccgcaccagcacgccccggguggugcugugaggacuagucccuguucccagagcccacuuuuuuuucuuuuuuugaaauaaaauagccugucuuucagaucuaaaaaaaaaaaaaaaaaaaaaaaaaaaaaaaaaaaaaaaaaaaaaaaaaaaaaaaaaaaaaaaaugcaucccccccccccccccccccccccccccccccaaaggcucuuuucagagccaccagaauu

SEQ ID NO: 10146 - RNA, 2005 nt, Artificial Sequence
  mRNA product Design a-2 comprising derived and/or modified sequence from LASV(Josiah;Clade IV)__NP_694869__NP (opt2)
gggagaguccgcucagccagguugcagaagcggcuuagcguguguccuaaucuucucucugcguguagguaggccugugccgcaaacaagcuuaccauguccgccuccaaggagaucaaguccuuccucuggacccagucccuccgccgcgagcucuccggcuacugcuccaacaucaagcuccaggucgucaaggacgcccaggcccuccuccacggccucgacuucuccgaggucuccaacguccagcgccucaugcgcaaggagcgccgcgacgacaacgaccucaagcgccuccgcgaccucaaccaggccgucaacaaccucgucgagcucaaguccacccagcagaaguccauccuccgcgucggcacccucaccuccgacgaccuccucauccucgccgccgaccucgagaagcucaaguccaaggucauccgcaccgagcgcccccucuccgccggcgucuacaugggcaaccucuccucccagcagcucgaccagcgccgcgcccuccucaacaugaucggcauguccggcggcaaccagggcgcccgcgccggccgcgacggcgucguccgcgucugggacgucaagaacgccgagcuccucaacaaccaguucggcaccaugcccucccucacccucgccugccucaccaagcagggccaggucgaccucaacgacgccguccaggcccucaccgaccucggccucaucuacaccgccaaguaccccaacaccuccgaccucgaccgccucacccagucccaccccauccucaacaugaucgacaccaagaaguccucccucaacaucuccggcuacaacuucucccucggcgccgccgucaaggccggcgccugcaugcucgacggcggcaacaugcucgagaccaucaaggucuccccccagaccauggacggcauccucaaguccauccucaaggucaagaaggcccucggcauguucaucuccgacacccccggcgagcgcaaccccuacgagaacauccucuacaagaucugccucuccggcgacggcuggcccuacaucgccucccgcaccuccaucaccggccgcgccugggagaacaccgucgucgaccucgaguccgacggcaagccccagaaggccgacuccaacaacuccuccaagucccuccaguccgccggcuucaccgccggccucaccuacucccagcucaugacccucaaggacgccaugcuccagcucgaccccaacgccaagaccuggauggacaucgagggccgccccgaggaccccgucgagaucgcccucuaccagcccuccuccggcugcuacauccacuucuuccgcgagcccaccgaccucaagcaguucaagcaggacgccaaguacucccacggcaucgacgucaccgaccucuucgccacccagcccggccucaccuccgccgucaucgacgcccucccccgcaacauggucaucaccugccagggcuccgacgacauccgcaagcuccucgagucccagggccgcaaggacaucaagcucaucgacaucgcccucuccaagaccgacucccgcaaguacgagaacgccgucugggaccaguacaaggaccucugccacaugcacaccggcgucgucgucgagaagaagaagcgcggcggcaaggaggagaucaccccccacugcgcccucauggacugcaucauguucgacgccgccgucuccggcggccucaacaccuccguccuccgcgccguccucccccgcgacauggucuuccgcaccuccaccccccgcgucguccucugaggacuagucccuguucccagagcccacuuuuuuuucuuuuuuugaaauaaaauagccugucuuucagaucuaaaaaaaaaaaaaaaaaaaaaaaaaaaaaaaaaaaaaaaaaaaaaaaaaaaaaaaaaaaaaaaaugcaucccccccccccccccccccccccccccccccaaaggcucuuuucagagccaccagaauu

SEQ ID NO: 10147 - RNA, 2005 nt, Artificial Sequence
  mRNA product Design a-2 comprising derived and/or modified sequence from LASV(LP;Clade I)__AAF86702__NP (opt2)
gggagaguccgcucagccagguugcagaagcggcuuagcguguguccuaaucuucucucugcguguagguaggccugugccgcaaacaagcuuaccauguccaacuccaaggagaucaaguccuuccucuggacccagucccuccgccgcgagcucuccggcuacugcuccaacaucaagcuccaggucgucaaggacgcccaggcccuccuccacggccucgacuucuccgaggucuccaacguccagcgccucaugcgcaagcagaagcgcgacgacgccgaccucaagcgccuccgcgaccucaaccaggccgucaacaaccucgucgagcucaaguccacccagcagaagaacguccuccgcgucggcacccucuccuccgacgaccucaucacccucgccgccgaccucgagaagcucaaguccaaggucauccgcaccgagcgcccccucuccuccggcgucuacaugggcaaccucuccucccagcagcucgaccagcgccgcgcccuccucuccaugaucggcauguccggcggcccccagggcaaccgcaccggcggcgacggcgucguccgcgucugggacgucaagaacgccgagcuccucaacaaccaguucggcaccaugcccucccucacccucgccugccucaccaagcagggccaggucgaccucaacgacgccguccaggcccucaccgaccucggccucaucuacaccgccaaguaccccaacuccuccgaccucgacaugcucacccagucccaccccauccucggcauggucgacaccaagaaguccucccucaacaucuccggcuacaacuucucccucggcgccgccgucaaggccggcgccugcaugcucgacggcggcaacaugcucgagaccaucaaggucuccccccagaccauggacggcauccucaaguccauccucaaggucaagcgcucccucggcauguucaucuccgacacccccggcgagcgcaaccccuacgagaacauccucuacaagaucugccucuccggcgagggcuggcccuacaucgccucccgcaccuccaucaccggccgcgccugggagaacacccucgucgaccucgaguccgacaacaagccccccaagcucaacuccgccggcuccaacaagucccuccaggccgccggccucaacgccggccucaccuacucccagcucaugacccucaaggacugcaugcuccagcucgaccccuccuccaagaccuggaucgacaucgagggccgccccgaggaccccgucgagaucgcccucuuccagcccuccuccggcugcuacauccacuucuuccgcgagcccaccgaccucaagcaguucaagcaggacgccaaguacucccacggcaucgacgucaccgaccucuucuccacccagcccggccucaccuccgccgucaucgaggcccucccccgcaacaugguccucaccugccagggcuccgacgacaucaagaagcuccucgagucccagggccgccgcgacaucaagcucaucgacaucucccucuccaaggccgacucccgcaaguucgagaacgccgucugggaccaguacaaggaccucugccacaugcacaccggcgucgucgucgagaagaagaagcgcggcggcaaggaggagaucaccccccacugcgcccuccucgacugcaucauguucgacgccgccaccaccggcucccucaacaucaccacccuccgcgccguccucccccgcgacauggucuuccgcaccuccacccccaaggucguccucugaggacuagucccuguucccagagcccacuuuuuuuucuuuuuuugaaauaaaauagccugucuuucagaucuaaaaaaaaaaaaaaaaaaaaaaaaaaaaaaaaaaaaaaaaaaaaaaaaaaaaaaaaaaaaaaaaugcaucccccccccccccccccccccccccccccccaaaggcucuuuucagagccaccagaauu

SEQ ID NO: 10148 - RNA, 2005 nt, Artificial Sequence
  mRNA product Design a-2 comprising derived and/or modified sequence from LASV(803213;Clade II)__AAF86704__NP (opt2)
gggagaguccgcucagccagguugcagaagcggcuuagcguguguccuaaucuucucucugcguguagguaggccugugccgcaaacaagcuuaccauguccgccuccaaggaggucaaguccuuccucuggacccagucccuccgccgcgagcucuccggcuacugcuccaacaucaagcuccaggucgucaaggacgcccaggcccuccuccacggccucgacuucuccgaggucaacaacguccagcgccucaugcgcaagcagaagcgcgacgacggcgaccucaagcgccuccgcgaccucaaccaggccgucaacaaccucgucgagcucaaguccacccagcagaaguccauccuccgcgucggcacccucaccuccgacgaccuccucacccucgccgccgaccucgagaagcucaaguccaaggucauccgcaccgagcgcccccucuccuccggcgucuacaugggcaaccucuccacccagcagcucgagcagcgccgcgcccuccucaacaugaucggcauggucggcggcgcccagggcacccagcccggccgcgacggcgucguccgcgucugggacgucaagaaccccgaccuccucaacaaccaguucggcaccaugcccucccucacccucgccugccucaccaagcagggccaggucgaccucaacgacgccguccucgcccucaccgaccucggccucaucuacaccgccaaguaccccaacuccuccgaccucgaccgccucucccagucccaccccauccucaacauggucgacaccaagaaguccucccucaacaucuccggcuacaacuucucccucggcgccgccgucaaggccggcgccugcaugcucgacggcggcaacaugcucgagaccaucaaggucaccccccagaccauggacggcauccucaaguccauccucaaggucaagcgcucccucggcauguucgucuccgacacccccggcgagcgcaaccccuacgagaacauccucuacaagaucugccucuccggcgacggcuggcccuacaucgccucccgcaccuccaucgucggccgcgccugggagaacaccaccgucgaccucgaguccgacggcaagccccagaaggucggcaccgccggcuccaacaagucccuccaguccgccggcuuccccaccggccucaccuacucccagcucaugacccucaaggacuccaugaugcagcucgaccccuccgccaagaccuggaucgacaucgagggccgccccgaggaccccgucgagaucgcccucuaccagcccauguccggcugcuacauccacuucuuccgcgagcccaccgaccucaagcaguucaagcaggacgccaaguacucccacggcaucgacgucgccgaccucuuccccgcccagcccggccucaccuccgccgucaucgaggcccucccccgcaacaugguccucaccugccagggcuccgacgacaucaagaagcuccucgacucccagggccgccgcgacaucaagcucaucgacaucucccucuccaaggucgacucccgcaaguucgagaacgccgucugggaccagugcaaggaccucugccacaugcacaccggcgucgucgucgagaagaagaagcgcggcggcaaggaggagaucaccccccacugcgcccucauggacugcaucauguucgacgccgccgucuccggcggccucaacauccccguccuccgcgccguccucccccgcgacauggucuuccgcaccuccucccccaaggucguccucugaggacuagucccuguucccagagcccacuuuuuuuucuuuuuuugaaauaaaauagccugucuuucagaucuaaaaaaaaaaaaaaaaaaaaaaaaaaaaaaaaaaaaaaaaaaaaaaaaaaaaaaaaaaaaaaaaugcaucccccccccccccccccccccccccccccccaaaggcucuuuucagagccaccagaauu

SEQ ID NO: 10149 - RNA, 2008 nt, Artificial Sequence
  mRNA product Design a-2 comprising derived and/or modified sequence from LASV(GA391;Clade III)__CAA36646__NP (opt2)
gggagaguccgcucagccagguugcagaagcggcuuagcguguguccuaaucuucucucugcguguagguaggccugugccgcaaacaagcuuaccauguccgccuccaaggagguccgcuccuuccucuggacccagucccuccgccgcgagcucuccggcuacugcuccaacaucaagcuccaggucgucaaggacgcccaggcccuccuccacggccucgacuucuccgaggucuccaacguccagcgccucaugcgcaagcagaagcgcgacgacggcgaccucaagcgccuccgcgaccucaaccaggccgucaacaaccucgucgagcucaaguccacccagcagaaguccguccuccgcgucggcacccucuccuccgacgaccuccucauccucgccgccgaccucgagaagcucaaguccaaggucacccgcaccgagcgcccccucuccuccggcgucuacaugggcaaccucuccucccagcagcucgaccagcgccgcgcccuccucaacaugaucggcaugaccggcgucuccggcggcggcaagggcgccuccgacggcaucguccgcgucugggacgucaagaacgccgagcuccucaacaaccaguucggcaccaugcccucccucacccucgccugccucaccaagcagggccaggucgaccucaacgacgccguccaggcccucaccgaccucggccucaucuacaccgccaaguaccccaacuccuccgaccucgaccgccucucccagucccaccccauccucaacaugaucgacaccaagaaguccucccucaacaucuccggcuacaacuucucccucggcgccgccgucaaggccggcgccugcaugcucgacggcggcaacaugcucgagaccaucaaggucuccccccagaccauggacggcauccucaaguccauccucaaggucaagaagucccucggcauguucgucuccgacacccccggcgagcgcaaccccuacgagaacauccucuacaagaucugccucuccggcgacggcuggcccuacaucgccucccgcaccuccaucgucggccgcgccugggagaacaccgucgucgaccucgagcaggacaacaagccccagaagaucggcaacggcggcuccaacaagucccuccaguccgccggcuucgccgccggccucaccuacucccagcucaugacccucaaggacuucaagugcuucaaccucauccccaacgccaagaccuggauggacaucgagggccgccccgaggaccccgucgagaucgcccucuaccagcccuccuccggcugcuacguccacuucuuccgcgagcccaccgaccucaagcaguucaagcaggacgccaaguacucccacggcaucgacgucaccgaccucuucgccgcccagcccggccucaccuccgccgucaucgaggcccucccccgcaacauggucaucaccugccagggcuccgaggacauccgcaagcuccucgagucccagggccgccgcgacaucaagcucaucgacaucacccucuccaaggccgacucccgcaaguucgagaacgccgucugggaccaguucaaggaccucugccacaugcacaccggcgucgucgucgagaagaagaagcgcggcggcaaggaggagaucaccccccacugcgcccucauggacugcaucauguucgacgccgccgucuccggcggccucgacgccaagguccuccgcgucguccucccccgcgacauggucuuccgcaccuccacccccaaggucguccucugaggacuagucccuguucccagagcccacuuuuuuuucuuuuuuugaaauaaaauagccugucuuucagaucuaaaaaaaaaaaaaaaaaaaaaaaaaaaaaaaaaaaaaaaaaaaaaaaaaaaaaaaaaaaaaaaaugcaucccccccccccccccccccccccccccccccaaaggcucuuuucagagccaccagaauu

SEQ ID NO: 10150 - RNA, 2005 nt, Artificial Sequence
  mRNA product Design a-2 comprising derived and/or modified sequence from LASV(AV;Clade V)__CCA30315__NP (opt2)
gggagaguccgcucagccagguugcagaagcggcuuagcguguguccuaaucuucucucugcguguagguaggccugugccgcaaacaagcuuaccauguccgccuccaaggaggucaaguccuuccucuggacccagucccuccgccgcgagcucuccggcuacugcuccaacaucaagcuccaggucgucaaggacgcccaggcccuccuccacggccucgacuucuccgaggucuccaacguccagcgccucaugcgcaagcagcgccgcgacgacuccgaccucaagcgccuccgcgaccucaaccaggccgucaacaaccucgucgagcucaaguccacccagcagaaguccguccuccgcgucggcacccucuccuccgacgaccuccucacccucgccgccgaccucgagaagcucaaguccaaggucacccgcaccgagcgcccccucuccuccggcgucuacaugggcaaccucuccucccagcagcucgaccagcgccgcgcccuccucaaccucaucggcaugaccaacggcucccagggcucccaggccggccgcgacggcgucguccgcgucugggacgucaagaacgccgagcuccucaacaaccaguucggcaccaugcccucccucacccucgccugccucaccaagcagggccaggucgaccucaacgacgucguccaggcccucaccgaccucggccucaucuacaccgccaaguaccccaacaccuccgaccucgaccgccucacccagucccaccccauccucaacaugaucgacaccaagaaguccucccucaacaucuccggcuacaacuucucccucggcgccgccgucaaggccggcgccugcaugcucgacggcggcaacaugcucgagaccaucaaggucuccccccaguccauggacggcauccucaaguccauccucaaggucaagcgcgcccucggcauguucgucuccgacacccccggcgagcgcaaccccuacgagaacauccucuacaagaucugccucuccggcgacggcuggcccuacaucgccucccgcaccuccaucgucggccgcgccugggagaacaccgucgucgaccucgagaccgacggcaagccccagaagaucggcuccggcaacuccaacaagucccuccaguccgccggcuucuccgccggccucaccuacucccagcucaugacccucaaggacgccaugcuccagcucgaccccaacgccaagaccuggauggacaucgagggccgccccgaggaccccgucgaggucgcccucuaccagcccaucuccggcugcuacauccacuucuuccgcgagcccaccgaccucaagcaguucaagcaggacgccaaguacucccacggcaucgacaucgccgaccucuucgccgcccagcccggccucaccuccgccgucaucgaggcccucccccgcaacauggucaucaccugccagggcuccgaggacaucaagaagcuccucgagucccagggccgcaaggacaucaagcucaucgacaucgcccucuccaagaucgacucccgcaaguucgagaacgccgucugggaccaguacaaggaccucugccacaugcacaccggcgucgucgucgagaagaagaagcgcggcggcaaggaggagaucaccccccacugcgcccucauggacugcaucauguucgacgccgccgucuccggcggccucaacacccucguccuccgcgccguccucccccgcgacauggucuuccgcaccuccaccccccgcgucguccucugaggacuagucccuguucccagagcccacuuuuuuuucuuuuuuugaaauaaaauagccugucuuucagaucuaaaaaaaaaaaaaaaaaaaaaaaaaaaaaaaaaaaaaaaaaaaaaaaaaaaaaaaaaaaaaaaaugcaucccccccccccccccccccccccccccccccaaaggcucuuuucagagccaccagaauu

SEQ ID NO: 10151 - RNA, 2005 nt, Artificial Sequence
  mRNA product Design a-2 comprising derived and/or modified sequence from LASV(Togo/2016/7082;Clade VI)__AMR44578__NP (opt2)
gggagaguccgcucagccagguugcagaagcggcuuagcguguguccuaaucuucucucugcguguagguaggccugugccgcaaacaagcuuaccauguccaacuccaaggaggucaaguccuuccucuggacccagucccuccgccgcgagcucuccggcuacugcuccaacaucaagcuccaggucgucaaggacgcccaggcccuccuccacggccucgacuucuccgaggucuccaacguccagcgccucaugcgcaagcagaagcgcgacgacggcgaccucaagcgccuccgcgaccucaaccaggccgucaacaaccucgucgagcucaaguccguccagcagaaguccauccuccgcgucggcacccucaccuccgacgaccuccucacccucgccgccgaccucgagaagcucaaguccaaggucacccgcaccgagcgcccccucuccuccggcgucuacaugggcaaccucuccucccagcagcucgaccagcgccgcgcccuccucuccaugaucggcauguccggcggcaaccagaacucccagcccaagggcgacggcgucguccgcgucugggacgucaagaacgccgaccuccucaacaaccaguucggcaccaugcccucccucacccucgccugccucaccaagcagggccaggucgaccucaacgacgccguccaggcccucaccgaccucggccucaucuacaccgccaaguaccccaacuccuccgaccucgaccgccucucccagucccaccccauccucaacaugaucgacaccaagaaguccucccucaacaucuccggcuacaacuucucccucggcgccgccaucaagaccggcgccugcaugcucgacggcggcaacaugcucgagaccaucaaggucaccccccagaccauggacggcauccucaaguccauccucaaggucaagcgcucccucggcauguucaucuccgacacccccggcgagcgcaaccccuacgagaacauccucuacaagaucugccucuccggcgacggcuggcccuacaucgccucccgcaccgccaucaucggccgcgccugggagaacaccgucgucgaccucgaguccgacuccaagccccagaagaucggcuccaacggcuccaacaagucccuccaguccgccggcuucgcccccggccucaccuacucccagcucaugacccucaaggacuccaugcuccagcucgaccccaacgccaagaccuggaucgacaucgagggccgccccgaggaccccgucgaggucgcccucuuccagcccaucuccggcugcuacauccacuucuuccgcgagcccaccgaccucaagcaguucaagcaggacgccaaguacucccacggcaucgacgucaccgaccucuucgccgcccagcccggccucaccuccgccgucaucgaggcccucccccgcaacaugguccucaccugccagggcuccgacgacaucaagaagcuccucgacucccagggccgccgcgacaucaagcucaucgacgucucccucaacaagaucgacucccgcaaguucgagaacgccgucugggaccaguacaaggaccucugccacaugcacaccggcgucgucgucgagaagaagaagaagggcggcaaggaggagaucaccccccacugcgcccuccucgacugcaucauguucgacgccgccgucuccggcggccucaacgccaccguccuccgcgccguccucccccgcgacauggucuuccgcaccuccucccccaaggucguccucugaggacuagucccuguucccagagcccacuuuuuuuucuuuuuuugaaauaaaauagccugucuuucagaucuaaaaaaaaaaaaaaaaaaaaaaaaaaaaaaaaaaaaaaaaaaaaaaaaaaaaaaaaaaaaaaaaugcaucccccccccccccccccccccccccccccccaaaggcucuuuucagagccaccagaauu

SEQ ID NO: 10152 - RNA, 2005 nt, Artificial Sequence
  mRNA product Design a-2 comprising derived and/or modified sequence from LASV(KAK-428;Clade n.d. (VII))__ANH09741__NP (opt2)
gggagaguccgcucagccagguugcagaagcggcuuagcguguguccuaaucuucucucugcguguagguaggccugugccgcaaacaagcuuaccauguccaacuccaaggaggucaaguccuuccucuggacccagucccuccgccgcgagcucuccggcuacugcaccaacaucaagcuccaggucgucaaggacgcccaggcccuccuccacggccucgacuucuccgaggucuccaacguccagcgccucaugcgcaagcagaagcgcgacgacaacgaccucaagcgccuccgcgaccucaaccaggccgucaacaaccucgucgagcucaaguccguccagcagaaguccguccucaaggucggcacccucaacuccgacgaccuccucacccucgccgccgaccucgagaagcucaaguccaaggucguccgcaccgagcgcccccucuccuccggcgucuacaugggcaaccucuccucccagcagcucgaccagcgccgcgcccuccucaacaugaucggcauggccggcggcucccagggcaaccagcccucccgcgacggcgucguccgcgucugggacgucaagaacgccgaccuccucaacaaccaguucggcaccaugcccucccucacccucgccugccucaccaagcagggccaggucgaccucaacgacgucguccucgcccucaccgaccucggccucaucuacaccgccaaguaccccaacuccuccgaccucgaccgccucucccagaaccaccccguccucaacaugaucgacgucaacaaguccucccucaacaucuccggcuacaacuucucccucggcgccgccgucaaggccggcgccugcaugcucgacggcggcaacaugcucgagaccaucaagaucuccccccagaccgucgacggcauccucaaguccauccucaaggucaagcgcgcccucggcauguucgucuccgacacccccggcgagcgcaaccccuacgagaacauccucuacaaggucugccucuccggcaacggcuggcccuacaucgccucccgcaccuccaucgucggccgcgccugggagaacaccgucgucgaccucgaguccaacaagaaccagcccaaggucggcaacaacggcuccaacaagaugcuccaguccuccggcuucgccaccggccucaccuacucccagcucaugacccuccgcgacuccaugcuccagcucgaccccaccgccaagaccuggaucgacaucgagggccgccccgaggaccccgucgagcucgcccucuuccagcccuccuccggcugcuacauccacuucuuccgcgagcccaccgaccucaagcaguucaagcaggacgccaaguacucccacggcaucgacgucaacgaccucuucuccgcccagcccggccucaccuccgccguccucgaggcccucccccgcaacaugguccucaccugccagggcuccgacgacauccgcaagcuccucgacucccaggaccgcaaggacaucaagcucaucgacaucucccucuccaaggccgacgcccgcaaguucgagaacgacgucugggaccaguucaaggaccucugccacaugcacaccggcaucgucgucgagaagaagaagaagggcggcaagcaggagaugaccccccacugcgcccuccucgacugcaucauguucgacgccgccgucuccggcggccucaacguccccacccuccgcgccguccuccccaccgacauggucuuccgcaccaucaccaccaaggucguccucugaggacuagucccuguucccagagcccacuuuuuuuucuuuuuuugaaauaaaauagccugucuuucagaucuaaaaaaaaaaaaaaaaaaaaaaaaaaaaaaaaaaaaaaaaaaaaaaaaaaaaaaaaaaaaaaaaugcaucccccccccccccccccccccccccccccccaaaggcucuuuucagagccaccagaauu

SEQ ID NO: 10153 - RNA, 2005 nt, Artificial Sequence; identical to SEQ ID NO: 10147
  mRNA product Design a-2 comprising derived and/or modified sequence from LASV(Pinneo-NIG-1969;Clade I)__AIT17837__NP (opt2)

SEQ ID NO: 10154 - RNA, 2005 nt, Artificial Sequence
  mRNA product Design a-2 comprising derived and/or modified sequence from LASV(ISTH0009-NIG-2011;Clade II)__AIT17405__NP (opt2)
gggagaguccgcucagccagguugcagaagcggcuuagcguguguccuaaucuucucucugcguguagguaggccugugccgcaaacaagcuuaccauguccgucuccaaggaggucaaguccuuccucuggacccagucccuccgccgcgagcucuccggcuacugcuccaacaucaagcuccaggucgucaaggacgcccaggcccuccuccacggccucgacuucuccgaggucuccaacguccagcgccucaugcgcaagcagaagcgcgacgacuccgaccucaagcgccuccgcgaccucaaccaggccgucaacaaccucgucgagcucaaguccacccagcagaaguccauccuccgcgucggcacccucaccuccgacgaccuccucacccucgccgccgaccucgagaagcucaaguccaaggucauccgcaccgagcgcccccucuccuccggcgucuacaugggcaaccucuccacccagcagcucgagcagcgccgcgcccuccucaacaugaucggcauggucggcggcgcccagggcacccagcccggccgcgacggcgucguccgcgucugggacgucaagaaccccgaccuccucaacaaccaguucggcaccaugcccucccucacccucgccugccucaccaagcagggccaggucgaccucaacgacgccguccucgcccucaccgaccucggccucaucuacaccgccaaguaccccaacuccuccgaccucgaccgccucucccagucccaccccauccucaacauggucgacaucaagaaguccucccucaacaucuccggcuacaacuucucccucggcgccgccgucaaggccggcgccugcaugcucgacggcggcaacaugcucgagaccaucaaggucaccccccagaccauggacggcauccucaaguccauccucaaggucaagcgcucccucggcauguucgucuccgacacccccggcgagcgcaaccccuacgagaacauccucuacaagaucugccucuccggcgacggcuggcccuacaucgccucccgcaccuccaucgucggccgcgccugggagaacaccaccgucgaccucgaguccgacggcaagccccagaaggucggcuccgccggcuccaacaagucccuccaguccgccggcuuccccaccggccucaccuacucccagcucaugacccucaaggacuccaugaugcagcucgaccccuccgccaagaccuggaucgacaucgagggccgccccgaggaccccgucgagaucgcccucuaccagcccauguccggcugcuacauccacuucuuccgcgagcccaccgaccucaagcaguucaagcaggacgccaaguacucccacggcaucgacgucgccgaccucuuccccgcccagcccggccucaccuccgccgucaucgaggcccucccccgcaacaugguccucaccugccagggcuccgacgacaucaagcgccuccucgacucccagggccgccgcgacaucaagcucaucgacaucgcccucuccaaggccgacucccgccgcuucgagaacgccgucugggaccagugcaaggaccucugccacaugcacaccggcgucgucgucgagaagaagaagcgcggcggcaaggaggagaucaccccccacugcgcccucauggacugcaucauguacgacgccgccgucuccggcggccucaacauccccguccuccgcgccguccucccccgcgacauggucuuccgcaccuccucccccaaggucguccucugaggacuagucccuguucccagagcccacuuuuuuuucuuuuuuugaaauaaaauagccugucuuucagaucuaaaaaaaaaaaaaaaaaaaaaaaaaaaaaaaaaaaaaaaaaaaaaaaaaaaaaaaaaaaaaaaaugcaucccccccccccccccccccccccccccccccaaaggcucuuuucagagccaccagaauu

SEQ ID NO: 10155 - RNA, 2005 nt, Artificial Sequence
  mRNA product Design a-2 comprising derived and/or modified sequence from LASV(ISTH2010-NIG-2012;Clade II)__AIT17483__NP (opt2)
gggagaguccgcucagccagguugcagaagcggcuuagcguguguccuaaucuucucucugcguguagguaggccugugccgcaaacaagcuuaccauguccgccuccaaggaggucaaguccuuccucuggacccagucccuccgccgcgagcucuccggcuacugcuccaacaucaagcuccaggucgucaaggacgcccaggcccuccuccacggccucgacuucuccgaggucuccaacguccagcgccucaugcgcaagcagaagcgcgacgacuccgaccucaagcgccuccgcgaccucaaccaggccgucaacaaccucgucgagcucaaguccacccagcagaaguccauccuccgcgucggcacccucaccuccgacgaccuccucacccucgccgccgaccucgagaagcucaaguccaaggucauccgcaccgagcgcccccucuccuccggcgucuacaugggcaaccucuccacccagcagcucgagcagcgccgcgcccuccucaaccucaucggcauggucggcggcgcccagggcacccagcccggccgcgacggcgucguccgcgucugggacgucaagaaccccgaccuccucaacaaccaguucggcaccaugcccucccucacccucgccugccucaccaagcagggccaggucgaccucaacgacgccguccucgcccucaccgaccucggccucaucuacaccgccaaguaccccaacuccuccgaccucgaccgccucucccagucccaccccauccucaacauggucgacaccaagaaguccucccucaacaucuccggcuucaacuucucccucggcgccgccgucaaggccggcgccugcaugcucgacggcggcaacaugcucgagaccaucaaggucaccccccagaccauggacggcauccucaaguccauccucaaggucaagaagucccucggcauguucgucuccgacacccccggcgagcgcaaccccuacgagaacauccucuacaagaucugccucuccggcgacggcuggcccuacaucgccucccgcaccuccaucgucggccgcgccugggagaacaccaccgucgaccucgaguccgacggcaagccccacaaggucggcaccgccggcuccaacaagucccuccaguccgccggcuuccccaccggccucaccuacucccagcucaugacccucaaggacuccaugaugcagcucgaccccuccgccaagaccuggaucgacaucgagggccgccccgaggaccccgucgagaucgcccucuaccagcccauguccggcugcuacauccacuucuuccgcgagcccaccgaccucaagcaguucaagcaggacgccaaguacucccacggcaucgacgucgccgaccucuuccccgcccagcccggccucaccuccgccgucaucgaggcccucccccgcaacaugguccucaccugccagggcuccgacgacaucaagcgccuccucgacucccagggccgccgcgacaucaagcucaucgacaucgcccucuccaaggccgacucccgccgcuucgagaacgccgucugggaccagugcaaggaccucugccacaugcacaccggcgucgucgucgagaagaagaagcgcggcggcaaggaggagaucaccccccacugcgcccucauggacugcaucauguacgacgccgccgucuccggcggccucaacauccccguccuccgcgccguccucccccgcgacauggucuuccgcaccuccucccccaaggucguccucugaggacuagucccuguucccagagcccacuuuuuuuucuuuuuuugaaauaaaauagccugucuuucagaucuaaaaaaaaaaaaaaaaaaaaaaaaaaaaaaaaaaaaaaaaaaaaaaaaaaaaaaaaaaaaaaaaugcaucccccccccccccccccccccccccccccccaaaggcucuuuucagagccaccagaauu

SEQ ID NO: 10156 - RNA, 2005 nt, Artificial Sequence
  mRNA product Design a-2 comprising derived and/or modified sequence from LASV(Lassa virus/H.sapiens-wt/NGA/2015/ISTH_0543;Clade II)__AVO03640__NP (opt2)
gggagaguccgcucagccagguugcagaagcggcuuagcguguguccuaaucuucucucugcguguagguaggccugugccgcaaacaagcuuaccauguccgccuccaaggaggucaaguccuuccucuggacccagucccuccgccgcgagcucuccggcuacugcuccaacaucaagcuccaggucgucaaggacgcccaggcccuccuccacggccucgacuucuccgaggucuccaacguccagcgccucaugcgcaagcagaagcgcgacgacuccgaccucaagcgccuccgcgaccucaaccaggccgucaacaaccucgucgagcucaaguccacccagcagaaguccauccuccgcgucggcacccucaccuccgacgaccuccucacccucgccgccgaccucgagaagcucaaguccaaggucauccgcaccgagcgcccccucuccuccggcgucuacaugggcaaccucuccacccagcagcucgagcagcgccgcgcccuccucaacaugaucggcauggucggcggcgcccagggcacccagcccggccgcgacggcgucguccgcgucugggacgucaagaaccccgaccuccucaacaaccaguucggcaccaugcccucccucacccucgccugccucaccaagcagggccaggucgaccucaacgacgccguccucgcccucaccgaccucggccucaucuacaccgccaaguaccccaacuccuccgaccucgaccgccucucccagucccaccccauccucaacauggucgacaccaagaaguccucccucaacaucuccggcuacaacuucucccucggcgccgccgucaaggccggcgccugcaugcucgacggcggcaacaugcucgagaccaucaaggucaccccccagaccauggacggcauccucaaguccauccucaaggucaagaagucccucggcauguucgucuccgacacccccggcgagcgcaaccccuacgagaacauccucuacaagaucugccucuccggcgacggcuggcccuacaucgccucccgcaccuccaucgucggccgcgccugggagaacaccaccgucgaccucgaguccgacggcaagccccagaaggucggcuccgccggcuccaacaagucccuccaguccgccggcuuccccaccggccucaccuacucccagcucaugacccucaaggacuccaugaugcagcucgaccccuccgccaagaccuggaucgacaucgagggccgccccgaggaccccgucgagaucgcccucuaccagcccauguccggcugcuacauccacuucuuccgcgagcccaccgaccucaagcaguucaagcaggacgccaaguacucccacggcaucgacgucgccgaccucuuccccgcccagcccggccucaccuccgccgucaucgaggcccucccccgcaacaugguccucaccugccagggcuccgacgacaucaagcgccuccucgacucccagggccgcaaggacaucaagcucaucgacaucgcccucuccaaggccgacucccgccgcuucgagaacgccgucugggaccagugcaaggaccucugccacaugcacaccggcgucgucgucgagaagaagaagcgcggcggcaaggaggagaucaccccccacugcgcccucauggacugcaucauguacgacgccgccgucuccggcggccucaacauccccguccuccgcgccguccucccccgcgacauggucuuccgcaccuccucccccaaggucguccucugaggacuagucccuguucccagagcccacuuuuuuuucuuuuuuugaaauaaaauagccugucuuucagaucuaaaaaaaaaaaaaaaaaaaaaaaaaaaaaaaaaaaaaaaaaaaaaaaaaaaaaaaaaaaaaaaaugcaucccccccccccccccccccccccccccccccaaaggcucuuuucagagccaccagaauu

SEQ ID NO: 10157 - RNA, 2005 nt, Artificial Sequence
  mRNA product Design a-2 comprising derived and/or modified sequence from LASV(Lassa virus/H.sapiens-wt/NGA/2016/ISTH_0009;Clade II)__AVO03572__NP (opt2)
gggagaguccgcucagccagguugcagaagcggcuuagcguguguccuaaucuucucucugcguguagguaggccugugccgcaaacaagcuuaccauguccgccuccaaggaggucaaguccuuccucuggacccagucccuccgccgcgagcucuccggcuacugcuccaacaucaagcuccaggucgucaaggacgcccaggcccuccuccacggccucgacuucuccgaggucuccaacguccagcgccucaugcgcaagcagaagcgcgacgacuccgaccucaagcgccuccgcgaccucaaccaggccgucaacaaccucgucgagcucaaguccacccagcagaaguccauccuccgcgucggcacccucaccuccgacgaccuccucacccucgccgccgaccucgagaagcucaaguccaaggucauccgcaccgagcgcccccucuccuccggcgucuacaugggcaaccucuccacccagcagcucgagcagcgccgcgcccuccucaacaugaucggcauggucggcggcgcccagggcacccagcccggccgcgacggcgucguccgcgucugggacgucaagaaccccgaccuccucaacaaccaguucggcaccaugcccucccucacccucgccugccucaccaagcagggccaggucgaccucaacgacgccguccucgcccucaccgaccucggccucaucuacaccgccaaguaccccaacuccuccgaccucgaccgccucucccagucccaccccauccucaacauggucgacaccaagaaguccucccucaacaucuccggcuacaacuucucccucggcgccgccgucaaggccggcgccugcaugcucgacggcggcaacaugcucgagaccaucaaggucaccccccagaccauggacggcauccucaaguccauccucaaggucaagaagucccucggcauguucgucuccgacacccccggcgagcgcaaccccuacgagaacauccucuacaagaucugccucuccggcgacggcuggcccuacaucgccucccgcaccuccaucgucggccgcgccugggagaacaccaccgucgaccucgaguccgacggcaagccccagaaggucggcuccgccggcuccaacaagucccuccaguccgccggcuuccccaccggccucaccuacucccagcucaugacccucaaggacuccaugaugcagcucgaccccuccgccaagaccuggaucgacaucgagggccgccccgaggaccccgucgagaucgcccucuaccagcccauguccggcugcuacauccacuucuuccgcgagcccaccgaccucaagcaguucaagcaggacgccaaguacucccacggcaucgacgucgccgaccucuuccccgcccagcccggccucaccuccgccgucaucgaggcccucccccgcaacaugguccucaccugccagggcuccgacgacaucaagcgccuccucgacucccagggccgccgcgacaucaagcucaucgacaucgcccucuccaaggccgacucccgccgcuucgagaacgccgucugggaccagugcaaggaccucugccacaugcacaccggcgucgucgucgagaagaagaagcgcggcggcaaggaggagaucaccccccacugcgcccucauggacugcaucauguacgacgccgccgucuccggcggccucaacauccccguccuccgcgccguccucccccgcgacauggucuuccgcaccuccucccccaaggucguccucugaggacuagucccuguucccagagcccacuuuuuuuucuuuuuuugaaauaaaauagccugucuuucagaucuaaaaaaaaaaaaaaaaaaaaaaaaaaaaaaaaaaaaaaaaaaaaaaaaaaaaaaaaaaaaaaaaugcaucccccccccccccccccccccccccccccccaaaggcucuuuucagagccaccagaauu

SEQ ID NO: 10158 - RNA, 2005 nt, Artificial Sequence
  mRNA product Design a-2 comprising derived and/or modified sequence from LASV(Lassa virus/H.sapiens-wt/NGA/2016/ISTH_0017;Clade II)__AVO03568__NP (opt2)
gggagaguccgcucagccagguugcagaagcggcuuagcguguguccuaaucuucucucugcguguagguaggccugugccgcaaacaagcuuaccauguccgccuccaaggaggucaaguccuuccucuggacccagucccuccgccgcgagcucuccggcuacugcuccuccaucaagcuccaggucgucaaggacgcccaggcccuccuccacggccucgacuucuccgaggucuccaacguccagcgccucaugcgcaagcagaagcgcgacgacuccgaccucaagcgccuccgcgaccucaaccaggccgucaacaaccucgucgagcucaaguccacccagcagaaguccauccuccgcgucggcacccucaccuccgacgaccuccucacccucgccgccgaccucgagaagcucaaguccaaggucauccgcaccgagcgcccccucuccuccggcgucuacaugggcaaccucuccacccagcagcucgagcagcgccgcgcccuccucaacaugaucggcauggccggcggcgcccagggcacccagcccggccgcgacggcgucguccgcgucugggacgucaagaaccccgaccuccucaacaaccaguucggcaccaugcccucccucacccucgccugccucaccaagcagggccaggucgaccucaacgacgccguccucgcccucaccgaccucggccucaucuacaccgccaaguaccccaacuccuccgaccucgaccgccucucccagucccaccccauccucaacauggucgacaccaagaaguccucccucaacaucuccggcuacaacuucucccucggcgccgccgucaaggccggcgccugcaugcucgacggcggcaacaugcucgagaccaucaaggucaccccccagaccauggacggcauccucaaguccauccucaaggucaagcgcucccucggcauguucgucuccgacgcccccggcgagcgcaaccccuacgagaacauccucuacaagaucugccucuccggcgacggcuggcccuacaucgccucccgcaccuccaucgucggccgcgccugggagaacaccaccgucgaccucgaguccgacggcaagccccagaaggucggcgccaccggcuccaacaagucccuccaguccgccggcuuccccaccggccucaccuacucccagcucaugacccucaaggacuccaugaugcagcucgaccccuccgccaagaccuggaucgacaucgagggccgccccgaggaccccgucgaggucgcccucuaccagcccgucuccggcugcuacauccacuucuuccgcgagcccaccgaccucaagcaguucaagcaggacgccaaguacucccacggcaucgacgucgccgaccucuuccccgcccagcccggccucaccuccgccgucaucgaggcccucccccgcaacaugguccucaccugccagggcuccgacgacaucaagaagcuccucgacucccagggccgcaaggacaucaagcucaucgacaucgcccucuccaaggccgacucccgccgcuucgagaacgccgucugggaccagugcaaggaccucugccacaugcacaccggcgucgucgucgagaagaagaagcgcggcggcaaggaggagaucaccccccacugcgcccucauggacugcaucauguacgacgccgccgucuccggcggccucaacauccccguccuccgcgccguccucccccgcgacauggucuuccgcaccuccucccccaaggucguccucugaggacuagucccuguucccagagcccacuuuuuuuucuuuuuuugaaauaaaauagccugucuuucagaucuaaaaaaaaaaaaaaaaaaaaaaaaaaaaaaaaaaaaaaaaaaaaaaaaaaaaaaaaaaaaaaaaugcaucccccccccccccccccccccccccccccccaaaggcucuuuucagagccaccagaauu

SEQ ID NO: 10159 - RNA, 2005 nt, Artificial Sequence
  mRNA product Design a-2 comprising derived and/or modified sequence from LASV(Lassa virus/H.sapiens-wt/NGA/2018/ISTH_0959;Clade II)__AVV65100__NP (opt2)
gggagaguccgcucagccagguugcagaagcggcuuagcguguguccuaaucuucucucugcguguagguaggccugugccgcaaacaagcuuaccauguccgccuccaaggaggucaaguccuuccucuggacccagucccuccgccgcgagcucuccggcuacugcuccaacaucaagcuccaggucgucaaggacgcccaggcccuccuccacggccucgacuucuccgaggucuccaacguccagcgccucaugcgcaagcagaagcgcgacgacuccgaccucaagcgccuccgcgaccucaaccaggccgucaacaaccucgucgagcucaaguccacccagcagaaguccauccuccgcgucggcacccucaccuccgacgaccuccucacccucgccgccgaccucgagaagcucaaguccaaggucauccgcaccgagcgcccccucuccuccggcgucuacaugggcaaccucuccacccagcagcucgagcagcgccgcgcccuccucaaccucaucggcauggucggcggcgcccagggcacccagcccggccgcgacggcgucguccgcgucugggacgucaagaaccccgaccuccucaacaaccaguucggcaccaugcccucccucacccucgccugccucaccaagcagggccaggucgaccucaacgacgucguccucgcccucaccgaccucggccucaucuacaccgccaaguaccccaacuccuccgaccucgaccgccucucccagucccaccccauccucaacauggucgacaccaagaaguccucccucaacaucuccggcuucaacuucucccucggcgccgccgucaaggccggcgccugcaugcucgacggcggcaacaugcucgagaccaucaaggucaccccccagaccauggacggcauccucaaguccauccucaaggucaagaagucccucggcauguucgucuccgacacccccggcgagcgcaaccccuacgagaacauccucuacaagaucugccucuccggcgacggcuggcccuacaucgccucccgcaccuccaucgucggccgcgccugggagaacaccaccgucgaccucgaguccgacggcaagccccacaaggucggcaccgccggcuccaacaagucccuccaguccgccggcuuccccaccggccucaccuacucccagcucaugacccucaaggacuccaugaugcagcucgaccccuccgccaagaccuggaucgacaucgagggccgccccgaggaccccgucgagaucgcccucuaccagcccauguccggcugcuacauccacuucuuccgcgagcccaccgaccucaagcaguucaagcaggacgccaaguacucccacggcaucgacgucgccgaccucuuccccgcccagcccggccucaccuccgccgucaucgaggcccucccccgcaacaugguccucaccugccagggcuccgacgacaucaagcgccuccucgacucccagggccgcaaggacaucaagcucaucgacaucgcccucuccaagaccgacucccgccgcuucgagaacgccgucugggaccagugcaaggaccucugccacaugcacaccggcgucgucgucgagaagaagaagcgcggcggcaaggaggagaucaccccccacugcgcccucauggacugcaucauguacgacgccgccgucuccggcggccucaacauccccguccuccgcgccguccucccccgcgacauggucuuccgcaccuccucccccaaggucguccucugaggacuagucccuguucccagagcccacuuuuuuuucuuuuuuugaaauaaaauagccugucuuucagaucuaaaaaaaaaaaaaaaaaaaaaaaaaaaaaaaaaaaaaaaaaaaaaaaaaaaaaaaaaaaaaaaaugcaucccccccccccccccccccccccccccccccaaaggcucuuuucagagccaccagaauu

SEQ ID NO: 10160 - RNA, 2005 nt, Artificial Sequence
  mRNA product Design a-2 comprising derived and/or modified sequence from LASV(LASV003-NIG-2008;Clade II)__AIT17581__NP (opt2)
gggagaguccgcucagccagguugcagaagcggcuuagcguguguccuaaucuucucucugcguguagguaggccugugccgcaaacaagcuuaccauguccgccuccaaggaggucaaguccuuccucuggacccagucccuccgccgcgagcucuccggcuacugcuccuccaucaagcuccaggucgucaaggacgcccaggcccuccuccacggccucgacuucuccgaggucuccaacguccagcgccucaugcgcaagcagaagcgcgacgacuccgaccucaagcgccuccgcgaccucaaccaggccgucaacaaccucgucgagcucaaguccacccagcagaaguccguccuccgcgucggcacccucaccuccgacgaccuccucacccucgccgccgaccucgagaagcucaaguccaaggucauccgcaccgagcgcccccucuccuccggcgucuacaugggcaaccucuccgcccagcagcucgagcagcgccgcacccuccucaacaugaucggcauggucggcggcgcccagggcacccagcccggccgcgacggcgucguccgcgucugggacgucaagaaccccgaccuccucaacaaccaguucggcaccaugcccucccucacccucgccugccucaccaagcagggccaggucgaccucaacgacgucguccucgcccucaccgaccucggccucaucuacaccgccaaguaccccaacuccuccgaccucgaccgccucucccagucccaccccauccucuccauggucgacaccaagaaguccucccucaacaucuccggcuacaacuucucccucggcgccgccgucaaggccggcgccugcaugcucgacggcggcaacaugcucgagaccaucaaggucaccccccagaccauggacggcauccucaaguccauccucaaggucaagaagucccucggcauguucgucuccgacacccccggcgagcgcaaccccuacgagaacauccucuacaagaucugccucuccggcgacggcuggcccuacaucgccucccgcaccuccaucgucggccgcgccugggagaacaccaccgucgaccucgaguccgacggcaagccccagaaggucggcaccgccggcuccaacaagucccuccaguccgccggcuuccccaccggccucaccuacucccagcucaugacccucaaggacuccaugaugcagcucgaccccuccgccaagaccuggaucgacaucgagggccgccccgaggaccccgucgagaucgcccucuaccagcccauguccggcugcuacauccacuucuuccgcgagcccaccgaccucaagcaguucaagcaggacgccaaguacucccacggcaucgacgucaccgaccucuuccccgcccagcccggccucaccuccgccgucaucgaggcccucccccgcaacaugguccucaccugccagggcuccgacgacaucaagcgccuccucgacucccagggccgccgcgacaucaagcucaucgacaucgcccucuccaaggccgacucccgccgcuucgagaacgccgucugggaccagugcaaggaccucugccacaugcacaccggcgucgucgucgagaagaagaagcgcggcggcaaggaggagaucaccccccacugcgcccucauggacugcaucauguacgacgccgccgucuccggcggccucaacauccccguccuccgcgccguccucccccgcgacauggucuuccgcaccuccucccccaaggucguccucugaggacuagucccuguucccagagcccacuuuuuuuucuuuuuuugaaauaaaauagccugucuuucagaucuaaaaaaaaaaaaaaaaaaaaaaaaaaaaaaaaaaaaaaaaaaaaaaaaaaaaaaaaaaaaaaaaugcaucccccccccccccccccccccccccccccccaaaggcucuuuucagagccaccagaauu

SEQ ID NO: 10161 - RNA, 2005 nt, Artificial Sequence
  mRNA product Design a-2 comprising derived and/or modified sequence from LASV(LASV035-NIG-2009;Clade II)__AIT17589__NP (opt2)
gggagaguccgcucagccagguugcagaagcggcuuagcguguguccuaaucuucucucugcguguagguaggccugugccgcaaacaagcuuaccauguccgccuccaaggaggucaaguccuuccucuggacccagucccuccgccgcgagcucuccggcuacugcuccuccaucaagcuccaggucgucaaggacgcccaggcccuccuccacggccucgacuucuccgaggucuccaacguccagcgccucaugcgcaagcagaagcgcgacgacuccgaccucaagcgccuccgcgaccucaaccaggccgucaacaaccucgucgagcucaaguccacccagcagaaguccauccuccgcgucggcacccucaccuccgacgaccuccucacccucgccgccgaccucgagaagcucaaguccaaggucauccgcaccgagcgcccccucuccuccggcgucuacaugggcaaccucuccgcccagcagcucgagcagcgccgcgcccuccucaacaugaucggcauggucggcggcgcccagggcacccagcccggccgcgacggcgucguccgcgucugggacgucaagaaccccgaccuccucaacaaccaguucggcaccaugcccucccucacccucgccugccucaccaagcagggccaggucgaccucaacgacgccguccucgcccucaccgaccucggccucaucuacaccgccaaguaccccaacuccuccgaccucgaccgccucucccagucccaccccauccucaacauggucgacaccaagaaguccucccucaacaucuccggcuacaacuucucccucggcgccgccgucaaggccggcgccugcaugcucgacggcggcaacaugcucgagaccaucaaggucaccccccagaccauggacggcauccucaaguccauccucaaggucaagcgcucccucggcauguucgucuccgacacccccggcgagcgcaaccccuacgagaacauccucuacaagaucugccucuccggcgacggcuggcccuacaucgccucccgcaccuccaucgucggccgcgccugggagaacaccaccgucgaccucgaguccgacggcaagccccagaaggucggcaccaccggcuccaacaagucccuccaguccgccggcuuccccaccggccucaccuacucccagcucaugacccucaaggacuccaugaugcagcucgaccccuccgccaagaccuggaucgacaucgagggccgccccgaggaccccgucgagaucgcccucuaccagcccauguccggcugcuacauccacuucuuccgcgagcccaccgaccucaagcaguucaagcaggacgccaaguacucccacggcaucgacgucgccgaccucuuccccgcccagcccggccucaccuccgccgucaucgaggcccucccccgcaacaugguccucaccugccagggcuccgacgacaucaagaagcuccucgacucccagggccgccgcgacaucaagcucaucgacaucgcccucuccaaggccgacucccgcaaguucgagaacgccgucugggaccagugcaaggaccucugccacaugcacaccggcgucgucgucgagaagaagaagcgcggcggcaaggaggagaucaccccccacugcgcccucauggacugcaucauguacgacgccgccgucuccggcggccucaacauccccguccuccgcgccguccucccccgcgacauggucuuccgcaccuccucccccaaggucguccucugaggacuagucccuguucccagagcccacuuuuuuuucuuuuuuugaaauaaaauagccugucuuucagaucuaaaaaaaaaaaaaaaaaaaaaaaaaaaaaaaaaaaaaaaaaaaaaaaaaaaaaaaaaaaaaaaaugcaucccccccccccccccccccccccccccccccaaaggcucuuuucagagccaccagaauu

SEQ ID NO: 10162 - RNA, 2005 nt, Artificial Sequence
  mRNA product Design a-2 comprising derived and/or modified sequence from LASV(LASV1000-NIG-2009;Clade II)__AIT17783__NP (opt2)
gggagaguccgcucagccagguugcagaagcggcuuagcguguguccuaaucuucucucugcguguagguaggccugugccgcaaacaagcuuaccauguccgccuccaaggaggucaaguccuuccucuggacccagucccuccgccgcgagcucuccggcuacugcuccaacaucaagcuccaggucgucaaggacgcccaggcccuccuccacggccucgacuucuccgaggucuccaacguccagcgccucaugcgcaagcagaagcgcgacgacuccgaccucaagcgccuccgcgaccucaaccaggccgucaacaaccucgucgagcucaaguccacccagcagaaguccauccuccgcgucggcacccucaccuccgacgaccuccucacccucgccgccgaccucgagaagcucaaguccaaggucauccgcaccgagcgcccccucuccuccggcgucuacaugggcaaccucuccacccagcagcucgagcagcgccgcgcccuccucaacaugaucggcauggucggcggcgcccagggcacccagcccggccgcgacggcgucguccgcgucugggacgucaagaaccccgaccuccucaacaaccaguucggcaccaugcccucccucacccucgccugccucaccaagcagggccaggucgaccucaacgacgucguccucgcccucaccgaccucggccucaucuacaccgccaaguaccccaacuccuccgaccucgaccgccucucccagucccaccccauccucaacauggucgacaccaagaaguccucccucaacaucuccggcuacaacuucucccucggcgccgccgucaaggccggcgccugcaugcucgacggcggcaacaugcucgagaccaucaaggucaccccccagaccauggacggcauccucaaguccauccucaaggucaagaagucccucggcauguucgucuccgacacccccggcgagcgcaaccccuacgagaacauccucuacaagaucugccucuccggcgacggcuggcccuacaucgccucccgcaccuccaucgucggccgcgccugggagaacaccaccgucgaccucgaguccgacggcaagccccagaaggucggcaccgccggcuccaacaagucccuccaguccgccggcuuccccaccggccucaccuacucccagcucaugacccucaaggacuccaugaugcagcucgaccccuccgccaagaccuggaucgacaucgagggccgccccgaggaccccgucgagaucgcccucuaccagcccgucuccggcugcuacauccacuucuuccgcgagcccaccgaccucaagcaguucaagcaggacgccaaguacucccacggcaucgacgucgccgaccucuuccccgcccagcccggccucaccuccgccgucaucgaggcccucccccgcaacaugguccucaccugccagggcuccgacgacaucaagcgccuccucgacucccagggccgccgcgacaucaagcucaucgacaucgcccucuccaaggccgacucccgccgcuucgagaacgccgucugggaccagugcaaggaccucugccacaugcacaccggcgucgucgucgagaagaagaagcgcggcggcaaggaggagaucaccccccacugcgcccucauggacugcaucauguacgacgccgccgucuccggcggccucaacauccccguccuccgcgccguccucccccgcgacauggucuuccgcaccuccucccccaaggucguccucugaggacuagucccuguucccagagcccacuuuuuuuucuuuuuuugaaauaaaauagccugucuuucagaucuaaaaaaaaaaaaaaaaaaaaaaaaaaaaaaaaaaaaaaaaaaaaaaaaaaaaaaaaaaaaaaaaugcaucccccccccccccccccccccccccccccccaaaggcucuuuucagagccaccagaauu

SEQ ID NO: 10163 - RNA, 2005 nt, Artificial Sequence
  mRNA product Design a-2 comprising derived and/or modified sequence from LASV(LASV221-NIG-2010;Clade II)__AIT17625__NP (opt2)
gggagaguccgcucagccagguugcagaagcggcuuagcguguguccuaaucuucucucugcguguagguaggccugugccgcaaacaagcuuaccauguccgccuccaaggaggucaaguccuuccucuggacccagucccuccgccgcgagcucuccggcuacugcuccuccaucaagcuccaggucgucaaggacgcccaggcccuccuccacggccucgacuucuccgaggucuccaacguccagcgccucaugcgcaagcagcgccgcgacgacuccgaccucaagcgccuccgcgaccucaaccaggccgucaacaaccucgucgagcucaaguccacccagcagaaguccauccuccgcgucggcacccucaccuccgacgaccuccucacccucgccgccgaccucgagaagcucaaguccaaggucauccgcaccgagcgcccccucuccuccggcgucuacaugggcaaccucuccacccagcagcucgagcagcgccgcgcccuccucaacaugaucggcauggucggcggcgcccagggcacccagcccggccgcgacggcgucguccgcgucugggacgucaagaaccccgaccuccucaacaaccaguucggcaccaugcccucccucacccucgccugccucaccaagcagggccaggucgaccucaacgacgccguccucgcccucaccgaccucggccucaucuacaccgccaaguaccccaacuccuccgaccucgaccgccucucccagucccaccccauccucaacauggucgacaccaagaaguccucccucaacaucuccggcuacaacuucucccucggcgccgccgucaaggccggcgccugcaugcucgacggcggcaacaugcucgagaccaucaaggucaccccccagaccgucgacggcauccucaaguccauccucaaggucaagcgcucccucggcauguucgucuccgacacccccggcgagcgcaaccccuacgagaacauccucuacaagaucugccucuccggcgacggcuggcccuacaucgccucccgcaccuccaucgucggccgcgccugggagaacaccaccgucgaccucgaguccgacggcaagccccagaaggucggcaccgccggcuccaacaagucccuccaguccgccggcuuccccaccggccucaccuacucccagcucaugacccucaaggacuccaugaugcagcucgaccccuccgccaagaccuggaucgacaucgagggccgccccgaggaccccgucgagaucgcccucuaccagcccauguccggcugcuacauccacuucuuccgcgagcccaccgaccucaagcaguucaagcaggacgccaaguacucccacggcaucgacgucgccgaccucuuccccgcccagcccggccucaccuccgccgucaucgaggcccucccccgcaacaugguccucaccugccagggcuccgacgacaucaagcgccuccucgacucccagggccgccgcgacaucaagcucaucgacaucgcccucuccaaggccgacucccgcaaguucgagaacgccgucugggaccagugcaaggaccucugccacaugcacaccggcgucgucgucgagaagaagaagcgcggcggcaaggaggagaucaccccccacugcgcccucauggacugcaucauguacgacgccgccgucuccggcggccucaacauccccguccuccgcgccguccucccccgcgacauggucuuccgcaccuccucccccaaggucguccucugaggacuagucccuguucccagagcccacuuuuuuuucuuuuuuugaaauaaaauagccugucuuucagaucuaaaaaaaaaaaaaaaaaaaaaaaaaaaaaaaaaaaaaaaaaaaaaaaaaaaaaaaaaaaaaaaaugcaucccccccccccccccccccccccccccccccaaaggcucuuuucagagccaccagaauu

SEQ ID NO: 10164 - RNA, 2005 nt, Artificial Sequence
  mRNA product Design a-2 comprising derived and/or modified sequence from LASV(LASV237-NIG-2010;Clade II)__AIT17639__NP (opt2)
gggagaguccgcucagccagguugcagaagcggcuuagcguguguccuaaucuucucucugcguguagguaggccugugccgcaaacaagcuuaccauguccgccuccaaggaggucaaguccuuccucuggacccagucccuccgccgcgagcucuccggcuacugcuccaacaucaagcuccaggucgucaaggacgcccaggcccuccuccacggccucgacuucuccgaggucuccaacguccagcgccucaugcgcaagcagaagcgcgacgacuccgaccucaagcgccuccgcgaccucaaccaggccgucaacaaccucgucgagcucaaguccacccagcagaaguccauccuccgcgucggcacccucaccuccgacgaccuccucacccucgccgccgaccucgagaagcucaaguccaaggucauccgcaccgagcgcccccucuccuccggcgucuacaugggcaaccucuccacccagcagcucgagcagcgccgcgcccuccucaacaugaucggcauggucggcggcgcccagggcacccagcccggccgcgacggcgucguccgcgucugggacgucaagaaccccgaccuccucaacaaccaguucggcaccaugcccucccucacccucgccugccucaccaagcagggccaggucgaccucaacgacgccguccucgcccucaccgaccucggccucaucuacaccgccaaguaccccaacuccuccgaccucgaccgccucucccagucccaccccauccucaacauggucgacaucaagaaguccucccucaacaucuccggcuacaacuucucccucggcgccgccgucaaggccggcgccugcaugcucgacggcggcaacaugcucgagaccaucaaggucaccccccagaccauggacggcauccucaaguccauccucaaggucaagcgcucccucggcauguucgucuccgacacccccggcgagcgcaaccccuacgagaacauccucuacaagaucugccucuccggcgacggcuggcccuacaucgccucccgcaccuccaucgucggccgcgccugggagaacaccaccgucgaccucgaguccgacggcaagccccagaaggucggcuccgccggcuccaacaagucccuccaguccgccggcuuccccaccggccucaccuacucccagcucaugacccucaaggacuccaugaugcagcucgaccccuccgccaagaccuggaucgacaucgagggccgccccgaggaccccgucgagaucgcccucuaccagcccauguccggcugcuacauccacuucuuccgcgagcccaccgaccucaagcaguucaagcaggacgccaaguacucccacggcaucgacgucgccgaccucuuccccgcccagcccggccucaccuccgccgucaucgaggcccucccccgcaacaugguccucaccugccagggcuccgacgacaucaagcgccuccucgacucccagggccgccgcgacaucaagcucaucgacaucgcccucuccaaggccgacucccgccgcuucgagaacgccgucugggaccagugcaaggaccucugccacaugcacaccggcgucgucgucgagaagaagaagcgcggcggcaaggaggagaucaccccccacugcgcccucauggacugcaucauguacgacgccgccgucuccggcggccucaacauccccguccuccgcgccguccucccccgcgacauggucuuccgcaccuccucccccaaggucguccucugaggacuagucccuguucccagagcccacuuuuuuuucuuuuuuugaaauaaaauagccugucuuucagaucuaaaaaaaaaaaaaaaaaaaaaaaaaaaaaaaaaaaaaaaaaaaaaaaaaaaaaaaaaaaaaaaaugcaucccccccccccccccccccccccccccccccaaaggcucuuuucagagccaccagaauu

SEQ ID NO: 10165 - RNA, 2005 nt, Artificial Sequence
  mRNA product Design a-2 comprising derived and/or modified sequence from LASV(LASV253-NIG-2011;Clade II)__AIT17671__NP (opt2)
gggagaguccgcucagccagguugcagaagcggcuuagcguguguccuaaucuucucucugcguguagguaggccugugccgcaaacaagcuuaccauguccgccuccaaggaggucaaguccuuccucuggacccagucccuccgccgcgagcucuccggcuacugcuccuccaucaagcuccaggucgucaaggacgcccaggcccuccuccacggccucgacuucuccgaggucuccaacguccagcgccucaugcgcaagcagaagcgcgacgacuccgaccucaagcgccuccgcgaccucaaccaggccgucaacaaccucgucgagcucaaguccacccagcagaaguccguccuccgcgucggcacccucaccuccgacgaccuccucacccucgccgccgaccucgagaagcucaaguccaaggucauccgcaccgagcgcccccucuccuccggcgucuacaugggcaaccucuccacccagcagcucgagcagcgccgcgcccuccucaacaugaucggcauggucggcggcgcccagggcacccagcccggccgcgacggcgucguccgcgucugggacgucaagaaccccgaccuccucaacaaccaguucggcaccaugcccucccucacccucgccugccucaccaagcagggccaggucgaccucaacgacgucguccucgcccucaccgaccucggccucaucuacaccgccaaguaccccaacuccuccgaccucgaccgccucucccagucccaccccauccucaacauggucgacaccaagaaguccucccucaacaucuccggcuacaacuucucccucggcgccgccgucaaggccggcgccugcaugcucgacggcggcaacaugcucgagaccaucaaggucaccccccagaccauggacggcauccucaaguccauccucaaggucaagaagucccucggcauguucgucuccgacacccccggcgagcgcaaccccuacgagaacauccucuacaagaucugccucuccggcgacggcuggcccuacaucgccucccgcaccuccaucgucggccgcgccugggagaacaccaccgucgaccucgaguccgacggcaagccccagaaggucggcaccgccggcuccaacaagucccuccaguccgccggcuuccccaccggccucaccuacucccagcucaugacccucaaggacuccaugaugcagcucgaccccuccgccaagaccuggaucgacaucgagggccgccccgaggaccccgucgagaucgcccucuaccagcccauguccggcugcuacauccacuucuuccgcgagcccaccgaccucaagcaguucaagcaggacgccaaguacucccacggcaucgacgucaccgaccucuuccccgcccagcccggccucaccuccgccgucaucgaggcccucccccgcaacaugguccucaccugccagggcuccgacgacaucaagcgccuccucgacucccagggccgccgcgacaucaagcucaucgacaucgcccucuccaaggccgacucccgccgcuucgagaacgccgucugggaccagugcaaggaccucugccacaugcacaccggcgucgucgucgagaagaagaagcgcggcggcaaggaggagaucaccccccacugcgcccucauggacugcaucauguacgacgccgccgucuccggcggccucaacauccccguccuccgcgccguccucccccgcgacauggucuuccgcaccuccucccccaaggucguccucugaggacuagucccuguucccagagcccacuuuuuuuucuuuuuuugaaauaaaauagccugucuuucagaucuaaaaaaaaaaaaaaaaaaaaaaaaaaaaaaaaaaaaaaaaaaaaaaaaaaaaaaaaaaaaaaaaugcaucccccccccccccccccccccccccccccccaaaggcucuuuucagagccaccagaauu

SEQ ID NO: 10166 - RNA, 2005 nt, Artificial Sequence
  mRNA product Design a-2 comprising derived and/or modified sequence from LASV(LASV254-NIG-2011;Clade II)__AIT17675__NP (opt2)
gggagaguccgcucagccagguugcagaagcggcuuagcguguguccuaaucuucucucugcguguagguaggccugugccgcaaacaagcuuaccauguccgccuccaaggaggucaaguccuuccucuggacccagucccuccgccgcgagcucuccggcuacugcuccuccaucaagcuccaggucgucaaggacgcccaggcccuccuccacggccucgacuucuccgaggucuccaacguccagcgccucaugcgcaagcagaagcgcgacgacuccgaccucaagcgccuccgcgaccucaaccaggccgucaacaaccucgucgagcucaaguccacccagcagaaguccguccuccgcgucggcacccucaccuccgacgaccuccucacccucgccgccgaccucgagaagcucaaguccaaggucauccgcaccgagcgcccccucuccuccggcgucuacaugggcaaccucuccacccagcagcucgagcagcgccgcgcccuccucaacaugaucggcauggucggcggcgcccagggcacccagcccggccgcgacggcgucguccgcgucugggacgucaagaaccccgaccuccucaacaaccaguucggcaccaugcccucccucacccucgccugccucaccaagcagggccaggucgaccucaacgacgccguccucgcccucaccgaccucggccucaucuacaccgccaaguaccccaacuccuccgaccucgaccgccucucccagucccaccccauccucaacauggucgacaccaagaaguccucccucaacaucuccggcuacaacuucucccucggcgccgccgucaaggccggcgccugcaugcucgacggcggcaacaugcucgagaccaucaaggucaccccccagaccauggacggcauccucaaguccauccucaaggucaagaagucccucggcauguucgucuccgacacccccggcgagcgcaaccccuacgagaacauccucuacaagaucugccucuccggcgacggcuggcccuacaucgccucccgcaccuccaucgucggccgcgccugggagaacaccaucgucgaccucgaguccgacggcaagccccagaaggucggcaccgccggcuccaacaagucccuccaguccgccggcuuccccaccggccucaccuacucccagcucaugacccucaaggacuccaugaugcagcucgaccccuccgccaagaccuggaucgacaucgagggccgccccgaggaccccgucgagaucgcccucuaccagcccauguccggcugcuacauccacuucuuccgcgagcccaccgaccucaagcaguucaagcaggacgccaaguacucccacggcaucgacgucgccgaccucuuccccgcccagcccggccucaccuccgccgucaucgaggcccucccccgcaacaugguccucaccugccagggcuccgacgacaucaagcgccuccucgacucccagggccgccgcgacaucaagcucaucgacaucgcccucuccaaggccgacucccgccgcuucgagaacgccgucugggaccagugcaaggaccucugccacaugcacaccggcgucgucgucgagaagaagaagcgcggcggcaaggaggagaucaccccccacugcgcccucauggacugcaucauguacgacgccgccgucuccggcggccucaacauccccguccuccgcgccguccucccccgcgacauggucuuccgcaccuccucccccaaggucguccucugaggacuagucccuguucccagagcccacuuuuuuuucuuuuuuugaaauaaaauagccugucuuucagaucuaaaaaaaaaaaaaaaaaaaaaaaaaaaaaaaaaaaaaaaaaaaaaaaaaaaaaaaaaaaaaaaaugcaucccccccccccccccccccccccccccccccaaaggcucuuuucagagccaccagaauu

SEQ ID NO: 10167 - RNA, 2005 nt, Artificial Sequence
  mRNA product Design a-2 comprising derived and/or modified sequence from LASV(Nig08-04;Clade II)__ADU56611__NP (opt2)
gggagaguccgcucagccagguugcagaagcggcuuagcguguguccuaaucuucucucugcguguagguaggccugugccgcaaacaagcuuaccauguccgccuccaaggaggucaaguccuuccucuggacccagucccuccgccgcgagcucuccggcuacugcuccaacaucaagcuccaggucgucaaggacgcccaggcccuccuccacggccucgacuucuccgaggucuccaacguccagcgccucaugcgcaagcagaagcgcgacgacggcgaccucaagcgccuccgcgaccucaaccaggccgucaacaaccucgucgagcucaaguccacccagcagaaguccguccuccgcgucggcacccucaccuccgacgaccuccucacccucgccgccgaccucgagaagcucaaguccaaggucauccgcaccgagcgcccccucuccuccggcgucuacaugggcaaccucuccacccagcagcucgagcagcgcaaggcccuccucuccaugaucggcauggucggcggcgcccagggcacccagcccggccgcgacggcgucguccgcgucugggacgucaagaaccccgaccuccucaacaaccaguucggcaccaugcccucccucacccucgccugccucaccaagcagggccaggucgaccucaacgacgccguccucgcccucaccgaccucggccucaucuacaccgccaaguaccccaacuccuccgaccucgaccgccucucccagucccaccccauccucaacauggucgacaccaagaaguccucccucaacaucuccggcuacaacuucucccucggcgccgccgucaaggccggcgccugcaugcucgacggcggcaacaugcucgagaccaucaaggucaccccccagaccauggacggcauccucaaguccauccucaaggucaagcgcucccucggcauguucgucuccgacacccccggcgagcgcaaccccuacgagaacauccucuacaagaucugccucuccggcgacggcuggcccuacaucgccucccgcaccuccaucgucggccgcgccugggagaacaccaccgucgaccucgaguccgacggcaagccccagaaggucggcaccgccggcuccaacaagucccuccaguccgccggcuuccccaccggccucaccuacucccagcucaugacccucaaggacuccaugaugcagcucgaccccuccgccaagaccuggaucgacaucgagggccgccccgaggaccccgucgagaucgcccucuaccagcccauguccggcugcuacauccacuucuuccgcgagcccaccgaccucaagcaguucaagcaggacgccaaguacucccacggcaucgacgucaccgaccucuucuccgcccagcccggccucaccuccgccgucaucgaggcccucccccgcaacaugguccucaccugccagggcuccgacgacaucaagaagcuccucgacucccagggccgccgcgacaucaagcucaucgacaucucccucaacaaggccgacucccgccgcuucgagaacgccgucugggaccagugcaaggaccucugccacaugcacaccggcgucgucgucgagaagaagaagcgcggcggcaaggaggagaucaccccccacugcgcccucauggacugcaucauguucgacgccgccgucuccggcggccucaacauccccauccuccgcgccguccucccccgcgacauggucuuccgcaccuccucccccaaggucguccucugaggacuagucccuguucccagagcccacuuuuuuuucuuuuuuugaaauaaaauagccugucuuucagaucuaaaaaaaaaaaaaaaaaaaaaaaaaaaaaaaaaaaaaaaaaaaaaaaaaaaaaaaaaaaaaaaaugcaucccccccccccccccccccccccccccccccaaaggcucuuuucagagccaccagaauu

SEQ ID NO: 10168 - RNA, 2008 nt, Artificial Sequence
  mRNA product Design a-2 comprising derived and/or modified sequence from LASV(GA391;Clade III)__AAA46284__NP (opt2)
gggagaguccgcucagccagguugcagaagcggcuuagcguguguccuaaucuucucucugcguguagguaggccugugccgcaaacaagcuuaccauguccgccuccaaggagguccgcuccugccucuggacccagucccuccgccgcgagcucuccggcuacugcuccaacaucaagcuccaggucgucaaggacgcccaggcccuccuccacggccucgacuucuccgaggucuccaacguccagcgccucaugcgcaagcagaagcgcgacgacggcgaccucaagcgccuccgcgaccucaaccaggccgucaacaaccucgucgagcucaaguccacccagcagaaguccguccuccgcgucggcacccucuccuccgacgaccuccucauccucgccgccgaccucgagaagcucaaguccaaggucacccgcaccgagcgcccccucuccuccggcgucuacaugggcaaccucuccucccagcagcucgaccagcgccgcgcccuccucaacaugaucggcaugaccggcgucuccggcggcggcaagggcgccuccaacggcaucguccgcgucugggacgucaagaacgccgagcuccucaacaaccaguucggcaccaugcccucccucacccucgccugccucaccaagcagggccaggucgaccucaacgacgccguccaggcccucaccgaccucggccucaucuacaccgccaaguaccccaacuccuccgaccucgaccgccucucccagucccaccccauccucaacaugaucgacaccaagaaguccucccucaacaucuccggcuacaacuucucccucggcgccgccgucaaggccggcgccugcaugcucgacggcggcaacaugcucgagaccaucaaggucuccccccagaccauggacggcauccucaaguccauccucaaggucaagaagucccucggcauguucgucuccgacacccccggcgagcgcaaccccuacgagaacauccucuacaagaucugccucuccggcgacggcugguccuacaucgccucccgcaccuccaucgucggccgcgccugggagaacaccgucgucgaccucgagcaggacaacaagccccagaagaucggcaacggcggcuccaacaagucccuccaguccgccggcuucgccgccggccucaucuacucccagcucaugacccucaaggacuucaagugcuucaaccucauccccaacgccaagaccuggauggacaucgagggccgccccgaggaccccgucgagaucgcccucuaccagcccuccuccggcugcuacguccacuucuuccgcgagcccaccgaccucaagcaguucaagcaggacgccaaguacucccacggccgcgacgucaccgaccucuucgccgcccagcccggccucaccuccgccgucaucgaggcccucccccgcaacauggucaucaccugccagggcuccgaggacauccgcaagcuccucgagucccagggccgccgcgacaucaagcucaucgacaucacccucuccaaggccgacucccgcaaguucgagaacgccgucugggaccaguucaaggaccucugccacaugcacaccggcgucgucgucgagaagaagaagcgcggcggcaaggaggagaucaccccccacugcgcccucauggacugcaucauguucgacgccgccgucuccggcggccucgacgccaagguccuccgcgucguccucccccgcgacauggucuuccgcaccuccacccccaaggucguccucugaggacuagucccuguucccagagcccacuuuuuuuucuuuuuuugaaauaaaauagccugucuuucagaucuaaaaaaaaaaaaaaaaaaaaaaaaaaaaaaaaaaaaaaaaaaaaaaaaaaaaaaaaaaaaaaaaugcaucccccccccccccccccccccccccccccccaaaggcucuuuucagagccaccagaauu

SEQ ID NO: 10169 - RNA, 2005 nt, Artificial Sequence
  mRNA product Design a-2 comprising derived and/or modified sequence from LASV(Nig08-A19;Clade III)__ADU56619__NP (opt2)
gggagaguccgcucagccagguugcagaagcggcuuagcguguguccuaaucuucucucugcguguagguaggccugugccgcaaacaagcuuaccauguccgccuccaaggaggucaaguccuuccucuggacccagucccuccgccgcgagcucuccggcuacugcuccaacaucaagcuccaggucgucaaggacgcccaggcccuccuccacggccucgacuucuccgaggucuccaacguccagcgccucaugcgcaagcagaagcgcgacgacggcgaccucaagcgccuccgcgaccucaaccaggccgucaacaaccucgucgagcucaaguccacccagcagaaguccguccuccgcgucggcacccucuccuccgacgaccuccucguccucgccgccgaccucgagaagcucaaguccaaggucguccgcaccgagcgcccccucuccuccggcaucuacaugggcaaccucuccucccagcagcucgaccagcgcaaggcccuccucaacaugaucggcaugaccggcggcaacggcggccgcaacaccaccuccgacggcaucguccgcgucugggacgucaagaacgccgagcuccucaacaaccaguucggcaccaugcccucccucacccucgccugccucaccaagcagggccaggucgaccucaacgacgccguccaggcccucaccgaccucggccucaucuacaccgccaaguaccccaacuccuccgaccucgaccgccucgcccagucccaccccauccucaacaugaucgacaccaagaaguccucccucaacaucuccggcuacaacuucucccucggcgccgccgucaaggccggcgccugcaugcucgacggcggcaacaugcucgagaccaucaaggucuccccccagaccauggacggcauccucaaguccauccucaaggucaagcgcucccucggcauguucaucuccgacacccccggcgagcgcaaccccuacgagaacauccucuacaagaucugccucuccggcgacggcuggcccuacaucgccucccgcaccuccaucgucggccgcgccugggagaacaccgucgucgaccucgaguccgacaacaagccccagaagaccggcaacggcggcuccaacaagucccuccaguccgccggcuucgccgccggccucaccuacucccagcucaugacccucaaggacuccaugcuccagcucgaccccaacgccaagaccuggauggacaucgagggccgccccgaggaccccgucgagaucgcccucuaccagcccuccuccggcugcuacauccacuucuuccgcgagcccaccgaccucaagcaguucaagcaggacgccaaguacucccacggcaucgacgucaccgaccucuucgccgcccagcccggccucaccuccgccgucaucgaggcccucccccgcaacauggucaucaccugccagggcuccgaggacauccgcaagcuccucgagucccagggccgccgcgacaucaagcucaucgacaucucccucuccaaggucgacucccgcaaguucgagaacgccgucugggaccaguucaaggaccucugccacaugcacaccggcaucgucgucgagaagaagaagcgcggcggcaaggaggagaucaccccccacugcgcccucauggacugcaucauguucgacgccgccgucuccggcggcgucgacgccaagguccuccgcgccguccucccccgcgacauggucuuccgcaccuccacccccaaggucguccucugaggacuagucccuguucccagagcccacuuuuuuuucuuuuuuugaaauaaaauagccugucuuucagaucuaaaaaaaaaaaaaaaaaaaaaaaaaaaaaaaaaaaaaaaaaaaaaaaaaaaaaaaaaaaaaaaaugcaucccccccccccccccccccccccccccccccaaaggcucuuuucagagccaccagaauu

SEQ ID NO: 10170 - RNA, 2005 nt, Artificial Sequence
  mRNA product Design a-2 comprising derived and/or modified sequence from LASV(G1180-SLE-2010;Clade IV)__AIT17169__NP (opt2)
gggagaguccgcucagccagguugcagaagcggcuuagcguguguccuaaucuucucucugcguguagguaggccugugccgcaaacaagcuuaccauguccgccuccaaggagaucaaguccuuccucuggacccagucccuccgccgcgagcucuccggcuacugcuccaacaucaagcuccaggucgucaaggacgcccaggcccuccuccacggccucgacuucuccgaggucuccaacguccagcgccucaugcgcaaggagcgccgcgacgacaacgaccucaagcgccuccgcgaccucaaccaggccgucaacaaccucgucgagcucaaguccacccagcagaaguccauccuccgcgucggcacccucaccuccgacgaccuccucauccucgccgccgaccucgagaagcucaaguccaaggucauccgcaccgagcgcccccucuccgccggcgucuacaugggcaaccucuccucccagcagcucgaccagcgccgcgcccuccucuccaugaucggcauguccuccggcaaccagcgcgcccaggccggccgcgacggcgucguccgcgucugggacgucaagaacgucgagcuccucaacaaccaguucggcaccaugcccucccucacccucgccugccucaccaagcagggccaggucgaccucaacgacgccguccaggcccucaccgaccucggccucaucuacaccgccaaguaccccaacaccuccgaccucgaccgccucacccagucccaccccauccucaacaugaucgacaccaagaaguccucccucaacaucuccggcuacaacuucucccucggcgccgccgucaaggccggcgccugcaugcucgacggcggcaacaugcucgagaccaucaaggucuccccccagaccauggacggcauccucaaguccauccucaaggucaagaaggcccucggcauguucaucuccgacacccccggcgagcgcaaccccuacgagaacauccucuacaagaucugccucuccggcgacggcuggcccuacaucgccucccgcaccuccaucaccggccgcgccugggagaacaccgucgucgaccucgaguccgacggcaagccccagaaggccggcuccaacaacuccaacaagucccuccaguccgucggcuucaccgccggccucaccuacucccagcucaugacccucaaggacgccaugcuccagcucgaccccaacgccaagaccuggauggacaucgagggccgccccgaggaccccgucgagaucgcccucuaccagcccuccuccggcugcuacauccacuucuuccgcgagcccaccgaccucaagcaguucaagcaggacgccaaguacucccacggcaucgacgucaccgaccucuucgccgcccagcccggccucaccuccgccgucaucgacgcccucccccgcaacauggucaucaccugccagggcuccgacgacauccgcaagcuccucgagucccagggccgcaaggacaucaagcucaucgacaucgcccucuccaagaccgacucccgcaaguacgagaacgccgucugggaccaguacaaggaccucugccacaugcacaccggcgucgucgucgagaagaagaagcgcggcggcaaggaggagaucaccccccacugcgcccucauggacugcaucauguucgacgccgccgucuccggcggccucaacaccuccguccuccgcgccguccucccccgcgacauggucuuccgcaccuccaccccccgcgucguccucugaggacuagucccuguucccagagcccacuuuuuuuucuuuuuuugaaauaaaauagccugucuuucagaucuaaaaaaaaaaaaaaaaaaaaaaaaaaaaaaaaaaaaaaaaaaaaaaaaaaaaaaaaaaaaaaaaugcaucccccccccccccccccccccccccccccccaaaggcucuuuucagagccaccagaauu

SEQ ID NO: 10171 - RNA, 2005 nt, Artificial Sequence
  mRNA product Design a-2 comprising derived and/or modified sequence from LASV(G1442-SLE-2011;Clade IV)__AIT17181__NP (opt2)
gggagaguccgcucagccagguugcagaagcggcuuagcguguguccuaaucuucucucugcguguagguaggccugugccgcaaacaagcuuaccauguccgccuccaaggaggucaaguccuuccucuggacccagucccuccgccgcgagcucuccggcuacugcuccaacaucaagcuccaggucgucaaggacgcccaggcccuccuccacggccucgacuucuccgaggucuccaacguccagcgccucaugcgcaagcagcgccgcgacgacaacgaccucaagcgccuccgcgaccucaaccaggccgucaacaaccucgucgagcucaaguccacccagcagaaguccguccuccgcgucggcacccucaccuccgacgaccuccucguccucgccgccgaccucgagaagcucaaguccaaggucauccgcaccgagcgcccccucuccgccggcgucuacaugggcaaccucuccucccagcagcucgaccagcgccgcgcccuccucaacaugaucggcauguccggcggcauccagggcacccgcaccggccgcgacggcgucguccgcgucugggacgucaagaacgccgaccuccucaacaaccaguucggcaccaugcccucccucacccucgccugccucaccaagcagggccaggucgaccucaacgacgucguccaggcccucaccgaccucggccucaucuacaccgccaaguaccccaacgccuccgaccucgaccgccucacccagucccaccccauccucaacaugaucgacaccaagaaguccucccucaacaucuccggcuacaacuucucccucggcgccgccgucaaggccggcgccugcaugcucgacggcggcaacaugcucgagaccaucaaggucuccccccagaccauggacggcauccucaaguccauccucaaggucaagaagacccucggcauguucaucuccgacacccccggcgagcgcaaccccuacgagaacauccucuacaagaucugccucuccggcgacggcuggcccuacaucgccucccgcaccuccaucaccggccgcgccugggagaacaccgucgucgaccucgaguccgacggcaagccccagaaggccggcuccaacaacuccaacaagucccuccaguccgccggcuucgccgccggccucaccuacucccagcucaugacccucaaggacgccaugcuccagcucgaccccaacgccaagaccuggauggacaucgagggccgccccgaggaccccgucgagaucgcccucuaccagcccuccuccggcugcuacauccacuucuuccgcgagcccaccgaccucaagcaguucaagcaggacgccaaguacucccacggcaucgacgucaccgaccucuucgccgcccagcccggccucaccuccgccgucaucgaggcccucccccgcaacauggucaucaccugccagggcuccgacgacaucaagaagcuccucgagucccagggccgcaaggacaucaagcucaucgacaucgcccucuccaagaccgacucccgcaaguacgagaacgccgucugggaccaguacaaggaccucugccacaugcacaccggcgucgucgucgagaagaagaagcgcggcggcaaggaggagaucaccccccacugcgcccucauggacugcaucauguucgacgccgccgucuccggcggccucaacacccucguccuccgcgccguccucccccgcgacauggucuuccgcaccuccaccccccgcgucguccucugaggacuagucccuguucccagagcccacuuuuuuuucuuuuuuugaaauaaaauagccugucuuucagaucuaaaaaaaaaaaaaaaaaaaaaaaaaaaaaaaaaaaaaaaaaaaaaaaaaaaaaaaaaaaaaaaaugcaucccccccccccccccccccccccccccccccaaaggcucuuuucagagccaccagaauu

SEQ ID NO: 10172 - RNA, 2005 nt, Artificial Sequence
  mRNA product Design a-2 comprising derived and/or modified sequence from LASV(G3010-SLE-2013;Clade IV)__AIT17345__NP (opt2)
gggagaguccgcucagccagguugcagaagcggcuuagcguguguccuaaucuucucucugcguguagguaggccugugccgcaaacaagcuuaccauguccgccuccaaggagaucaaguccuuccucuggacccagucccuccgccgcgagcucuccggcuacugcuccaacaucaagcuccaggucgucaaggacgcccaggcccuccuccacggccucgacuucuccgaggucuccaacguccagcgccucaugcgcaaggagcgccgcgacgacaacgaccucaagcgccuccgcgaccucaaccaggccgucaacaaccucgucgagcucaaguccacccagcagaaguccauccuccgcgucggcacccucaccuccgacgaccuccucauccucgccgccgaccucgagaagcucaaguccaaggucacccgcaccgagcgcccccucuccgccggcgucuacaugggcaaccucuccucccagcagcucgaccagcgccgcgcccuccucuccaugaucggcauguccuccggcguccagggcgcccgcgccggccgcgacggcgucguccgcgucugggacgucaagaacgccgagcuccucaacaaccaguucggcaccaugcccucccucacccucgccugccucaccaagcagggccaggucgaccucaacgacgucguccaggcccucaccgaccucggccucaucuacaccgccaaguaccccaacaccuccgaccucgaccgccucacccagucccaccccauccucaacaugaucgacaccaagaaguccucccucaacaucuccggcuacaacuucucccucggcgccgccgucaaggccggcgccugcaugcucgacggcggcaacaugcucgagaccaucaaggucuccccccagaccauggacggcauccucaaguccauccucaaggucaagaaggcccucggcauguucaucuccgagacccccggcgagcgcaaccccuacgagaacauccucuacaagaucugccucuccggcgacggcuggcccuacaucgccucccgcaccuccaucaccggccgcgccugggagaacaccgucgucgaccucgaguccgacggcaagccccagaaggccggcuccaacaacuccaacaagucccuccaguccgccggcuucaccgccggccucaccuacucccagcucaugacccucaaggacgccaugcuccagcucgaccccaacgccaagaccuggauggacaucgagggccgccccgaggaccccgucgaggucgcccucuaccagcccuccuccggcugcuacauccacuucuuccgcgagcccaccgaccucaagcaguucaagcaggacgccaaguacucccacggcaucgacgucaccgaccucuucgccgcccagcccggccucaccuccgccgucaucgacgcccucccccgcaacauggucaucaccugccagggcuccgacgacaucaagaagcuccucgagucccagggccgcaaggacaucaagcucaucgacaucgcccucuccaagaccgacucccgcaaguacgagaacgccgucugggaccaguacaaggaccucugccacaugcacaccggcgucgucgucgagaagaagaagcgcggcggcaaggaggagaucaccccccacugcgcccucauggacugcaucauguucgacgccgccgucuccggcggccucaacaccuccguccuccgcgccguccucccccgcgacauggucuuccgcaccuccaccccccgcgucguccucugaggacuagucccuguucccagagcccacuuuuuuuucuuuuuuugaaauaaaauagccugucuuucagaucuaaaaaaaaaaaaaaaaaaaaaaaaaaaaaaaaaaaaaaaaaaaaaaaaaaaaaaaaaaaaaaaaugcaucccccccccccccccccccccccccccccccaaaggcucuuuucagagccaccagaauu

SEQ ID NO: 10173 - RNA, 2005 nt, Artificial Sequence
  mRNA product Design a-2 comprising derived and/or modified sequence from LASV(G502-SLE-2009;Clade IV)__AIT17127__NP (opt2)
gggagaguccgcucagccagguugcagaagcggcuuagcguguguccuaaucuucucucugcguguagguaggccugugccgcaaacaagcuuaccauguccgccuccaaggagaucaaguccuuccucuggacccagucccuccgccgcgagcucuccggcuacugcuccaacaucaagcuccaggucgucaaggacgcccaggcccuccuccacggccucgacuucuccgaggucuccaacguccagcgccucaugcgcaaggagcgccgcgacgacaacgaccucaagcgccuccgcgaccucaaccaggccgucaacaaccucgucgagcucaaguccacccagcagaaguccauccuccgcgucggcacccucaccuccgacgaccuccucauccucgccgccgaccucgagaagcucaaguccaaggucauccgcaccgagcgcccccucuccgccggcgucuacaugggcaaccucuccucccagcagcucgaccagcgccgcgcccuccucuccaugaucggcauguccggcggcaaccagggcguccgcgccggcaaggacggcgucguccgcgucugggacgucaagaacgccgagcuccucaacaaccaguucggcaccaugcccucccucacccucgccugccucaccaagcagggccaggucgaccucaacgacgccguccaggcccucaccgaccucggccucaucuacaccgccaaguaccccaacaccuccgaccucgaccgccucacccagucccaccccauccucaacaugaucgacaccaagaaguccucccucaacaucuccggcuacaacuucucccucggcgccgccgucaaggccggcgccugcaugcucgacggcggcaacaugcucgagaccaucaaggucuccccccagaccauggacggcauccucaaguccauccucaaggucaagaaggcccucggcauguucaucuccgacacccccggcgagcgcaaccccuacgagaacauccucuacaagaucugccucuccggcgacggcuggcccuacaucgccucccgcaccuccaucaccggccgcgccugggagaacaccgucgucgaccucgaguccgacggcaagccccagaaggccggcuccaacaacuccaacaagucccuccaguccgccggcuucaccgccggccucaccuacucccagcucaugacccucaaggacgccaugcuccagcucgaccccaacaccaagaccuggauggacaucgagggccgccccgaggaccccgucgagaucgcccucuaccagcccuccuccggcugcuacauccacuucuuccgcgagcccaccgaccucaagcaguucaagcaggacgccaaguacucccacggcaucgacgucaccgaccucuucgccgcccagcccggccucaccuccgccgucaucgacgcccucccccgcaacauggucaucaccugccagggcuccgacgacauccgcaagcuccucgagucccagggccgcaaggacaucaagcucaucgacaucgcccucaacaagaccgacucccgcaaguacgagaacgccgucugggaccaguacaaggaccucugccacaugcacaccggcgucgucgucgagaagaagaagcgcggcggcaaggaggagaucaccccccacugcgcccucauggacugcaucauguucgacgccgccgucuccggcggccucaacaccuccguccuccgcgccguccucccccgcgacauggucuuccgcaccuccaccccccgcgucguccucugaggacuagucccuguucccagagcccacuuuuuuuucuuuuuuugaaauaaaauagccugucuuucagaucuaaaaaaaaaaaaaaaaaaaaaaaaaaaaaaaaaaaaaaaaaaaaaaaaaaaaaaaaaaaaaaaaugcaucccccccccccccccccccccccccccccccaaaggcucuuuucagagccaccagaauu

SEQ ID NO: 10174 - RNA, 2005 nt, Artificial Sequence
  mRNA product Design a-2 comprising derived and/or modified sequence from LASV(G733-SLE-2010;Clade IV)__AIT17155__NP (opt2)
gggagaguccgcucagccagguugcagaagcggcuuagcguguguccuaaucuucucucugcguguagguaggccugugccgcaaacaagcuuaccauguccgccuccaaggagaucaaguccuuccucuggacccagucccuccgccgcgagcucuccggcuacugcuccaacaucaagcuccaggucgucaaggacgcccaggcccuccuccacggccucgacuucuccgaggucuccaacguccagcgccucaugcgcaaggagcgccgcgacgacaacgaccucaagcgccuccgcgaccucaaccaggccgucaacaaccucgucgagcucaaguccacccagcagaaguccguccuccgcgucggcacccucaccuccgacgagcuccucguccucgccgccgaccucgagaagcucaaguccaaggucauccgcaccgagcgcccccucuccgccggcgucuacaugggcaaccucuccucccagcagcucgaccagcgccgcgcccuccucuccaugaucggcauguccggcggcaaccagggcgcccgcaccggccgcgacggcgucguccgcgucugggacgucaagaacgccgagcuccucaacaaccaguucggcaccaugcccucccucacccucgccugccucaccaagcagggccaggucgaccucaacgacgccguccaggcccucaccgaccucggccucaucuacaccgccaaguaccccaacaccuccgaccucgaccgccucacccagucccaccccauccucaacaugaucgacaccaagaaguccucccucaacaucuccggcuacaacuucucccucggcgccgccgucaaggccggcgccugcaugcucgacggcggcaacaugcucgagaccaucaaggucuccccccagaccauggacggcauccucaaguccauccucaaggucaagaaggcccucggcauguucaucuccgacacccccggcgagcgcaaccccuacgagaacauccucuacaagaucugccucuccggcgacggcuggcccuacaucgccucccgcaccuccaucaccggccgcgccugggagaacaccgucgucgaccucgaguccgacggcaagccccagaaggccggcuccaacaacuccaacaagucccuccaguccgccggcuucaccgccggccucaccuacucccagcucaugacccucaaggacgccaugcuccagcucgaccccaacgccaagaccuggauggacaucgagggccgccccgaggaccccgucgagaucgcccucuaccagcccuccuccggcugcuacauccacuucuuccgcgagcccaccgaccucaagcaguucaagcaggacgccaaguacucccacggcaucgacgucaccgaccucuucgccgcccagcccggccucaccuccgccgucaucgacgcccucccccgcaacauggucaucaccugccagggcuccgacgacauccgcaagcuccucgagucccagggccgcaaggacaucaagcucaucgacaucgcccucuccaagaucgacucccgcaaguacgagaacgccgucugggaccaguacaaggaccucugccacaugcacaccggcgucgucgucgagaagaagaagcgcggcggcaaggaggagaucaccccccacugcgcccucauggacugcaucauguucgacgccgccgucuccggcggccucaacucccucguccuccgcgccguccucccccgcgacauggucuuccgcaccuccaccccccgcgucguccucugaggacuagucccuguucccagagcccacuuuuuuuucuuuuuuugaaauaaaauagccugucuuucagaucuaaaaaaaaaaaaaaaaaaaaaaaaaaaaaaaaaaaaaaaaaaaaaaaaaaaaaaaaaaaaaaaaugcaucccccccccccccccccccccccccccccccaaaggcucuuuucagagccaccagaauu

SEQ ID NO: 10175 - RNA, 2005 nt, Artificial Sequence
  mRNA product Design a-2 comprising derived and/or modified sequence from MOPV/LASV reassortant(IGS-1;Clade IV)__AFY05578__NP (opt2)
gggagaguccgcucagccagguugcagaagcggcuuagcguguguccuaaucuucucucugcguguagguaggccugugccgcaaacaagcuuaccauguccgccuccaaggagaucaaguccuuccucuggacccagucccuccgccgcgagcucuccggcuacugcuccaacaucaagcuccaggucgucaaggacgcccaggcccuccuccacggccucgacuucuccgaggucuccaacguccagcgccucaugcgcaaggagcgccgcgacgacaacgaccucaagcgccuccgcgaccucaaccaggccgucaacaaccucgucgagcucaaguccacccagcagaaguccauccuccgcgucggcacccucaccuccgacgaccuccucauccucgccgccgaccucgagaagcuccgcuccaaggucauccgcaccgagcgcccccucuccgccggcgucuacaugggcaaccucuccucccagcagcucgaccagcgccgcgcccuccucaacaugaucggcauguccggcggcaaccagggcgcccgcgccggccgcgacggcgucguccgcgucugggacgucaagaacgccgagcuccucuccaaccaguucggcaccaugcccucccucacccucgccugccucaccaagcagggccaggucgaccucaacgacgccguccaggcccucaccgaccucggccucaucuacaccgccaaguaccccaacaccuccgaccucgaccgccucacccagucccaccccauccucaacaugaucgacaccaagaaguccucccucaacaucuccggcuacaacuucucccucggcgccgccgucaaggccggcgccugcaugcucgacggcggcaacaugcucgagaccaucaaggucuccccccagaccauggacggcauccucaaguccauccucaaggucaagaaggcccucggcauguucaucuccgacacccccggcgagcgcaaccccuacgagaacauccucuacaagaucugccucuccggcgacggcuggcccuacaucgccucccgcaccuccaucaccggccgcgccugggagaacaccgucgucgaccucgaguccgacggcaagccccagaaggccgacuccaacaacuccuccaagucccuccaguccgccggcuucaccgccggccucaccuacucccagcucaugacccucaaggacgccaugcuccagcucgaccccaacgccaagaccuggauggacaucgagggccgccccgaggaccccgucgagaucgcccucuaccagcccuccuccggcugcuacauccacuucuuccgcgagcccaccgaccucaagcaguucaagcaggacgccaaguacucccacggcaucgacgucaccgaccucuucgccacccagcccggccucaccuccgccgucaucgacgcccucccccgcaacauggucaucaccugccagggcuccgacgacauccgcaagcuccucgagucccagggccgcaaggacaucaagcucaucgacaucgaccucuccaagaccgacucccgcaaguacgagaacgccgucugggaccaguacaaggaccucugccacaugcacaccggcgucgucgucgagaagaagaagcgcggcggcaaggaggagaucaccccccacugcgcccucauggacugcaucauguucgacgccgccgucuccggcggccucaacaccuccguccuccgcgccguccucccccgcgacauggucuuccgcaccuccaccccccgcgucguccucugaggacuagucccuguucccagagcccacuuuuuuuucuuuuuuugaaauaaaauagccugucuuucagaucuaaaaaaaaaaaaaaaaaaaaaaaaaaaaaaaaaaaaaaaaaaaaaaaaaaaaaaaaaaaaaaaaugcaucccccccccccccccccccccccccccccccaaaggcucuuuucagagccaccagaauu

SEQ ID NO: 10176 - RNA, 2005 nt, Artificial Sequence
  mRNA product Design a-2 comprising derived and/or modified sequence from LASV(LM765-SLE-2012;Clade IV)__AIT17815__NP (opt2)
gggagaguccgcucagccagguugcagaagcggcuuagcguguguccuaaucuucucucugcguguagguaggccugugccgcaaacaagcuuaccauguccgccuccaaggagaucaaguccuuccucuggacccagucccuccgccgcgagcucuccggcuacugcuccaacaucaagcuccaggucgucaaggacgcccaggcccuccuccacggccucgacuucuccgaggucuccaacguccagcgccucaugcgcaaggagcgccgcgacgacaacgaccucaagcgccuccgcgaccucaaccaggccgucaacaaccucgucgagcucaaguccacccagcagaaguccauccuccgcgucggcacccucaccuccgacgaccuccucauccucgccgccgaccucgagaagcucaaguccaaggucacccgcaccgagcgcccccucuccgccggcgucuacaugggcaaccucuccucccagcagcucgaccagcgccgcgcccuccucgacaugaucggcauguccggcuccaaccagggcgcccgcgccggccgcgacggcgucguccgcgucugggacgucaagaacgccgagcuccucaacaaccaguucggcaccaugcccucccucacccucgccugccucaccaagcagggccaggucgaccucaacgacgccguccaggcccucaccgaccucggccucaucuacaccgccaaguaccccaacaccuccgaccucgaccgccucacccagucccaccccauccucaacaugaucgacaccaagaaguccucccucaacaucuccggcuacaacuucucccucggcgccgccgucaaggccggcgccugcaugcucgacggcggcaacaugcucgagaccaucaaggucuccccccagaccauggacggcauccucaaguccauccucaaggucaagaaggcccucggcauguucaucuccgacgcccccggcgagcgcaaccccuacgagaacauccucuacaagaucugccucuccggcgacggcuggcccuacaucgccucccgcaccuccaucaccggccgcgccugggagaacaccgucgucgaccucgaguccgacggcaagccccagaaggccggcuccaacggcuccaacaagucccuccaguccgccggcuucaccgccggccucaccuacucccagcucaugacccucaaggacgccaugcuccagcucgaccccaacgccaagaccuggauggacaucgagggccgccccgaggaccccgucgagaucgcccucuaccagcccuccuccggcugcuacauccacuucuuccgcgagcccaccgaccucaagcaguucaagcaggacgccaaguacucccacggcaucgacgucaccgaccucuucgccgcccagcccggccucaccuccgccgucaucgacgcccucccccgcaacauggucaucaccugccagggcuccgacgacauccgcaagcucuucgagucccagggccgcaaggacaucaagcucaucgacaucgcccucuccaagaccgacucccgcaaguacgagaacgccgucugggaccaguacaaggaccucugccacaugcacaccggcaucgucgucgagaagaagaagcgcggcggcaaggaggagaucaccccccacugcgcccucauggacugcaucauguucgacgccgccgucuccggcggccucaacaccuccguccuccgcgccguccucccccgcgacauggucuuccgcaccuccaccccccgcgucguccucugaggacuagucccuguucccagagcccacuuuuuuuucuuuuuuugaaauaaaauagccugucuuucagaucuaaaaaaaaaaaaaaaaaaaaaaaaaaaaaaaaaaaaaaaaaaaaaaaaaaaaaaaaaaaaaaaaugcaucccccccccccccccccccccccccccccccaaaggcucuuuucagagccaccagaauu

SEQ ID NO: 10177 - RNA, 2005 nt, Artificial Sequence
  mRNA product Design a-2 comprising derived and/or modified sequence from LASV(LM776-SLE-2012;Clade IV)__AIT17825__NP (opt2)
gggagaguccgcucagccagguugcagaagcggcuuagcguguguccuaaucuucucucugcguguagguaggccugugccgcaaacaagcuuaccauguccgccuccaaggagaucaaguccuuccucuggacccagucccuccgccgcgagcucuccuccuacugcuccaacaucaagcuccaggucgucaaggacgcccaggcccuccuccacggccucgacuucuccgaggucuccaacguccagcgccucaugcgcaaggagcgccgcgacgacaacgaccucaagcgccuccgcgaccucaaccaggccgucaacaaccucgucgagcucaaguccacccagcagaaguccauccuccgcgucggcacccucaccuccgacgaccuccucauccucgccgccgaccucgagaagcucaaguccaaggucacccgcaccgagcgcccccucuccgccggcgucuacaugggcaaccucuccucccagcagcucgaccagcgccgcgcccuccucuccaugaucggcauguccggcuccaaccagggcgcccgcgccggccgcgacggcgucguccgcgucugggacgucaagaacgccgagcuccucaacaaccaguucggcaccaugcccucccucacccucgccugccucaccaagcagggccaggucgaccucaacgacgccguccaggcccucaccgaccucggccucaucuacaccgccaaguaccccaacaccuccgaccucgaccgccucacccagucccaccccauccucaacaugaucgacaccaagaaguccucccucaacaucuccggcuacaacuucucccucggcgccgccgucaaggccggcgccugcaugcucgacggcggcaacaugcucgagaccaucaaggucuccccccagaccauggacggcauccucaaguccauccucaaggucaagaaggcccucggcauguucaucuccgacacccccggcgagcgcaaccccuacgagaacauccucuacaagaucugccucuccggcgacggcuggcccuacaucgccucccgcaccuccaucaccggccgcgccugggagaacaccgucgucgaccucgaguccgacggcaagccccagaaggccggcuccaacaacuccaacaagucccuccaguccgccggcuucaccgccggccucaccuacucccagcucaugacccucaaggacgccaugcuccagcucgaccccaacgccaagaccuggauggacaucgagggccgccccgaggaccccgucgaggucgcccucuaccagcccuccuccggcugcuacauccacuucuuccgcgagcccaccgaccucaagcaguucaagcaggacgccaaguacucccacggcaucgacgucaccgaccucuucgccgcccagcccggccucaccuccgccgucaucgacgcccucccccgcaacauggucaucaccugccagggcuccgacgacauccgcaagcuccucgagucccagggccgcaaggacaucaagcucaucgacaucgcccucuccaagaccgacucccgcaaguacgagaacgccgucugggaccaguacaaggaccucugccacaugcacaccggcgucgucgucgagaagaagaagcgcggcggcaaggaggagaucaccccccacugcgcccucauggacugcaucauguucgacgccgccgucuccggcggccucaacaccuccguccuccgcgccguccucccccgcgacauggucuuccgcaccuccaccccccgcgucguccucugaggacuagucccuguucccagagcccacuuuuuuuucuuuuuuugaaauaaaauagccugucuuucagaucuaaaaaaaaaaaaaaaaaaaaaaaaaaaaaaaaaaaaaaaaaaaaaaaaaaaaaaaaaaaaaaaaugcaucccccccccccccccccccccccccccccccaaaggcucuuuucagagccaccagaauu

SEQ ID NO: 10178 - RNA, 2005 nt, Artificial Sequence
  mRNA product Design a-2 comprising derived and/or modified sequence from LASV(Mad39;Clade IV)__ANH09723__NP (opt2)
gggagaguccgcucagccagguugcagaagcggcuuagcguguguccuaaucuucucucugcguguagguaggccugugccgcaaacaagcuuaccauguccgccuccaaggagaucaaguccuuccucuggacccagucccuccgccgcgagcucuccggcuacugcuccaacaucaagcuccaggucgucaaggacgcccaggcccuccuccacggccucgacuucuccgaggucuccaacguccagcgccucaugcgcaagcagcgccgcgacgacaacgaccucaagcgccuccgcgaccucaaccaggccgucaacaaccucgucgagcucaaguccacccagcagaaguccguccuccgcgucggcacccucaccuccgacgaccuccucacccucgccgccgaccucgagaagcucaaguccaaggucacccgcaccgagcgcccccucaccgccggcgucuacaugggcaaccucuccucccagcagcucgaccagcgccgcgcccuccucaacaugaucggcauguccggcggcaaccagggcgcccgcaccggccgcgacggcgucguccgcgucugggacgucaagaacgccgagcuccucaacaaccaguucggcaccaugcccucccucacccucgccugccucaccaagcagggccaggucgaccucaacgacgucguccaggcccucaccgaccucggccucaucuacaccgccaaguaccccaacaccuccgaccucgaccgccucacccagucccaccccauccucaacaugaucgacaccaacaaguccucccucaacaucuccggcuacaacuucucccucggcgccgccgucaaggccggcgccugcaugcucgacggcggcaacaugcucgagaccaucaaggucuccccccagaccauggacggcauccucaaguccauccucaaggucaagaagucccucggcauguucaucuccgacacccccggcgagcgcaaccccuacgagaacauccucuacaagaucugccucuccggcgacggcuggcccuacaucgccucccgcaccuccaucaccggccgcgccugggagaacaccgucgucgaccucgaguccggcggcaagccccagaaggccggcuccaacaacuccaacaagucccuccaguccgccggcuucgccgccggccucaccuacucccagcucaugacccucaaggacgccaugcuccagcucgaccccaacgccaagaccuggauggacaucgagggccgccccgaggaccccgucgagaucgcccucuaccagcccaucuccggcugcuacauccacuucuuccgcgagcccaccgaccucaagcaguucaagcaggacgccaaguacucccacggcaucgacgucaccgaccucuucgccgcccagcccggccucaccuccgccgucaucgaggcccucccccgcaacauggucaucaccugccagggcuccgacgacauccgcaagcucuucgagucccagggccgcaaggacaucaagcucaucgacaucgcccucuccaagaccgacucccgcaaguacgagaacgccgucugggaccaguacaaggaccucugccacaugcacaccggcgucgucgucgagaagaagaagaagggcggcaaggaggagaucaccccccacugcgcccucauggacugcaucauguucgacgccgccgucuccggcggccucaacacccucguccuccgcgccguccucccccgcgacauggucuuccgcaccuccacccccaaggucguccucugaggacuagucccuguucccagagcccacuuuuuuuucuuuuuuugaaauaaaauagccugucuuucagaucuaaaaaaaaaaaaaaaaaaaaaaaaaaaaaaaaaaaaaaaaaaaaaaaaaaaaaaaaaaaaaaaaugcaucccccccccccccccccccccccccccccccaaaggcucuuuucagagccaccagaauu

SEQ ID NO: 10179 - RNA, 2005 nt, Artificial Sequence
  mRNA product Design a-2 comprising derived and/or modified sequence from LASV(Z0947-SLE-2011;Clade IV)__AIT17841__NP (opt2)
gggagaguccgcucagccagguugcagaagcggcuuagcguguguccuaaucuucucucugcguguagguaggccugugccgcaaacaagcuuaccauguccgccuccaaggagaucaaguccuuccucuggacccagucccuccgccgcgagcucuccggcuacugcuccaacaucaagcuccaggucgucaaggacgcccaggcccuccuccacggccucgacuucuccgaggucuccaacguccagcgccucaugcgcaaggagcgccgcgacgacaacgaccucaagcgccuccgcgaccucaaccaggccgucaacaaccucgucgagcucaaguccacccagcagaaguccauccuccgcgucggcacccucaccuccgacgaccuccucauccucgccgccgaccucgagaagcucaaguccaaggucacccgcaccgagcgcccccucuccgccggcgucuacaugggcaaccucuccucccagcagcucgaccagcgccgcgcccuccucaacaugaucggcauguccggcuccaaccagggcgcccgcaccggccgcgacggcgucguccgcgucugggacgucaagaacgccgagcuccucaacaaccaguucggcaccaugcccucccucacccucgccugccucaccaagcagggccaggucgaccucaacgacgccguccaggcccucaccgaccucggccucaucuacaccgccaaguaccccaacaccuccgaccucgaccgccucacccagucccaccccauccucaacaugaucgacaccaagaaguccucccucaacaucuccggcuacaacuucucccucggcgccgccgucaaggccggcgccugcaugcucgacggcggcaacaugcucgagaccaucaaggucuccccccagaccauggacggcauccucaaguccauccucaaggucaagaaggcccucggcauguucaucuccgacgcccccggcgagcgcaaccccuacgagaacauccucuacaagaucugccucuccggcgacggcuggcccuacaucgccucccgcaccuccaucaccggccgcgccugggagaacaccgucgucgaccucgaguccgacggcaagccccagaaggccggcuccaacggcuccaacaagucccuccaguccgccggcuucaccgccggccucaccuacucccagcucaugacccucaaggacgccaugcuccagcucgaccccaacgccaagaccuggauggacaucgagggccgccccgaggaccccgucgagaucgcccucuaccagcccuccuccggcugcuacauccacuucuuccgcgagcccaccgaccucaagcaguucaagcaggacgccaaguacucccacggcaucgacgucaccgaccucuucgccgcccagcccggccucaccuccgccgucaucgacgcccucccccgcaacauggucaucaccugccagggcuccgacgacauccgcaagcucuucgagucccagggccgcaaggacaucaagcucaucgacaucgcccucuccaagaccgacucccgcaaguacgagaacgccgucugggaccaguacaaggaccucugccacaugcacaccggcaucgucgucgagaagaagaagcgcggcggcaaggaggagaucaccccccacugcgcccucauggacugcaucauguucgacgccgccgucuccggcggccucaacaccuccguccuccgcgccguccucccccgcgacauggucuuccgcaccuccaccccccgcgucguccucugaggacuagucccuguucccagagcccacuuuuuuuucuuuuuuugaaauaaaauagccugucuuucagaucuaaaaaaaaaaaaaaaaaaaaaaaaaaaaaaaaaaaaaaaaaaaaaaaaaaaaaaaaaaaaaaaaugcaucccccccccccccccccccccccccccccccaaaggcucuuuucagagccaccagaauu

SEQ ID NO: 10180 - RNA, 2005 nt, Artificial Sequence
  mRNA product Design a-2 comprising derived and/or modified sequence from LASV(Josiah;Clade IV)__NP_694869__NP (opt3)
gggagaguccgcucagccagguugcagaagcggcuuagcguguguccuaaucuucucucugcguguagguaggccugugccgcaaacaagcuuaccaugagcgccuccaaggagaucaaaucuuuccuguggacccagucacucagaagggaacuuaguggcuacugcagcaacauuaagcugcaaguggucaaagacgcucaggcauuguuacacgggcuggauuuuuccgagguuucuaaugugcagcggcuaaugcgcaaggaacgacgugacgauaacgaccucaaaagacugagggaucuuaaucaggccguaaacaaucugguggaguugaagucgacacaacagaagucaauacuccgggucggaacucugacgagcgacgaucugcucaucuuagcggcugaccuggaaaaacuuaagaguaaagugauucgcaccgagagacccuuguccgccgguguuuauaugggcaaccugucuagccagcagcuagaucaaaggcgggcacuccugaauaugaucgggauguccggaggcaaccagggugcccgcgcugggcgagacggaguggucagagugugggauguaaagaaugcagagcuucugaacaaucaguucggcacaaugccuucauugacucucgccugucugaccaaacagggccaaguugacuuaaacgaugcugugcaggcccugacagaccucgggcuuauuuacaccgcgaaguauccaaauacaagugaccuggauagguugacucagagccauccgauccuaaacaugauagacaccaagaaaucuucccugaauaucucaggauacaacuuuagccucggugcagccgucaaggcuggcgccugcaugcuggaugggggaaacaugcuugaaacgauuaaagugaguccccaaacuauggacggcauccugaagucuauuuugaaagugaagaaagcacucgguauguucaucuccgauaccccuggggagcggaauccauaugaaaacauacuguacaagauuuguuuaagcggagacggcuggcccuauaucgcuucgcguacaucuauuacuggccgcgccugggagaauaccgucguugaucuggaguccgacgggaagccucagaaagcggauucaaacaauaguagcaagucccuacagucugccggauuuacagcaggucucaccuacagccagcugaugacgcuuaaagacgcuauguugcaacuggauccaaacgccaagacuuggauggacaucgaaggcagacccgaggacccuguggaaaucgcucucuaccagccaucaagugggugcuauauucacuucuuuagggagccgacagaucugaaacaguucaagcaggacgccaaguacucccauggaauagauguaaccgaccuuuuugcaacucaacccggccugacaagcgccgugaucgaugcuuugccucggaauauggucauuaccugucaggguucugacgauauccgaaaacuccuggaaucacaggggcgcaaggacauaaaauuaauugauaucgcgcugaguaagacggacagcagaaaauaugagaacgcagugugggaucaguacaaggaccuaugccacaugcauaccggcguuguggucgagaagaaaaagaggggaggcaaagaagagaucacaccacacugugcccucauggauugcauuauguucgacgcugccguguccgggggacugaauacuucuguacuucgggcaguuuugccccgcgacaugguguuuagaaccucgacaccuagggucgugcugugaggacuagucccuguucccagagcccacuuuuuuuucuuuuuuugaaauaaaauagccugucuuucagaucuaaaaaaaaaaaaaaaaaaaaaaaaaaaaaaaaaaaaaaaaaaaaaaaaaaaaaaaaaaaaaaaaugcaucccccccccccccccccccccccccccccccaaaggcucuuuucagagccaccagaauu

SEQ ID NO: 10181 - RNA, 2005 nt, Artificial Sequence
  mRNA product Design a-2 comprising derived and/or modified sequence from LASV(LP;Clade I)__AAF86702__NP (opt3)
gggagaguccgcucagccagguugcagaagcggcuuagcguguguccuaaucuucucucugcguguagguaggccugugccgcaaacaagcuuaccaugagcaacuccaaggagaucaaaucuuuccuguggacccagucacucagaagggaacuuaguggcuacugcagcaauauuaagcugcaaguggucaaagacgcccaggcuuuguuacacgggcuggauuuuuccgagguuucuaacgugcagcggcuaaugcgcaagcagaaacgagacgaugcagaccucaagcgucugagagaucuuaaucaagccguaaacaaucugguggaauugaagucgacacagcagaaaaacguccucagggugggaacucugucaagcgacgaucugauaacgcucgcggcugacuuagagaagcugaaaaguaagguuauccggaccgaacgcccccuuuccucugguguguauaugggcaauuugagcucccagcaacuggaucagagaagggcccuacucucaaugauugggaugaguggaggcccucaggguaaccggacagggggagacggcgucgugcgcguaugggauguuaaaaaugcagagcugcuuaacaaucaguucggcacuaugccaagccugaccuuggccugucucacaaagcaaggacagguggaccugaacgaugcuguccaggcauuaaccgaccuggggcucaucuacacugccaaguaucccaauucuuccgaccuugauaugcugacacaaucacauccgauuuuggguaugguggacaccaaaaagagcagucuaaacaucucuggcuacaauuuuucccugggggcugccgugaaagcgggagcaugcaugcucgauggcgguaacaugcuggagacgauaaaggucagcccucagacuauggacgggauccuuaaaucgauucugaagguuaaacgaucuuugggaauguucaucuccgauaccccaggcgaaagaaaccccuaugagaauauucucuacaagaucugucugucaggcgaaggguggccuuauauagccaguaggacaagcauuacuggacgggcuugggagaacaccuuaguggaccuggaguccgauaauaagccacccaaacuaaacucugccgguagcaauaagucacuccaggcagcuggccugaacgccgggcuuacauacagucaguugaugacccugaaagacugcaugcuccaacuggauccuuccagcaagacguggaucgacauugaaggacguccagaggauccgguagaaaucgcgcuuuuucagcccucuucaggcuguuacauccacuucuuucgcgagccuacugaccugaaacaguucaagcaggacgccaaguauagucaugguauugaugugacagacuuguuuagcacccaaccagggcucacuuccgcagucauagaagcucugcccagaaauaugguguuaacaugccagggcucugaugacaucaaaaagcugcuagagucgcagggaaggcgggauauuaaacucaucgacauaagccuguccaaggccgauucacgaaaauucgagaacgcuguuugggaccaguacaaggaucuuugucacaugcauaccggcguggucguggaaaagaaaaagcgcgggggaaaagaggaaauuacgccucacugcgccuugcuggacuguaucauguuugaugcagccaccacagguagucucaauaucacuacccugagagcuguauuaccaagggacaugguuuuccggacaucuacucccaaggugguccugugaggacuagucccuguucccagagcccacuuuuuuuucuuuuuuugaaauaaaauagccugucuuucagaucuaaaaaaaaaaaaaaaaaaaaaaaaaaaaaaaaaaaaaaaaaaaaaaaaaaaaaaaaaaaaaaaaugcaucccccccccccccccccccccccccccccccaaaggcucuuuucagagccaccagaauu

SEQ ID NO: 10182 - RNA, 2005 nt, Artificial Sequence
  mRNA product Design a-2 comprising derived and/or modified sequence from LASV(803213;Clade II)__AAF86704__NP (opt3)
gggagaguccgcucagccagguugcagaagcggcuuagcguguguccuaaucuucucucugcguguagguaggccugugccgcaaacaagcuuaccaugagcgccuccaaggaggugaaaucuuuccuguggacccagucacucagaagggaacuuaguggcuacugcagcaacaucaagcugcaagucguuaaagacgcucaggcauuguuacacgggcuggauuuuuccgaggugaauaacguacagcggcuaaugcgcaagcagaaacgagacgauggagaccucaagcgucugagagaucuuaaucaagccgugaacaaucuggucgaauugaagucuacacagcagaaaucgauucucaggguggguacucugacgucagacgaucugcucaccuuagcggcugaccuggagaaacuuaagagcaagguuauacggacagaacgccccuugaguuccggcguguauauggggaaccugucuacucagcaacuagagcagagaagggcccuccugaauaugaucggaauggucggcggugcacaggggacccagccuggacgggauggcgugguacgcguuugggacgugaaaaacccagaucuucugaauaaccaauucggcacaaugccgagcuugacccucgccugucugacuaagcaggggcaggucgacuuaaaugaugcugugcuggcacucacagaccuuggacugauuuacaccgccaaguaucccaacuccucagacuuggaucgacuaagucaaagccauccuauccugaauaugguggacacgaaaaagucuucccucaacauuucagguuacaauuuuagccugggcgcugccgucaaagcgggggcaugcaugcuugauggaggcaacaugcuggagacuaucaagguuaccccacagacaauggacgguauauugaaaaguauccucaaggugaaaagaucucuggggauguucguauccgauacucccggagaaaggaacccuuaugagaauauuuuauacaagaucugucugagcggcgacggcuggccauauauugccucgcggaccucuaucguggggcgugcuugggaaaacacaaccgucgaucuagaguccgacggaaagccccagaaaguggguacggccggcucaaauaagagucuccagagcgcaggguuuccuacuggacugacauacucccaacuuaugaccuugaaagauucuaugaugcagcuggacccaagcgcuaagacuuggauagauauugagggccgcccggaagaccccguugagaucgcccucuaccagccuaugucagguugcuauauucacuucuuuagagaaccaacagaccugaaacaguucaagcaagaugcgaaguacagucaugggaucgacguggccgaucuuuuucccgcacagccuggccugaccuccgcugucaucgaggccuugccaaggaacauggugcucacgugucagggaagcgacgauauuaaaaagcuguuagacucucagggccggcgagauauaaaacugaucgacauuucacuaaguaagguagauagccgcaaauucgaaaaugcuguuugggaccaaugcaaggaucucugucacaugcauaccgggguggucguggagaagaaaaagagaggagguaaagaggaaaucacaccccacugcgcccugauggacuguauaauguuugaugcagccgucuccggcgggcuuaacauuccgguguugagggcuguucugccucgggacaugguguuccgcacuucuucgcccaagguaguccucugaggacuagucccuguucccagagcccacuuuuuuuucuuuuuuugaaauaaaauagccugucuuucagaucuaaaaaaaaaaaaaaaaaaaaaaaaaaaaaaaaaaaaaaaaaaaaaaaaaaaaaaaaaaaaaaaaugcaucccccccccccccccccccccccccccccccaaaggcucuuuucagagccaccagaauu

SEQ ID NO: 10183 - RNA, 2008 nt, Artificial Sequence
  mRNA product Design a-2 comprising derived and/or modified sequence from LASV(GA391;Clade III)__CAA36646__NP (opt3)
gggagaguccgcucagccagguugcagaagcggcuuagcguguguccuaaucuucucucugcguguagguaggccugugccgcaaacaagcuuaccaugagcgccuccaaggaggugagaucuuuccuguggacccagucacucaggcgggaacuuaguggcuacugcagcaacaucaaacugcaagucguuaaggacgcucaggcauuguuacacgggcuggauuuuuccgaggugucuaauguacagcgccuaaugcgaaaacagaagcgugacgauggagaccucaaaagacugagggaucuuaaccaagccgugaauaaccuggucgaauugaagucgacacagcagaagucagugcuccggguugguacucugagcagugacgaucugcucauuuuagcggcugaccuggagaaacuuaaguccaaagugacgcgcaccgaaagacccuugucuagcggcgucuauauggggaaucuguccucacagcaacuagaucagaggcgggcccuccugaacaugauaggaaugacaggcgugaguggugggggaaagggcgcaagcgacggcaucguacgcguuugggaugugaaaaaugccgagcuucugaacaaucaguucgggacuaugccuucuuugacccucgcuugucugacaaagcagggacaagucgacuuaaacgaugcagugcaggcccugaccgaccucggucuuauuuacacugcuaaguauccaaauuccucagaccuggaucgauugagccagagucauccgauccuaaacaugauugacacuaaaaagucuucccugaauaucagcggcuacaacuuuucgcucggggccgcggugaaagcaggagccugcaugcuggauggcgguaauaugcuugagaccauaaaggucucuccccaaacgauggacgggauccugaaauccauuuugaagguuaaaaagucacucggaauguucgugagugauacuccuggcgaaagaaacccauaugagaacauccuguacaagauuuguuuaagcggcgacggguggcccuauaucgcuuccaggaccucuauaguaggacgggccugggaaaauacaguggucgaucuggagcaggacaacaaaccucagaagauugguaauggcgggagcaacaaaucacuacagagugcaggauuugcugccggccucacuuacucccaacugaugacccuuaaggauuucaaaugcuuuaauuugaucccaaacgcgaagacauggauggacauugagggucgucccgaagauccuguggagaucgcccuguaccagccaagcucuggguguuauguucacuucuuucgcgaaccgaccgaccucaagcaguucaaacaggacgcaaaguacucacauggcaucgaugugacggaccuguuugcugcccaacccggacuuacaagugcugucauugaggcccugccuagaaauauggugauaacaugccagggcagcgaagauaucaggaaauugcucgagucccaggggcggcgagacauuaagcugaucgauauaaccuuaucuaaagcagacucgcgcaaguucgagaacgccguaugggaucaguuuaaggaccugugucacaugcauacuggaguuguggucgagaaaaagaaaagagguggcaaggaagaaauuacaccacacugcgcucuaauggauuguaucauguucgacgcggcagugagcgggggacucgaugccaaaguccugagggugguucuuccccgggacaugguguuccgcaccuccacgccuaagguagucuugugaggacuagucccuguucccagagcccacuuuuuuuucuuuuuuugaaauaaaauagccugucuuucagaucuaaaaaaaaaaaaaaaaaaaaaaaaaaaaaaaaaaaaaaaaaaaaaaaaaaaaaaaaaaaaaaaaugcaucccccccccccccccccccccccccccccccaaaggcucuuuucagagccaccagaauu

SEQ ID NO: 10184 - RNA, 2005 nt, Artificial Sequence
  mRNA product Design a-2 comprising derived and/or modified sequence from LASV(AV;Clade V)__CCA30315__NP (opt3)
gggagaguccgcucagccagguugcagaagcggcuuagcguguguccuaaucuucucucugcguguagguaggccugugccgcaaacaagcuuaccaugagcgccuccaaggaggugaaaucuuuccuguggacccagucacucagaagggaacuuaguggcuacugcagcaacaucaagcugcaagucguuaaagacgcucaggcauuguuacacgggcuggauuuuuccgaggugucuaauguacagcggcuaaugcgcaagcagcgacgugacgauucggaccucaaaagacugagggaucuuaaccaagccgugaauaaccuggucgaauugaagucaacacagcaaaagagcgugcuccggguuggaacucugaguuccgacgaucugcucacguuagcggcugaccuggagaaacuuaagucuaaagugacccgcacagaaagacccuugagcuccggugucuauaugggcaaucugucaagucagcagcuagaucagaggcgggcccuccugaaccuuauugggaugacuaauggaagccagggcucucaggcaggucgcgacggggugguacgaguuugggaugugaagaacgccgagcuguugaauaaccaauucggaaccaugccuucccucacacuggcuuguuuaaccaaacagggccaggucgaccugaaugauguggugcaagcacucacugaccuuggccugauauacacagccaaguauccaaacaccucagacuuggauagacuaacgcagagccauccgauccugaauaugauugacacuaagaaaaguucucucaacaucuccggguacaauuuuagccugggagcugccgucaaggcgggugcaugcaugcuugauggcgggaacaugcuggagaccauuaaaguuucgccccagucuauggacggaaucuugaaguccauacucaaagugaagagggcccugggcauguucguaucagauacaccuggugaacggaacccauaugagaauaucuuauacaaaauuugucugaguggggacggauggcccuauaucgcuagccguacuuccauugugggccgcgccugggaaaacaccgucguggaucuagagacagacggcaagccucagaagaucgggucuggaaauagcaacaaaucacuccaaagugcagguuuuuccgcuggccugaccuacagccagcuuaugacguugaaggaugccaugcugcagcucgacccaaaugcgaaaacuuggauggauauagaggggagacccgaagacccuguugagguggcccuguaccagccaauuucuggaugcuauauccacuucuuuagggaaccgacagaccuuaagcaauucaaacaggaugcaaaguacucacauggcauugacaucgcugaucuguuugccgcucagcccgguuugaccagugccgucaucgaggcacucccucggaacauggugauuacuugucaggggagcgaagacauaaagaaacuguuagagucccaaggccgaaaggauaucaaacugauugacaucgcccuaucuaagauagauucgcgcaaauucgagaaugcuguaugggaccaguauaaggaucucugccacaugcauacaggaguuguggucgaaaagaaaaagagaggcgggaaagaggaaauuaccccacacugugcgcugauggacugcaucauguuugaugcagccgugagcggaggucuuaacacguugguccugagggcugugcucccccgggacaugguuuuccgcaccuccacaccuagagugguacugugaggacuagucccuguucccagagcccacuuuuuuuucuuuuuuugaaauaaaauagccugucuuucagaucuaaaaaaaaaaaaaaaaaaaaaaaaaaaaaaaaaaaaaaaaaaaaaaaaaaaaaaaaaaaaaaaaugcaucccccccccccccccccccccccccccccccaaaggcucuuuucagagccaccagaauu

SEQ ID NO: 10185 - RNA, 2005 nt, Artificial Sequence
  mRNA product Design a-2 comprising derived and/or modified sequence from LASV(Togo/2016/7082;Clade VI)__AMR44578__NP (opt3)
gggagaguccgcucagccagguugcagaagcggcuuagcguguguccuaaucuucucucugcguguagguaggccugugccgcaaacaagcuuaccaugagcaacuccaaggaggugaaaucuuuccuguggacccagucacucagaagggaacuuaguggcuacugcagcaauaucaagcugcaagucguuaaagacgcccaggcuuuguuacacgggcuggauuuuuccgaggugucuaacguacagcggcuaaugcgcaagcagaaacgagacgauggagaccucaagcgucugagagaucuuaaucaagcagugaacaaucuggucgaauugaagucggugcagcagaaaucaauucucaggguugguacacugacuagcgacgaucugcucacguuagccgcggaccuggagaaacuuaaaaguaaggugacccggacagaacgccccuuguccucuggcgucuauauggggaaccugagcucccagcaacuagaucagagaagggcucuccugucaaugauaggaaugaguggcgguaaucagaacagccagccuaaaggggacggagugguacggguuugggaugugaagaaugccgaccuucugaacaaucaauucggcacuaugccaucuuugacccucgcaugucugacaaagcagggccaggucgauuuaaacgacgccgugcaagcucugaccgaccucgggcuuaucuacacugcaaaauaucccaauuccucagaucuggaccgcuugagccagagucauccgauucuaaacaugaucgauacaaagaaaucuucccugaauauuagcggauacaacuuuucgcucggugccgcuaucaagaccggcgccugcaugcuggacgggggaaacaugcuugagacgauaaaagugacuccucagaccauggauggcauccugaagucuauuuugaaagucaagcgaucccucgguauguucaucucagacacaccaggggagagaaaucccuaugaaaacauucuguacaagaucuguuuaaguggagauggcuggccuuauauagcgagcaggacugcaauuaucggccgggccugggagaauaccguuguggaccuggaauccgauucuaaaccacagaagauugggagcaacggaucaaauaaaagucuacaauccgcugguuuugcccccggccucacauacagccagcugaugacccuuaaggacucuauguugcagcuggauccuaacgcaaaaacguggaucgacaucgaggggcguccagaggacccgguagaaguggcucucuuccagcccauuucaggaugcuacauacacuuuuuccgcgagccuacugaucugaagcaauuuaagcaggacgccaaauauagucauggcaucgaugucacagaccuuuucgcggcccagccaggucugaccagcgcagugauugaggcuuugcccagaaauaugguucucacuugucagggguccgaugacaucaagaaacuguuagauucucaaggcaggcgggacauaaagcugauugaugugucgcuaaacaaaaucgacagccgaaaguuugaaaaugccgucugggaucaguacaaggaccucugccacaugcauacaggagugguaguugaaaagaagaaaaagggcgggaaagaggagaucaccccucacugugcucugcuugauugcauuauguucgacgccgcaguguccggagguuugaacgccacgguccugcgcgcugugcucccaagagacauggucuuuaggaccucaagucccaaggugguucugugaggacuagucccuguucccagagcccacuuuuuuuucuuuuuuugaaauaaaauagccugucuuucagaucuaaaaaaaaaaaaaaaaaaaaaaaaaaaaaaaaaaaaaaaaaaaaaaaaaaaaaaaaaaaaaaaaugcaucccccccccccccccccccccccccccccccaaaggcucuuuucagagccaccagaauu

SEQ ID NO: 10186 - RNA, 2005 nt, Artificial Sequence
  mRNA product Design a-2 comprising derived and/or modified sequence from LASV(KAK-428;Clade n.d. (VII))__ANH09741__NP (opt3)
gggagaguccgcucagccagguugcagaagcggcuuagcguguguccuaaucuucucucugcguguagguaggccugugccgcaaacaagcuuaccaugagcaacuccaaggaggugaaaucuuuccuguggacccagucacucagaagggaacuuaguggcuacugcacaaauaucaagcugcaagucguuaaagacgcccaggcuuuguuacacgggcuggauuuuagcgagguguccaacguacagcggcuaaugcgcaagcagaaacgagacgauaaugaccucaagcgucugagagaucuuaaccaagcagugaauaaccuggucgaauugaagucugugcagcagaaaucgguucucaaggugggaacucucaauucagacgaucugcugacguuagccgcggaccuggagaaacuuaagagcaaagucgugaggaccgaacggcccuugaguuccgguguauauaugggcaaccugucuagccagcaacuagaucagcgcagagcucuccugaauaugauugggauggccggaggcucccaggguaaccagccuucaagggacgggguugugcgggucugggaugugaagaaugcagaccuucugaacaaucaauucggaacaaugccaaguuugacucucgccugucugaccaagcagggccagguggauuuaaacgacgucguucuggcucucacagaccuuggccugauauacaccgcaaaauauccgaauagcucugauuuggaccgccuaucccaaaaccaucccgugcugaacaugaucgauguaaauaagucaagccucaacauuaguggguacaauuuuucucugggagccgcugugaaagccggugcgugcaugcuugacggcgggaacaugcuggagacuaucaagauuuccccucagacagucgauggaaucuugaaaagcauacucaaggugaaacgagcacugggcauguucguuucggacaccccaggugagagaaaucccuaugaaaacaucuuauacaaggugugucugucugggaauggauggccuuauauugccuccaggacgucaaucgucggccgggcuugggagaacacugugguagaucuagaaaguaauaagaaccagccaaaaguuggcaauaacgggagcaauaagaugcuccaguccucuggauuugccaccggucugacauacagccaacuuaugacuuugcgugacucaaugcugcagcucgaucccaccgcaaaaacauggauugacaucgagggccgcccugaggauccaguggaacuggcucuuuuccagccgaguuccgggugcuacauacacuuuuucagagagcccaccgaccugaagcaguuuaaacaagacgccaaguauagccauggaauugaugucaacgacuuguucucugcgcagccuggccucacgucagccgugcuggaagcauuaccaaggaauaugguccugacuugucaggguagugaugacauccggaagcuacucgauagccaggaccgaaaagauauuaagcugaucgacaucucccuuucuaaagcugaugcccgcaaguuugagaacgacgugugggaucaauucaaagacuugugccacaugcauacagggauuguuguggaaaagaagaaaaagggcggaaaacaggagaugacuccccacugugcucugcucgauugcauaauguuugacgccgcaguaucgggcgggcugaacgucccuaccuuaagagccgugcugccaacagacaugguuuucaggaccaucacgaccaaggugguccuuugaggacuagucccuguucccagagcccacuuuuuuuucuuuuuuugaaauaaaauagccugucuuucagaucuaaaaaaaaaaaaaaaaaaaaaaaaaaaaaaaaaaaaaaaaaaaaaaaaaaaaaaaaaaaaaaaaugcaucccccccccccccccccccccccccccccccaaaggcucuuuucagagccaccagaauu

SEQ ID NO: 10187 - RNA, 2005 nt, Artificial Sequence; identical to SEQ ID NO: 10181
  mRNA product Design a-2 comprising derived and/or modified sequence from LASV(Pinneo-NIG-1969;Clade I)__AIT17837__NP (opt3)

SEQ ID NO: 10188 - RNA, 2005 nt, Artificial Sequence
  mRNA product Design a-2 comprising derived and/or modified sequence from LASV(ISTH0009-NIG-2011;Clade II)__AIT17405__NP (opt3)
gggagaguccgcucagccagguugcagaagcggcuuagcguguguccuaaucuucucucugcguguagguaggccugugccgcaaacaagcuuaccaugagcguguccaaggaggucaaaucuuuccuguggacccagucacucagaagggaacuuaguggcuacugcagcaacaucaagcugcaaguugugaaagacgcccaggcuuuguuacacgggcuggauuuuuccgagguaucuaaugugcagcggcuaaugcgcaagcagaaacgagacgauucggaccucaagcgucugagagaucuuaaccaagcagucaauaaccugguggaauugaagucaacacagcagaaaagcauucucaggguuggaacucugacgagugacgaucugcucaccuuagccgcggaccuggagaaacuuaaguccaaggugauacggacagaacgccccuugucuagcggugucuauaugggcaaucuguccacucagcaacuagagcagagaagggcucuccugaacaugaucgggauggugggaggcgcccaggguacccagccugggcgggauggaguaguucgcgugugggacgucaaaaauccagaucuucugaacaaucaauucggcacaaugccgucauugacccucgcaugucugacuaagcagggccagguggacuuaaacgaugccgugcuggcucucacagaccuugggcugauuuacaccgcaaaguaucccaauaguagcgacuuggaucgacuaucucaaucccauccuauccugaacauggucgacauuaaaaagucaagccucaauaucaguggauacaacuuuucucugggugccgcuguuaaagccggcgcgugcaugcuugaugggggaaauaugcuggagacgauaaaggugacuccacagaccauggacggcaucuugaaauccauucucaagguaaaaagaagccuggguauguucgugucggauacacccggggaaaggaacccuuaugagaacaucuuauacaagauuugucugucuggagacggcuggccauauaucgcaucccggacuucaauagucggccgugccugggaaaauaccacaguggaucuagagagugacgggaagccccagaaaguuggaagcgcugguuccaacaagucucuccagagcgccggcuuuccuaccgggcugacguacucacaacuuaugacuuugaaagauaguaugaugcagcuggacccauccgcaaagacauggauugauaucgagggacgcccggaagaccccguggagauugcucucuaccagccuaugagcggcugcuauauccacuucuuuagagaaccaaccgaccugaaacaguucaagcaagaugccaaguacucucaugguaucgacgucgcggaucuuuuucccgcccagccugggcugacuucagcagugauugaggcuuugccaaggaauaugguacucacaugucagggcagugacgauauaaaacggcuguuagacagccagggacgacgcgauaucaagcugauugacaucgcccuauccaaagcugauucuagaagguucgaaaacgccguuugggaccaaugcaaggaucucugucacaugcauaccggcguggucguggagaaaaagaagcgcgggggaaaagaggaaauaacgccccacugcgcacugauggacuguauuauguaugaugccgcugucucggguggccuuaauaucccgguguugcgggcgguucugccuagagacaugguguuuaggaccagcucccccaagguaguccucugaggacuagucccuguucccagagcccacuuuuuuuucuuuuuuugaaauaaaauagccugucuuucagaucuaaaaaaaaaaaaaaaaaaaaaaaaaaaaaaaaaaaaaaaaaaaaaaaaaaaaaaaaaaaaaaaaugcaucccccccccccccccccccccccccccccccaaaggcucuuuucagagccaccagaauu

SEQ ID NO: 10189 - RNA, 2005 nt, Artificial Sequence
  mRNA product Design a-2 comprising derived and/or modified sequence from LASV(ISTH2010-NIG-2012;Clade II)__AIT17483__NP (opt3)
gggagaguccgcucagccagguugcagaagcggcuuagcguguguccuaaucuucucucugcguguagguaggccugugccgcaaacaagcuuaccaugagcgccuccaaggaggugaaaucuuuccuguggacccagucacucagaagggaacuuaguggcuacugcagcaacaucaagcugcaagucguuaaagacgcucaggcauuguuacacgggcuggauuuuuccgaggugucuaauguacagcggcuaaugcgcaagcagaaacgagacgauucggaccucaagcgucugagagaucuuaaccaagccgugaauaaccuggucgaauugaagucaacacagcagaaaagcauucucagggugggaacucugacgagugacgaucugcucaccuuagcggcugaccuggagaaacuuaaguccaagguuauacggacagaacgccccuugucuagcgguguguauaugggcaaucuguccacucagcaacuagagcagagaagggcccuccugaaccuuaucgggauggucggaggcgcacaggguacccagccugggcgggauggagugguacgcguuugggacgugaaaaauccagaucuguugaacaaucaauucggcacaaugccgucacucacccuggccuguuuaacuaagcagggccaggucgaccugaacgaugcugugcucgcacuuacagaccugggguugauuuacaccgccaaguaucccaauaguagcgaccuagaucgacugucucaaucccauccuauccucaacaugguggacacgaaaaagucaagccugaauauuaguggauuuaacuucucucuuggugcugccgucaaagcgggcgcaugcaugcuggaugggggaaauauguuggagacuaucaagguuaccccacagacaauggacggcauacucaaauccauccugaaggugaaaaagagcuuagguauguuuguaucggauacucccggggaaagaaacccuuacgagaacauucuguauaagaucugucuaucuggagacggcuggccauacauugccuccaggaccucaaucgugggccgggcuugggaaaauacaaccgucgaucucgagagugacgggaaaccccacaaggugggaacggccgguagcaacaaaucccugcagucugcaggcuucccuacugggcuuacauauagccaguugaugacccugaaggauucaaugaugcaacucgacccaagugcuaaaacuuggauagauauugagggacguccggaagaccccguugagaucgcccuguaccagccuauguccggcugcuacauucacuuuuuccgcgaaccaacagaccuuaagcaguuuaagcaggaugcgaaauauagccaugguaucgacguggccgaucuguuccccgcacaaccuggguugaccucugcugucaucgaggcccucccaagaaauauggugcugacgugucagggcucagacgauauuaagagguuacuggacagucagggacggcgagauauaaaacuaaucgacauugcucucagcaaggccgauucccgcagauuugaaaacgcaguaugggaccagugcaaagaucugugucauaugcacaccggcguuguggucgagaagaagaaaaggggagggaaggaggaaaucacaccccacugcgcccuuauggacuguauaauguacgaugcugcggugucugguggcuugaauauuccgguccugcgggcagugcucccucgcgacaugguuuucagaacuucgagccccaaagugguacugugaggacuagucccuguucccagagcccacuuuuuuuucuuuuuuugaaauaaaauagccugucuuucagaucuaaaaaaaaaaaaaaaaaaaaaaaaaaaaaaaaaaaaaaaaaaaaaaaaaaaaaaaaaaaaaaaaugcaucccccccccccccccccccccccccccccccaaaggcucuuuucagagccaccagaauu

SEQ ID NO: 10190 - RNA, 2005 nt, Artificial Sequence
  mRNA product Design a-2 comprising derived and/or modified sequence from LASV(Lassa virus/H.sapiens-wt/NGA/2015/ISTH_0543;Clade II)__AVO03640__NP (opt3)
gggagaguccgcucagccagguugcagaagcggcuuagcguguguccuaaucuucucucugcguguagguaggccugugccgcaaacaagcuuaccaugagcgccuccaaggaggugaaaucuuuccuguggacccagucacucagaagggaacuuaguggcuacugcagcaacaucaagcugcaagucguuaaagacgcucaggcauuguuacacgggcuggauuuuuccgaggugucuaauguacagcggcuaaugcgcaagcagaaacgagacgauucggaccucaagcgucugagagaucuuaaccaagccgugaauaaccuggucgaauugaagucaacacagcagaaaagcauucucagggugggaacucugacgagugacgaucugcucaccuuagcggcugaccuggagaaacuuaaguccaagguuauacggacagaacgccccuugucuagcgguguguauaugggcaaucuguccacucagcaacuagagcagagaagggcccuccugaacaugaucgggauggucggaggcgcacaggguacccagccugggcgggauggagugguacgcguuugggacgugaaaaauccagaucuucugaacaaucaauucggcacaaugccgucauugacccucgccugucugacuaagcagggccaggucgacuuaaacgaugcugugcuggcacucacagaccuugggcugauuuacaccgccaaguaucccaauaguagcgacuuggaucgacuaucucaaucccauccuauccugaacaugguggacacgaaaaagucaagccucaauauuaguggauacaacuuuucucugggugcugccgucaaagcgggcgcaugcaugcuugaugggggaaauaugcuggagacuaucaagguuaccccacagacaauggacggcauauugaaauccauccucaaggugaaaaagagccuggguauguucguaucggauacucccggggaaagaaacccuuaugagaacauuuuauacaagaucugucugucuggagacggcuggccauauauugccuccaggaccucaaucgugggccgggcuugggaaaauacaaccgucgaucuagagagugacgggaaaccccagaaggugggaagcgccgguuccaacaaaucucuccagagcgcaggcuuuccuacggggcugacuuacucacaacuuaugacauugaaggauaguaugaugcagcuggacccauccgcuaaaaccuggauagauauugagggacguccggaagaccccguugagaucgcccucuaccagccuaugagcggcugcuauauucacuucuuucgcgaaccaacugaccugaagcaguucaagcaagaugcgaaauacucucaugguaucgacguggccgaucuuuuucccgcacagccugggcugacaucagcugucaucgaggccuugccaagaaauauggugcucaccugucagggcagugacgauauuaagaggcuguuagacagccagggacggaaagauauaaagcugaucgacauugcucuauccaaagccgauucucgacgcuucgaaaacgcaguaugggaccaaugcaaggaucucugucacaugcauacgggcguuguggucgagaagaaaaagagagggggaaaagaggaaaucacaccccacugcgcccugauggacuguauaauguaugaugcugcggugucggguggccuuaauauuccggucuugagggcagugcugccucgggacaugguuuuucgcaccagcucccccaaggugguacucugaggacuagucccuguucccagagcccacuuuuuuuucuuuuuuugaaauaaaauagccugucuuucagaucuaaaaaaaaaaaaaaaaaaaaaaaaaaaaaaaaaaaaaaaaaaaaaaaaaaaaaaaaaaaaaaaaugcaucccccccccccccccccccccccccccccccaaaggcucuuuucagagccaccagaauu

SEQ ID NO: 10191 - RNA, 2005 nt, Artificial Sequence
  mRNA product Design a-2 comprising derived and/or modified sequence from LASV(Lassa virus/H.sapiens-wt/NGA/2016/ISTH_0009;Clade II)__AVO03572__NP (opt3)
gggagaguccgcucagccagguugcagaagcggcuuagcguguguccuaaucuucucucugcguguagguaggccugugccgcaaacaagcuuaccaugagcgccuccaaggaggugaaaucuuuccuguggacccagucacucagaagggaacuuaguggcuacugcagcaacaucaagcugcaagucguuaaagacgcucaggcauuguuacacgggcuggauuuuuccgaggugucuaauguacagcggcuaaugcgcaagcagaaacgagacgauucggaccucaagcgucugagagaucuuaaccaagccgugaauaaccuggucgaauugaagucaacacagcagaaaagcauucucagggugggaacucugacgagugacgaucugcucaccuuagcggcugaccuggagaaacuuaaguccaagguuauacggacagaacgccccuugucuagcgguguguauaugggcaaucuguccacucagcaacuagagcagagaagggcccuccugaacaugaucgggauggucggaggcgcacaggguacccagccugggcgggauggagugguacgcguuugggacgugaaaaauccagaucuucugaacaaucaauucggcacaaugccgucauugacccucgccugucugacuaagcagggccaggucgacuuaaacgaugcugugcuggcacucacagaccuugggcugauuuacaccgccaaguaucccaauaguagcgacuuggaucgacuaucucaaucccauccuauccugaacaugguggacacgaaaaagucaagccucaauauuaguggauacaacuuuucucugggugcugccgucaaagcgggcgcaugcaugcuugaugggggaaauaugcuggagacuaucaagguuaccccacagacaauggacggcauauugaaauccauccucaaggugaaaaagagccuggguauguucguaucggauacucccggggaaagaaacccuuaugagaacauuuuauacaagaucugucugucuggagacggcuggccauauauugccuccaggaccucaaucgugggccgggcuugggaaaauacaaccgucgaucuagagagugacgggaaaccccagaaggugggaagcgccgguuccaacaaaucucuccagagcgcaggcuuuccuacggggcugacuuacucacaacuuaugacauugaaggauaguaugaugcagcuggacccauccgcuaaaaccuggauagauauugagggacguccggaagaccccguugagaucgcccucuaccagccuaugagcggcugcuauauucacuucuuucgcgaaccaacugaccugaagcaguucaagcaagaugcgaaauacucucaugguaucgacguggccgaucuuuuucccgcacagccugggcugacaucagcugucaucgaggccuugccaagaaauauggugcucaccugucagggcagugacgauauuaagaggcuguuagacagccagggacggcgagauauaaaacugaucgacauugcucuauccaaggccgauucucgcagauucgaaaacgcaguaugggaccaaugcaaagaucucugucacaugcauacgggcguuguggucgagaagaagaaaaggggagggaaggaggaaaucacaccccacugcgcccugauggacuguauaauguaugaugcugcggugucggguggccuuaauauuccggucuugcgggcagugcugccucgcgacaugguuuuuagaaccagcucccccaaagugguacucugaggacuagucccuguucccagagcccacuuuuuuuucuuuuuuugaaauaaaauagccugucuuucagaucuaaaaaaaaaaaaaaaaaaaaaaaaaaaaaaaaaaaaaaaaaaaaaaaaaaaaaaaaaaaaaaaaugcaucccccccccccccccccccccccccccccccaaaggcucuuuucagagccaccagaauu

SEQ ID NO: 10192 - RNA, 2005 nt, Artificial Sequence
  mRNA product Design a-2 comprising derived and/or modified sequence from LASV(Lassa virus/H.sapiens-wt/NGA/2016/ISTH_0017;Clade II)__AVO03568__NP (opt3)
gggagaguccgcucagccagguugcagaagcggcuuagcguguguccuaaucuucucucugcguguagguaggccugugccgcaaacaagcuuaccaugagcgccuccaaggaggugaaaucuuuccuguggacccagucacucagaagggaacuuaguggcuacugcagcuccaucaagcugcaagucguuaaagacgcucaggcauuguuacacgggcuggauuuuucugaggugucgaacguacagcggcuaaugcgcaagcagaaacgagacgauucagaccucaagcgucugagagaucuuaaucaagccgugaacaaucuggucgaacuuaagagcacacagcagaaaaguauucucagggugggaacucugacguccgacgaucugcucaccuuagcggcugaccuggagaaguugaaaucuaagguuauacggacagaacgccccuugagcuccgguguguauaugggcaaccugucaacucagcaacuagagcagagaagggcccuccugaauaugaucgggauggcaggaggcgcccaggguacccagccugggcgggauggagucgugcgcguaugggacguuaaaaacccagaucuucugaauaaccaauucggcacaaugccgaguuugacccucgcuugucugacuaagcagggccagguggacuuaaaugaugcaguccuggcccucacagaccuugggcugauuuacaccgcuaaguaucccaacagcucugacuuggaucgacuaucccaaucacauccuauccugaauaugguggacacgaaaaagagcagucucaacauuucuggauacaauuuuucccugggugccgcggugaaagcaggcgccugcaugcuugaugggggaaacaugcuggagacuaucaaggucaccccacagacaauggacggcauauugaaaagcauccucaagguuaaaagaucgcuggguauguucgugucugaugcucccggggaaaggaauccuuaugagaacauuuuauacaagaucugucuguccggagacggcuggccauauauugccucacggaccaguaucguaggccgugcaugggaaaacaccacaguggaucuagagagcgacgggaagccccagaaagucggagcuaccgguuccaauaagucucuccagagcgccggcuuuccuacggggcugacuuacucacaacuuaugacauugaaagauaguaugaugcagcuggacccauccgcgaagaccuggauagauauugagggacgcccggaagaccccguggagguugcccucuaccagccugugagcggcugcuauauccacuucuuuagagaaccaacugaccugaaacaguucaagcaagaugcaaaguacucucaugguauugacgucgcugaucuuuuucccgcccagccugggcugacaucagcugugaucgaggccuugccaaggaacaugguacucaccugucagggcagugacgauaucaaaaagcuguuagacagccagggacggaaagauauuaagcugauagacaucgcacuauccaaagccgauucucgacgcuucgaaaaugcuguuugggaccaaugcaaggaucucugucacaugcauacgggcguggucguggagaagaaaaagagagggggaaaagaggaaauuacuccccacugcgcgcugauggacuguaucauguaugaugcagccgucucggguggccuuaacauaccgguguugagggcuguucugccucgggacaugguguuucgcacaagcucccccaagguaguccucugaggacuagucccuguucccagagcccacuuuuuuuucuuuuuuugaaauaaaauagccugucuuucagaucuaaaaaaaaaaaaaaaaaaaaaaaaaaaaaaaaaaaaaaaaaaaaaaaaaaaaaaaaaaaaaaaaugcaucccccccccccccccccccccccccccccccaaaggcucuuuucagagccaccagaauu

SEQ ID NO: 10193 - RNA, 2005 nt, Artificial Sequence
  mRNA product Design a-2 comprising derived and/or modified sequence from LASV(Lassa virus/H.sapiens-wt/NGA/2018/ISTH_0959;Clade II)__AVV65100__NP (opt3)
gggagaguccgcucagccagguugcagaagcggcuuagcguguguccuaaucuucucucugcguguagguaggccugugccgcaaacaagcuuaccaugagcgccuccaaggaggugaaaucuuuccuguggacccagucacucagaagggaacuuaguggcuacugcagcaacaucaagcugcaagucguuaaagacgcucaggcauuguuacacgggcuggauuuuuccgaggugucuaauguacagcggcuaaugcgcaagcagaaacgagacgauucggaccucaagcgucugagagaucuuaaccaagccgugaauaaccuggucgaauugaagucaacacagcagaaaagcauucucagggugggaacucugacgagugacgaucugcucaccuuagcggcugaccuggagaaacuuaaguccaagguuauacggacagaacgccccuugucuagcgguguguauaugggcaaucuguccacucagcaacuagagcagagaagggcccuccugaaccuuaucgggauggucggaggcgcacaggguacccagccugggcgggauggagugguacgcguuugggacgugaaaaauccagaucuguugaacaaucaauucggcacaaugccgucacucacccuggccuguuuaacuaagcagggccaggucgaccugaacgauguggugcucgcucuuacagaccugggguugauuuacaccgcaaaguaucccaauaguagcgaccuagaucgacugucucaaucccauccuauccucaacauggucgacacgaaaaagucaagccugaauauuaguggauuuaacuucucucuuggugccgcuguuaaagccggcgcgugcaugcuggaugggggaaauauguuggagacuaucaaggugaccccacagacaauggacggcauacucaaauccauccugaaggugaaaaagagcuuagguauguuuguaucggauacucccggggaaagaaacccuuacgagaacauucuguauaagaucugucuaucuggagacggcuggccauacauugcauccaggaccucaaucgucggccgggccugggaaaauacaaccguggaucucgagagugacgggaaaccccacaagguuggaacggcugguagcaacaaaucccugcagucugccggcuucccuacugggcuuacauauagccaguugaugacccugaaggauucaaugaugcaacucgacccaagugcaaaaacuuggauagauauugagggacguccggaagaccccguggagaucgcucuguaccagccuauguccggcugcuacauucacuuuuuccgcgaaccaacagaccuuaagcaguuuaagcaggaugccaaauauagccaugguaucgacgucgcggaucuguuccccgcccaaccuggguugaccucugcagugaucgaggcucucccaagaaauaugguacugacgugucagggcucagacgauauuaagagguuacuggacagucagggacggaaagauauaaagcuaaucgacauugcccucagcaaaaccgauucccgacgcuuugaaaacgcuguuugggaccagugcaaggaucugugucauaugcacacaggcguggucguggagaagaaaaagagagggggaaaagaggaaaucacuccccacugcgcccuuauggacuguauaauguacgaugcagccgucucugguggcuugaauauuccggugcugagggcuguucucccucgggacaugguguuccgcaccucgagccccaagguaguccugugaggacuagucccuguucccagagcccacuuuuuuuucuuuuuuugaaauaaaauagccugucuuucagaucuaaaaaaaaaaaaaaaaaaaaaaaaaaaaaaaaaaaaaaaaaaaaaaaaaaaaaaaaaaaaaaaaugcaucccccccccccccccccccccccccccccccaaaggcucuuuucagagccaccagaauu

SEQ ID NO: 10194 - RNA, 2005 nt, Artificial Sequence
  mRNA product Design a-2 comprising derived and/or modified sequence from LASV(LASV003-NIG-2008;Clade II)__AIT17581__NP (opt3)
gggagaguccgcucagccagguugcagaagcggcuuagcguguguccuaaucuucucucugcguguagguaggccugugccgcaaacaagcuuaccaugagcgccuccaaggaggugaaaucuuuccuguggacccagucacucagaagggaacuuaguggcuacugcagcuccaucaagcugcaagucguuaaagacgcucaggcauuguuacacgggcuggauuuuucugaggugucgaacguacagcggcuaaugcgcaagcagaaacgagacgauucagaccucaagcgucugagagaucuuaaucaagccgugaacaaucuggucgaacuuaagagcacacagcagaaaagugugcucaggguuggaacucugacguccgacgaucugcucaccuuagcggcugaccuggagaaguugaaaucuaaggugauucggacagaacgccccuugagcuccggugucuauaugggcaaccugucagcccagcaacuagagcagagaaggacucuccugaauaugauagggauggugggaggcgcacaggguacccagccugggcgggauggaguaguucgcgugugggacgucaaaaacccagaucuucugaauaaccaauucggcacaaugccgaguuugacccucgccugucugacuaagcagggccagguggacuuaaaugaugugguccuggcucucacagaccuugggcugaucuacaccgcaaaguaucccaacagcucugacuuggaucgacuaucccaaucacauccuauucugagcaugguugacacgaaaaagaguucucucaauaucuccggauacaacuuuagccugggugccgcugugaaagccggcgcgugcaugcuugaugggggaaauaugcuggagacuauuaagguaaccccacagacaauggacggcaucuugaaaucgauacucaaggugaaaaagucucuggguauguucgucuccgauacucccggggaaagaaacccuuaugagaauaucuuauacaagauuugucugucaggagacggcuggccauauaucgcaaguaggaccagcauugugggccgggccugggaaaacacaaccguugaucuagaguccgacgggaaaccccagaaggugggaacggcugguucuaacaaaagccuccagucagccggcuuuccuacugggcugacauacagucaacuuaugaccuugaaggauuccaugaugcagcuggacccaagcgcaaaaacuuggaucgauauagagggacguccggaagaccccgucgagauugcucucuaccagccuaugucuggcugcuauauccacuucuuucgcgaaccaacagaccugaagcaguucaagcaagaugccaaauacucacaugguauugacgugaccgaucuuuuucccgcgcagccugggcugacgagugccguaaucgaggcauugccaagaaauaugguucucaccugucagggcagcgacgauaucaagaggcuguuagacucccagggacggcgagauauuaaacugauagacaucgcucuaucuaaggccgauucgcgcagauucgaaaacgcugugugggaccaaugcaaagaucucugucacaugcauacaggcgucguggucgagaagaagaaaaggggagggaaggaggaaauuacuccccacugcgcccugauggacuguaucauguaugaugcagccgugagcgguggccuuaauauaccgguuuugcgggcugugcugccucgcgacaugguauuuagaaccuccucacccaaagucgugcucugaggacuagucccuguucccagagcccacuuuuuuuucuuuuuuugaaauaaaauagccugucuuucagaucuaaaaaaaaaaaaaaaaaaaaaaaaaaaaaaaaaaaaaaaaaaaaaaaaaaaaaaaaaaaaaaaaugcaucccccccccccccccccccccccccccccccaaaggcucuuuucagagccaccagaauu

SEQ ID NO: 10195 - RNA, 2005 nt, Artificial Sequence
  mRNA product Design a-2 comprising derived and/or modified sequence from LASV(LASV035-NIG-2009;Clade II)__AIT17589__NP (opt3)
gggagaguccgcucagccagguugcagaagcggcuuagcguguguccuaaucuucucucugcguguagguaggccugugccgcaaacaagcuuaccaugagcgccuccaaggaggugaaaucuuuccuguggacccagucacucagaagggaacuuaguggcuacugcagcuccaucaagcugcaagucguuaaagacgcucaggcauuguuacacgggcuggauuuuucugaggugucgaacguacagcggcuaaugcgcaagcagaaacgagacgauucagaccucaagcgucugagagaucuuaaucaagccgugaacaaucuggucgaacuuaagagcacacagcagaaaaguauucucagggugggaacucugacguccgacgaucugcucaccuuagcggcugaccuggagaaguugaaaucuaagguuauacggacagaacgccccuugagcuccgguguguauaugggcaaccugucagcccagcaacuagagcagagaagggcacuccugaauaugaucgggauggucggaggcgcccaggguacucagccugggcgggauggagugguacgcguuugggacgugaaaaacccagaucuucugaauaaccaauucggcaccaugccgaguuugacacucgcuugucugaccaagcagggccaggucgacuuaaaugaugcagugcuggcccucacugaccuugggcugauuuacacagcuaaguaucccaacagcucugacuuggaucgacuaucccaaucacauccuauccugaauaugguggacaccaaaaagagcagucucaacauuucuggauacaauuuuucccugggugccgcggucaaagcaggcgccugcaugcuugaugggggaaacaugcuggagacgaucaagguuacuccacagaccauggacggcauauugaaaagcauccucaaggugaaaagaucgcuggguauguucguaucugauacacccggggaaaggaauccuuaugagaacauuuuauacaagaucugucuguccggagacggcuggccauauauugcuucacggaccaguaucgugggccgugccugggaaaacacuacagucgaucuagagagcgacgggaagccccagaaagugggaaccacggguuccaauaagucucuccagagcgcaggcuuuccuacugggcugacauacucacaacuuaugaccuugaaagauaguaugaugcagcuggacccauccgcuaagacuuggauagauauugagggacgcccggaagaccccguugagaucgcccucuaccagccuaugagcggcugcuauauucacuucuuuagagaaccaacagaccugaaacaguucaagcaagaugcgaaguacucucaugguaucgacguggccgaucuuuuucccgcacagccugggcugaccucagcugucaucgaggccuugccaaggaacauggugcucacgugucagggcagugacgauauuaaaaagcuguuagacagccagggacggcgagauauaaaacugaucgacauugcucuauccaaggccgauucucgcaaauucgaaaaugcaguaugggaccaaugcaaggaucucugucacaugcauaccggcguuguggucgagaagaaaaagagagggggaaaagaggaaaucacaccccacugcgcccugauggacuguauaauguaugaugcugcggugucggguggccuuaacauuccggucuugagggcagugcugccucgggacaugguuuuucgcacuagcucccccaaggugguacucugaggacuagucccuguucccagagcccacuuuuuuuucuuuuuuugaaauaaaauagccugucuuucagaucuaaaaaaaaaaaaaaaaaaaaaaaaaaaaaaaaaaaaaaaaaaaaaaaaaaaaaaaaaaaaaaaaugcaucccccccccccccccccccccccccccccccaaaggcucuuuucagagccaccagaauu

SEQ ID NO: 10196 - RNA, 2005 nt, Artificial Sequence
  mRNA product Design a-2 comprising derived and/or modified sequence from LASV(LASV1000-NIG-2009;Clade II)__AIT17783__NP (opt3)
gggagaguccgcucagccagguugcagaagcggcuuagcguguguccuaaucuucucucugcguguagguaggccugugccgcaaacaagcuuaccaugagcgccuccaaggaggugaaaucuuuccuguggacccagucacucagaagggaacuuaguggcuacugcagcaacaucaagcugcaagucguuaaagacgcucaggcauuguuacacgggcuggauuuuuccgaggugucuaauguacagcggcuaaugcgcaagcagaaacgagacgauucggaccucaagcgucugagagaucuuaaccaagccgugaauaaccuggucgaauugaagucaacacagcagaaaagcauucucagggugggaacucugacgagugacgaucugcucaccuuagcggcugaccuggagaaacuuaaguccaagguuauacggacagaacgccccuugucuagcgguguguauaugggcaaucuguccacucagcaacuagagcagagaagggcccuccugaacaugaucgggauggucggaggcgcacaggguacccagccugggcgggauggagugguacgcguuugggacgugaaaaauccagaucuucugaacaaucaauucggcacaaugccgucauugacccucgccugucugacuaagcagggccaggucgacuuaaacgauguggugcuggcucucacagaccuugggcugauuuacaccgcaaaguaucccaauaguagcgacuuggaucgacuaucucaaucccauccuauccugaacauggucgacacgaaaaagucaagccucaauauuaguggauacaacuuuucucugggugccgcuguuaaagccggcgcgugcaugcuugaugggggaaauaugcuggagacuaucaaggugaccccacagacaauggacggcauauugaaauccauccucaaggugaaaaagagccuggguauguucguaucggauacucccggggaaagaaacccuuaugagaacauuuuauacaagaucugucugucuggagacggcuggccauauauugcauccaggaccucaaucgucggccgggccugggaaaauacaaccguggaucuagagagugacgggaaaccccagaagguuggaacggcugguagcaacaaaucccuccagucugccggcuuuccuacugggcugacauacagccaacuuaugaccuugaaggauucaaugaugcagcuggacccaagugcaaaaacuuggauagauauugagggacguccggaagaccccguggagaucgcucucuaccagccugucuccggcugcuauauucacuucuuucgcgaaccaacagaccugaagcaguucaagcaagaugccaaauacagccaugguaucgacguggcggaucuuuuucccgcccagccugggcugaccucugcaguaaucgaggcuuugccaagaaauaugguucucacgugucagggcucagacgauauuaagaggcuguuagacagucagggacggcgagauauaaaacugaucgacauugcccuaagcaaggcugauucccgcagauucgaaaacgccgugugggaccaaugcaaagaucucugucacaugcauaccggcgucguggucgagaagaagaaaaggggagggaaggaggaaaucacaccccacugcgcacugauggacuguauaauguaugaugccgcugugucugguggccuuaauauuccgguuuugcgggcggugcugccucgcgacaugguauuuagaacuucgagccccaaagucgugcucugaggacuagucccuguucccagagcccacuuuuuuuucuuuuuuugaaauaaaauagccugucuuucagaucuaaaaaaaaaaaaaaaaaaaaaaaaaaaaaaaaaaaaaaaaaaaaaaaaaaaaaaaaaaaaaaaaugcaucccccccccccccccccccccccccccccccaaaggcucuuuucagagccaccagaauu

SEQ ID NO: 10197 - RNA, 2005 nt, Artificial Sequence
  mRNA product Design a-2 comprising derived and/or modified sequence from LASV(LASV221-NIG-2010;Clade II)__AIT17625__NP (opt3)
gggagaguccgcucagccagguugcagaagcggcuuagcguguguccuaaucuucucucugcguguagguaggccugugccgcaaacaagcuuaccaugagcgccuccaaggaggugaaaucuuuccuguggacccagucacucagaagggaacuuaguggcuacugcagcuccaucaagcugcaagucguuaaagacgcucaggcauuguuacacgggcuggauuuuucugaggugucgaacguacagcggcuaaugcgcaagcagcgacgugacgauucagaccucaaaagacugagggaucuuaaucaagccgugaacaaucuggucgaacucaagagcacacagcagaagaguauuuugcgggugggaacucugacguccgacgaucugcucaccuuagcggcugaccuggagaaacuuaagucuaaaguuauacgcacagaaagacccuugagcuccgguguguauaugggcaaccugucaacucagcaacuagagcagaggcgggcccuccugaauaugaucgggauggucggaggcgcacaggguacccagccugggcgcgauggagugguacgaguuugggacgugaagaacccagaucuucugaauaaccaauucggcacaaugccgaguuugacccucgccugucugacuaaacagggccaggucgacuuaaaugaugcugugcuggcacucacagaccuugggcugauuuacaccgccaaguaucccaacagcucugacuuggauagacuaucccaaucacauccuauccugaauaugguggacacgaagaaaagcagucucaacauuucuggauacaauuuuucccugggugcugccgucaaggcgggcgcaugcaugcuugaugggggaaacaugcuggagacuaucaaaguuaccccacagacaguggacggcauacucaagagcaucuugaaaguaaagaggucgcuggguauguucgugucugauacucccggggaacggaauccuuaugagaacauuuuauacaaaaucugucuguccggagacggcuggccauauauugccucacguaccaguaucgucggccgcgcuugggaaaacacaaccguggaucuagagagcgacgggaagccccagaagguuggaacggccgguuccaauaaaucucuccagagcgcaggcuuuccuacugggcugacauacucacaacuuaugaccuugaaggauaguaugaugcagcuggacccauccgcuaaaacuuggauagauauugagggaagaccggaagaccccguggagaucgcccucuaccagccuaugagcggcugcuauauucacuucuuuagggaaccaacagaccugaagcaguucaaacaagaugcgaaguacucucaugguaucgacgucgccgaucuuuuucccgcacagccugggcugaccucagcugugaucgaggccuugccacggaacaugguacucacgugucagggcagugacgauauuaagcgacuguuagacagccagggacgcagagauauaaaacugaucgacauugcucuauccaaggccgauucuaggaaauucgaaaaugcaguuugggaccaaugcaaggaucucugucacaugcauaccggcguggucguggagaaaaagaagcgcgggggaaaagaggaaaucacaccccacugcgcccugauggacuguauaauguaugaugcugcggucucggguggccuuaacauuccgguguugcgggcaguucugccuagagacaugguguuuaggacuagcucccccaagguaguccucugaggacuagucccuguucccagagcccacuuuuuuuucuuuuuuugaaauaaaauagccugucuuucagaucuaaaaaaaaaaaaaaaaaaaaaaaaaaaaaaaaaaaaaaaaaaaaaaaaaaaaaaaaaaaaaaaaugcaucccccccccccccccccccccccccccccccaaaggcucuuuucagagccaccagaauu

SEQ ID NO: 10198 - RNA, 2005 nt, Artificial Sequence
  mRNA product Design a-2 comprising derived and/or modified sequence from LASV(LASV237-NIG-2010;Clade II)__AIT17639__NP (opt3)
gggagaguccgcucagccagguugcagaagcggcuuagcguguguccuaaucuucucucugcguguagguaggccugugccgcaaacaagcuuaccaugagcgccuccaaggaggugaaaucuuuccuguggacccagucacucagaagggaacuuaguggcuacugcagcaacaucaagcugcaagucguuaaagacgcucaggcauuguuacacgggcuggauuuuuccgaggugucuaauguacagcggcuaaugcgcaagcagaaacgagacgauucggaccucaagcgucugagagaucuuaaccaagccgugaauaaccuggucgaauugaagucaacacagcagaaaagcauucucagggugggaacucugacgagugacgaucugcucaccuuagcggcugaccuggagaaacuuaaguccaagguuauacggacagaacgccccuugucuagcgguguguauaugggcaaucuguccacucagcaacuagagcagagaagggcccuccugaacaugaucgggauggucggaggcgcacaggguacccagccugggcgggauggagugguacgcguuugggacgugaaaaauccagaucuucugaacaaucaauucggcacaaugccgucauugacccucgccugucugacuaagcagggccaggucgacuuaaacgaugcugugcuggcacucacagaccuugggcugauuuacaccgccaaguaucccaauaguagcgacuuggaucgacuaucucaaucccauccuauccugaacaugguggacauuaaaaagucaagccucaauaucaguggauacaacuuuucucugggugcugccgucaaagcgggcgcaugcaugcuugaugggggaaauaugcuggagacgauaaagguuacuccacagaccauggacggcaucuugaaauccauucucaaggugaaaagaagccuggguauguucguaucggauacacccggggaaaggaacccuuaugagaacaucuuauacaagauuugucugucuggagacggcuggccauauaucgccucccggacuucaauagugggccgugcuugggaaaauaccacagucgaucuagagagugacgggaagccccagaaagugggaagcgccgguuccaacaagucucuccagagcgcaggcuuuccuaccgggcugacguacucacaacuuaugacuuugaaagauaguaugaugcagcuggacccauccgcuaagacauggauugauaucgagggacgcccggaagaccccguugagauugcccucuaccagccuaugagcggcugcuauauccacuucuuuagagaaccaaccgaccugaaacaguucaagcaagaugcgaaguacucucaugguaucgacguggccgaucuuuuucccgcacagccugggcugacuucagcugucauugaggccuugccaaggaauauggugcucacaugucagggcagugacgauauaaaacggcuguuagacagccagggacgacgcgauaucaagcugauugacaucgcucuauccaaagccgauucuagaagguucgaaaacgcaguaugggaccaaugcaaggaucucugucacaugcauaccggcguuguggucgagaaaaagaagcgcgggggaaaagaggaaauaacgccccacugcgcccugauggacuguauuauguaugaugcugcggugucggguggccuuaauaucccggucuugcgggcagugcugccuagagacaugguuuuuaggaccagcucccccaaggugguacucugaggacuagucccuguucccagagcccacuuuuuuuucuuuuuuugaaauaaaauagccugucuuucagaucuaaaaaaaaaaaaaaaaaaaaaaaaaaaaaaaaaaaaaaaaaaaaaaaaaaaaaaaaaaaaaaaaugcaucccccccccccccccccccccccccccccccaaaggcucuuuucagagccaccagaauu

SEQ ID NO: 10199 - RNA, 2005 nt, Artificial Sequence
  mRNA product Design a-2 comprising derived and/or modified sequence from LASV(LASV253-NIG-2011;Clade II)__AIT17671__NP (opt3)
gggagaguccgcucagccagguugcagaagcggcuuagcguguguccuaaucuucucucugcguguagguaggccugugccgcaaacaagcuuaccaugagcgccuccaaggaggugaaaucuuuccuguggacccagucacucagaagggaacuuaguggcuacugcagcuccaucaagcugcaagucguuaaagacgcucaggcauuguuacacgggcuggauuuuucugaggugucgaacguacagcggcuaaugcgcaagcagaaacgagacgauucagaccucaagcgucugagagaucuuaaucaagccgugaacaaucuggucgaacuuaagagcacacagcagaaaagugugcucaggguuggaacucugacguccgacgaucugcucaccuuagcggcugaccuggagaaguugaaaucuaaggugauucggacagaacgccccuugagcuccggugucuauaugggcaaccugucaacucagcaacuagagcagagaagggcccuccugaauaugauagggauggugggaggcgcacaggguacccagccugggcgggauggaguaguucgcgugugggacgucaaaaacccagaucuucugaauaaccaauucggcacaaugccgaguuugacccucgccugucugacuaagcagggccagguggacuuaaaugaugugguccuggcucucacagaccuugggcugaucuacaccgcaaaguaucccaacagcucugacuuggaucgacuaucccaaucacauccuauucugaauaugguugacacgaaaaagagcagucucaacaucucuggauacaauuuuucccugggugccgcugugaaagccggcgcgugcaugcuugaugggggaaacaugcuggagacuauuaagguaaccccacagacaauggacggcaucuugaaaagcauacucaaggugaaaaagucgcuggguauguucgucucugauacucccggggaaagaaauccuuaugagaacaucuuauacaagauuugucuguccggagacggcuggccauauaucgcaucaaggaccaguauugugggccgggccugggaaaacacaaccguugaucuagagagcgacgggaaaccccagaaggugggaacggcugguuccaauaaaucucuccagagcgccggcuuuccuacugggcugacauacucacaacuuaugaccuugaaggauaguaugaugcagcuggacccauccgcaaaaacuuggaucgauauagagggacguccggaagaccccgucgagauugcucucuaccagccuaugagcggcugcuauauccacuucuuucgcgaaccaacagaccugaagcaguucaagcaagaugccaaauacucucaugguauugacgugaccgaucuuuuucccgcgcagccugggcugacgucagccguaaucgaggcauugccaagaaacaugguucucaccugucagggcagugacgauaucaagaggcuguuagacagccagggacggcgagauauuaaacugauagacaucgcucuauccaaggccgauucucgcagauucgaaaaugcugugugggaccaaugcaaagaucucugucacaugcauacaggcgucguggucgagaagaagaaaaggggagggaaggaggaaauuacuccccacugcgcccugauggacuguaucauguaugaugcagccgugucggguggccuuaacauaccgguuuugcgggcugugcugccucgcgacaugguauuuagaaccagcucccccaaagucgugcucugaggacuagucccuguucccagagcccacuuuuuuuucuuuuuuugaaauaaaauagccugucuuucagaucuaaaaaaaaaaaaaaaaaaaaaaaaaaaaaaaaaaaaaaaaaaaaaaaaaaaaaaaaaaaaaaaaugcaucccccccccccccccccccccccccccccccaaaggcucuuuucagagccaccagaauu

SEQ ID NO: 10200 - RNA, 2005 nt, Artificial Sequence
  mRNA product Design a-2 comprising derived and/or modified sequence from LASV(LASV254-NIG-2011;Clade II)__AIT17675__NP (opt3)
gggagaguccgcucagccagguugcagaagcggcuuagcguguguccuaaucuucucucugcguguagguaggccugugccgcaaacaagcuuaccaugagcgccuccaaggaggugaaaucuuuccuguggacccagucacucagaagggaacuuaguggcuacugcagcuccaucaagcugcaagucguuaaagacgcucaggcauuguuacacgggcuggauuuuucugaggugucgaacguacagcggcuaaugcgcaagcagaaacgagacgauucagaccucaagcgucugagagaucuuaaucaagccgugaacaaucuggucgaacucaagagcacacagcagaaaaguguguugaggguuggaacucugacguccgacgaucugcucaccuuagcggcugaccuggagaaacuuaaaucuaaggugauucggacagaacgccccuugagcuccggugucuauaugggcaaccugucaacucagcaacuagagcagagaagggcccuccugaauaugauagggauggugggaggcgcacaggguacccagccugggcgggauggaguaguucgcgugugggacgucaaaaacccagaucuucugaauaaccaauucggcacaaugccgaguuugacccucgccugucugacuaagcagggccagguggacuuaaaugaugcugugcuggcacucacagaccuugggcugaucuacaccgccaaguaucccaacagcucugacuuggaucgacuaucccaaucacauccuauucugaauauggucgacacgaaaaagagcagucucaacaucucuggauacaauuuuucccugggugcugccguuaaagcgggcgcaugcaugcuugaugggggaaacaugcuggagacuauuaaggugaccccacagacaauggacggcaucuugaaaagcauacucaagguaaagaagucgcuggguauguucgugucugauacucccggggaaagaaauccuuaugagaacaucuuauacaagauuugucuguccggagacggcuggccauauaucgccucaaggaccaguauugucggccgggcuugggaaaacacaaucguggaucuagagagcgacgggaaaccccagaagguuggaaccgccgguuccaauaaaucucuccagagcgcaggcuuuccuacggggcugacuuacucacaacuuaugacauugaaggauaguaugaugcagcuggacccauccgcuaaaaccuggauagauauugagggacguccggaagaccccguggagaucgcccucuaccagccuaugagcggcugcuauauucacuucuuucgcgaaccaacugaccugaagcaguucaagcaagaugcgaaauacucucaugguaucgacgucgccgaucuuuuucccgcacagccugggcugacaucagcugugaucgaggccuugccaagaaacaugguacucaccugucagggcagugacgauauuaagaggcuguuagacagccagggacggcgagauauaaaacugaucgacauugcucuauccaaggccgauucucgcagauucgaaaaugcaguuugggaccaaugcaaagaucucugucacaugcauacgggcguggucguggagaagaagaaaaggggagggaaggaggaaaucacaccccacugcgcccugauggacuguauaauguaugaugcugcggucucggguggccuuaacauuccgguguugcgggcaguucugccucgcgacaugguguuuagaaccagcucccccaaaguaguccucugaggacuagucccuguucccagagcccacuuuuuuuucuuuuuuugaaauaaaauagccugucuuucagaucuaaaaaaaaaaaaaaaaaaaaaaaaaaaaaaaaaaaaaaaaaaaaaaaaaaaaaaaaaaaaaaaaugcaucccccccccccccccccccccccccccccccaaaggcucuuuucagagccaccagaauu

SEQ ID NO: 10201 - RNA, 2005 nt, Artificial Sequence
  mRNA product Design a-2 comprising derived and/or modified sequence from LASV(Nig08-04;Clade II)__ADU56611__NP (opt3)
gggagaguccgcucagccagguugcagaagcggcuuagcguguguccuaaucuucucucugcguguagguaggccugugccgcaaacaagcuuaccaugagcgccuccaaggaggugaaaucuuuccuguggacccagucacucagaagggaacuuaguggcuacugcagcaacaucaagcugcaagucguuaaagacgcucaggcauuguuacacgggcuggauuuuuccgaggugucuaauguacagcggcuaaugcgcaagcagaaacgagacgauggagaccucaagcgucugagagaucuuaaccaagccgugaauaaccuggucgaauugaagucgacacagcagaaaucagugcucaggguugguacucugacgagcgacgaucugcucaccuuagcggcugaccuggagaaacuuaagaguaaggugauucggacagaacgccccuuguccucuggcgucuauauggggaaucugagcacucagcaacuagagcagagaaaagcccuccuguccaugauaggaauggugggcggugcacaggggacccagccuggaagggauggcguaguucgggugugggacgucaagaacccagaucuucugaauaaccaauucggcacaaugccgucauugacccucgccugucugacuaagcagggacagguggacuuaaaugaugcugugcuggcacucacagaccuugggcugaucuacaccgccaaauaucccaacaguagcgacuuggaucgccuaucucaaucccauccuauucugaauauggucgacacgaagaaaucaagccucaacaucagugguuacaauuuuucucugggcgcugccguuaaggcgggggcaugcaugcuugauggaggcaacaugcuggagacuauuaaagugaccccacagacaauggacgguaucuugaaguccauacucaaaguaaagcgaagccuggggauguucgugucggauacucccggagaaagaaauccuuaugagaacaucuuauacaagauuugucugucuggcgacggcuggccauauaucgccuccaggaccucaauugucgggcgggcuugggaaaacacaaccguggaucuagagagugacggaaaaccccagaagguugguacggccggcagcaauaaaucccuccagucugcaggguuuccuacuggacugacauacagccaacuuaugaccuugaaggauucaaugaugcagcuggacccaagugcuaaaacuuggaucgauauagagggccguccggaagaccccguggagauugcccucuaccagccuauguccgguugcuauauccacuucuuucgcgaaccaacagaccugaagcaguucaagcaagaugcgaaauacagccaugggauugacgucaccgaucuguuuucugcccagcccggccuuacgucagcagugaucgaggcuuugccuagaaacaugguacucaccugucagggaagugacgauaucaagaaacuguuagacagccagggcaggcgggauauuaagcugauagacaucucccuaaauaaagccgauucucgacgcuucgaaaacgcuguuugggaccaaugcaaggaucucugucacaugcauacagggguggucguggagaagaaaaagagaggagguaaagaggaaauuacuccacacugcgcccugauggacuguaucauguuugaugcagccgucucgggcgggcuuaauauacccauuuugagggcugugcugccgcgggacaugguuuuccgcaccagcuccccuaaggugguacucugaggacuagucccuguucccagagcccacuuuuuuuucuuuuuuugaaauaaaauagccugucuuucagaucuaaaaaaaaaaaaaaaaaaaaaaaaaaaaaaaaaaaaaaaaaaaaaaaaaaaaaaaaaaaaaaaaugcaucccccccccccccccccccccccccccccccaaaggcucuuuucagagccaccagaauu

SEQ ID NO: 10202 - RNA, 2008 nt, Artificial Sequence
  mRNA product Design a-2 comprising derived and/or modified sequence from LASV(GA391;Clade III)__AAA46284__NP (opt3)
gggagaguccgcucagccagguugcagaagcggcuuagcguguguccuaaucuucucucugcguguagguaggccugugccgcaaacaagcuuaccaugagcgccuccaaggaggugagaucuugccuguggacccagucacucaggcgggaacuuaguggcuacuguagcaacaucaaacugcaagucguuaaggacgcucaggcauuguuacacgggcuggauuucuccgaggugucuaauguacagcgccuaaugcgaaaacagaagcgugacgauggagaccucaaaagacugagggaucuuaaccaagccgugaauaaccuggucgaauugaagucgacacagcagaagucagugcuccggguugguacucugagcagugacgaucugcucauuuuagcggcugaccuggagaaacuuaaguccaaagugacgcgcaccgaaagacccuugucuagcggcgucuauauggggaaucuguccucacagcaacuagaucagaggcgggcccuccugaacaugauaggaaugacaggcgugaguggugggggaaagggcgcaagcaauggcaucguacgcguuugggacgugaaaaacgccgagcuucugaauaaccaguuugggacuaugccuucuuugacccucgcuugccugacaaagcagggacaagucgauuuaaaugacgcagugcaggcccugaccgaucucggucuuauuuacacugcuaaguauccaaacuccucagaccuggaccgauugagccagagucauccgauccuaaauaugauugauaccaaaaagucuucccugaacaucagcggcuacaauuucucgcucggggccgcggugaaagcaggagccuguaugcuggacggcgguaacaugcuugagacaauaaaggucucuccccaaacgauggaugggauccugaaauccauuuugaagguuaaaaagucacucggaauguuugugagugacacuccuggcgaaagaaacccauaugagaauauccuguacaagauuugcuuaagcggcgaugggugguccuauaucgcuucuaggaccagcauaguaggacgggccugggaaaacacaguggucgaccuggagcaggauaauaaaccccagaagauugguaacggcgggucaaauaaaagucuacaguccgcaggauucgcugccggccucaucuacagccaacugaugacucuuaaggacuuuaaauguuucaacuugauuccuaaugcgaagaccuggauggauaucgagggucguccagaagaccccguggagaucgcccuguaccagccuucuucagggugcuauguucacuuuuuccgcgaaccaacagaucucaagcaguuuaaacaggacgcaaaguacagucauggcagagacgugaccgaucuguucgcugcccaaccgggacuuacgagcgcugucauugaggcccugcccaggaacauggugauaacuugucagggcuccgaagacauccggaaauugcucgagucucaggggcgacgcgauauuaagcugaucgacauaacauuaucgaaagcagauagcagaaaguuugagaaugccguaugggaccaguucaaggaucugugccacaugcauaccggaguuguggucgagaaaaagaaaagggguggcaaggaagaaauuacuccucacugugcucuaauggacugcaucauguuugaugcggcaguguccgggggacucgacgccaaaguccugcgggugguucuuccacgcgauaugguguucagaacaucaacccccaagguagucuugugaggacuagucccuguucccagagcccacuuuuuuuucuuuuuuugaaauaaaauagccugucuuucagaucuaaaaaaaaaaaaaaaaaaaaaaaaaaaaaaaaaaaaaaaaaaaaaaaaaaaaaaaaaaaaaaaaugcaucccccccccccccccccccccccccccccccaaaggcucuuuucagagccaccagaauu

SEQ ID NO: 10203 - RNA, 2005 nt, Artificial Sequence
  mRNA product Design a-2 comprising derived and/or modified sequence from LASV(Nig08-A19;Clade III)__ADU56619__NP (opt3)
gggagaguccgcucagccagguugcagaagcggcuuagcguguguccuaaucuucucucugcguguagguaggccugugccgcaaacaagcuuaccaugagcgccuccaaggaggugaaaucuuuccuguggacccagucacucagaagggaacuuaguggcuacugcagcaacaucaagcugcaagucguuaaagacgcucaggcauuguuacacgggcuggauuuuuccgaggugucuaauguacagcggcuaaugcgcaagcagaaacgagacgauggagaccucaagcgucugagagaucuuaaccaagccgugaauaaccuggucgaauugaagucgacacagcagaaaucagugcucaggguugguacucugagcagugacgaucugcucguguuagcggcugaccuggagaaacuuaaguccaaggucgugcggacggaacgccccuugucuagcggcauuuauauggggaaucuguccucacagcaacuagaucagagaaaagcccuccugaacaugauaggaaugaccggcgguaaugggggaaggaacacaaccagugacggcaucguacggguuugggaugugaagaaugcagagcuucugaacaaucaguucggcacuaugccuagcuugacacucgccugucugaccaagcaggggcaagucgacuuaaacgaugcugugcaggcacugacugaccucggacuuauuuacacagccaaauauccaaauucuuccgaccuggaucgcuuggcucagucacauccgauccuaaacaugauugacaccaagaaaagcagucugaauaucucugguuacaacuuuucccucggcgccgcggugaaggcaggggccugcaugcuggauggaggcaacaugcuugagacgauaaaagucagcccccaaacuauggacgguauccugaagucgauuuugaaaguuaagcgaucucucgggauguucaucuccgauaccccuggagaaagaaauccauaugagaacauucuguacaagaucuguuuaucaggcgacggcuggcccuauauagcuaguaggacaagcauuguggggcgggccugggaaaauacuguaguggaucuggaguccgacaacaaaccucagaagaccggaaaugguggcucuaacaaaagccuacagucagcaggguuugcugccggacucacauacagucagcugaugacccuuaaggauuccauguugcaacuggacccaaaugcgaaaacguggauggauaucgagggccgucccgaagacccugucgagauugcccucuaccagccaagcucugguugcuauauccacuucuuucgcgaaccgacugaccugaagcaguucaagcaggaugcaaaauacucacaugggaucgacgugacagaucuuuuugcugcccaacccggccugaccagugcuguuauugaggccuugccuagaaacauggugauaacuugucagggaagcgaagacaucaggaagcuccuggagucccagggccggcgagauauuaaauuaaucgacauaucucugucgaaggucgauagccgcaaauucgagaaugcagugugggaccaguuuaaggaucuaugccacaugcauacagggauuguaguugaaaagaaaaagagaggagguaaagaggaaaucaccccacacugugcccucauggacugcaucauguucgaugcugcgguguccggcggggucgacgcaaaggugcugagggccguccuuccccgggauaugguguuucgcacgucaaccccuaaaguuguguugugaggacuagucccuguucccagagcccacuuuuuuuucuuuuuuugaaauaaaauagccugucuuucagaucuaaaaaaaaaaaaaaaaaaaaaaaaaaaaaaaaaaaaaaaaaaaaaaaaaaaaaaaaaaaaaaaaugcaucccccccccccccccccccccccccccccccaaaggcucuuuucagagccaccagaauu

SEQ ID NO: 10204 - RNA, 2005 nt, Artificial Sequence
  mRNA product Design a-2 comprising derived and/or modified sequence from LASV(G1180-SLE-2010;Clade IV)__AIT17169__NP (opt3)
gggagaguccgcucagccagguugcagaagcggcuuagcguguguccuaaucuucucucugcguguagguaggccugugccgcaaacaagcuuaccaugagcgccuccaaggagaucaaaucuuuccuguggacccagucacucagaagggaacuuaguggcuacugcagcaacauuaagcugcaaguggucaaagacgcucaggcauuguuacacgggcuggauuuuuccgagguuucuaaugugcagcggcuaaugcgcaaggaacgacgugacgauaacgaccucaaaagacugagggaucuuaaucaggccguaaacaaucugguggaguugaagucgacacaacagaagucaauacuccgggucggaacucugacgagcgacgaucugcucaucuuagcggcugaccuggaaaaacuuaagaguaaagugauucgcaccgagagacccuuguccgccgguguuuauaugggcaaccugucuagccagcagcuagaucaaaggcgggcacuccuguccaugaucgggaugucaaguggaaaucagcgcgcccaggcuggccgagacgguguggucagagugugggauguaaagaacguugagcuucugaauaaccaguucgggacaaugccuagcuugacucucgcaugucugaccaaacaaggacagguggacuuaaaugaugccguccaggcucugacagaccucggccuuauuuacaccgccaaguauccaaacacuucugaccuggauagguugacacaaucccauccgauccuaaauaugauagacaccaagaaaucaagccugaacaucaguggcuacaauuuuucucucggggcggcagugaaggccggagcuugcaugcuggaugguggcaacaugcuugaaacgauuaaagugagcccccagacuauggacgggauccugaaguccauuuugaaagucaagaaagcccucggaauguucaucucggauaccccuggcgagcggaacccauaugaaaauauacuguacaagauuuguuuaucuggugacggguggcccuauaucgcaucccguacaucaauuacuggacgcgcuugggagaacaccguuguggaucuggagagugacggcaagccucagaaagccggcagcaauaacuccaauaagucucuacagagcguaggguuuacagcgggacucaccuacucacaacugaugacgcuuaaagaugccauguugcagcuggacccaaacgcaaagacuuggauggauaucgaagguagacccgaggacccuguggaaaucgcucucuaccagccaaguuccggcugcuauauucacuucuuuagggagccgacagaccugaaacaguucaagcaagaugccaaguacagccaugggauagacgucaccgaucuuuuugcugcccagcccggacugacuucugcagugaucgacgccuugccucggaauaugguuauuacaugucagggcucagaugacauccgaaaacuccuggaaagucagggucgcaaggauauaaaauuaauugacaucgcucugagcaagaccgauuccagaaaauaugagaacgcggugugggaccaauacaaggaucuaugccacaugcauacgggggucgugguagagaagaaaaagaggggcggaaaagaagagaucaccccacacugugcacucauggacugcauuauguucgaugccgcuguuucuggcgggcugaauacaucggugcuucgggccgucuugccccgcgacaugguguuuagaacuagcaccccuagggucgugcugugaggacuagucccuguucccagagcccacuuuuuuuucuuuuuuugaaauaaaauagccugucuuucagaucuaaaaaaaaaaaaaaaaaaaaaaaaaaaaaaaaaaaaaaaaaaaaaaaaaaaaaaaaaaaaaaaaugcaucccccccccccccccccccccccccccccccaaaggcucuuuucagagccaccagaauu

SEQ ID NO: 10205 - RNA, 2005 nt, Artificial Sequence
  mRNA product Design a-2 comprising derived and/or modified sequence from LASV(G1442-SLE-2011;Clade IV)__AIT17181__NP (opt3)
gggagaguccgcucagccagguugcagaagcggcuuagcguguguccuaaucuucucucugcguguagguaggccugugccgcaaacaagcuuaccaugagcgccuccaaggaggugaaaucuuuccuguggacccagucacucagaagggaacuuaguggcuacugcagcaacaucaagcugcaagucguuaaagacgcucaggcauuguuacacgggcuggauuuuuccgaggugucuaauguacagcggcuaaugcgcaagcagcgacgugacgauaacgaccucaaaagacugagggaucuuaaucaagccgugaacaaucuggucgaauugaagucgacacagcagaagucagugcuccggguuggaacucugacgagcgacgaucugcucguguuagcggcugaccuggagaaacuuaagaguaaagucauucgcaccgaaagacccuuguccgccgguguguauaugggcaaccugucuagccagcaacuagaucagaggcgggcacuccugaauaugauagggauguccggaggcauccaggguacacgcacugggcgagacggaguaguuagagugugggaugucaagaacgccgaccuucugaauaaccaguucggcaccaugccuucauugacacucgcuugucugaccaaacaaggccagguggauuuaaaugacgugguccaggcacugacugaccucgggcuuauuuacacagccaaguauccaaacgcuagugaucuggacagguugacccaaagccauccgauccuaaauaugauugauacgaagaaaucuucccugaacaucucaggauacaauuuuagccucggugccgcgguuaaggcaggcgccugcaugcuggacgggggaaacaugcuugagacuauaaaagugaguccccagaccauggauggcauccugaagucuauuuugaaaguaaagaaaacacucgguauguucaucuccgacacuccuggggagcggaacccauaugaaaauauucuguacaagaucuguuuaagcggagauggcuggcccuauauagcuucgcguaccucuauuacaggccgcgccugggagaacaccguggucgaccuggaauccgaugggaagccucagaaagcaggaucaaauaacaguaauaagagccuacaguccgcugguuuugccgcgggccucacguacucucaacugaugacucuuaaagacgccauguugcagcuggauccaaacgcaaagacauggauggacaucgaggggagacccgaggacccuguggaaauugcucucuaccagccaagcucaggaugcuauauccacuucuuuagggagccgaccgaucugaaacaguucaagcaagacgccaaguacagucauggcaucgauguuacugaccuuuuugcugcccagcccggucugacauccgcagugauugaagccuugccucggaauauggucauaaccugucaggggagcgaugacaucaaaaagcuccuggagucucagggccgaaaagauauuaaguuaaucgacauagcucugucaaaaacggauagucgcaaguaugaaaacgcggugugggaccaauacaaggaucuaugccacaugcauaccggaguaguuguggagaaaaagaaaagaggcgggaaggaggaaauuacaccacacugugcacucauggacugcaucauguucgaugccgcugucagcggaggucugaauacucuuguguugagggccguccugccccgggacaugguguuucgcaccuccacaccuagaguugugcucugaggacuagucccuguucccagagcccacuuuuuuuucuuuuuuugaaauaaaauagccugucuuucagaucuaaaaaaaaaaaaaaaaaaaaaaaaaaaaaaaaaaaaaaaaaaaaaaaaaaaaaaaaaaaaaaaaugcaucccccccccccccccccccccccccccccccaaaggcucuuuucagagccaccagaauu

SEQ ID NO: 10206 - RNA, 2005 nt, Artificial Sequence
  mRNA product Design a-2 comprising derived and/or modified sequence from LASV(G3010-SLE-2013;Clade IV)__AIT17345__NP (opt3)
gggagaguccgcucagccagguugcagaagcggcuuagcguguguccuaaucuucucucugcguguagguaggccugugccgcaaacaagcuuaccaugagcgccuccaaggagaucaaaucuuuccuguggacccagucacucagaagggaacuuaguggcuacugcagcaacauuaagcugcaaguggucaaagacgcucaggcauuguuacacgggcuggauuuuuccgagguuucuaaugugcagcggcuaaugcgcaaggaacgacgugacgauaacgaccucaaaagacugagggaucuuaaucaggccguaaacaaucugguggaguugaagucgacacaacagaagucaauacuccgggucggaacucugacgagcgacgaucugcucaucuuagcggcugaccuggaaaaacuuaagaguaaagugacccgcacagagagacccuuguccgccgguguuuauaugggcaaccugucuagccagcagcuagaucaaaggcgggcacuccuguccaugauugggaugucaaguggagugcagggcgcccgcgcuggucgagacggggucgugagaguaugggauguuaagaaugcagagcuucugaacaaucaguucggaacuaugccuagcuugacccucgccugucugacaaaacagggccaaguggacuuaaacgaugucgugcaggcucugaccgaccucggccuuaucuacacugccaaguauccaaauacaucugaccuggauagguugacccagucccauccgauucuaaacaugaucgacacgaagaaaucaagccugaauauaaguggguacaacuuuucucucggagcggcagugaaggccggugcuugcaugcuggauggcgggaauaugcuugaaacuaucaaagucagcccccaaaccauggacggaauuuugaaguccauccugaaaguuaagaaagcccucggcauguucauuucggagacaccuggugaacggaacccauaugagaacauccuguacaagauauguuuaucuggggauggauggcccuauauugcaucccguacuucaaucaccggccgcgcuugggagaauacagugguagaccuggaaagugauggcaagccucagaaagccgggagcaacaauuccaacaagucucuacagagcgcgggauuuaccgccggucucacguacucacagcugaugacucuuaaagacgcaauguugcaacuggauccaaaugcuaagacauggauggacauugagggcagacccgaagauccuguggaggucgcccucuaccagccaaguuccgggugcuauauccacuucuuuagggaaccgaccgaccugaaacaguucaagcaggacgcuaaguacagccauggaaucgaugugacugaccuuuuugccgcacaacccggccugacaucugccguuauugaugcuuugccucggaacauggugauaaccugucaggguucagacgauaucaaaaagcuccuggagagucaggggcgaaaagacauuaaguuaaucgauauagcgcugagcaaaacggacucccgcaaguaugagaaugcagucugggaucaguacaaggaccuaugccacaugcauaccggcgugguaguugagaaaaagaaaagaggaggcaaggaagaaauuacaccacacugugcccucauggauugcaucauguucgacgcugccgugucugggggacugaacacuucgguccuuagggcaguguugccccgggauauggucuuucgcaccagcacaccuagagugguucugugaggacuagucccuguucccagagcccacuuuuuuuucuuuuuuugaaauaaaauagccugucuuucagaucuaaaaaaaaaaaaaaaaaaaaaaaaaaaaaaaaaaaaaaaaaaaaaaaaaaaaaaaaaaaaaaaaugcaucccccccccccccccccccccccccccccccaaaggcucuuuucagagccaccagaauu

SEQ ID NO: 10207 - RNA, 2005 nt, Artificial Sequence
  mRNA product Design a-2 comprising derived and/or modified sequence from LASV(G502-SLE-2009;Clade IV)__AIT17127__NP (opt3)
gggagaguccgcucagccagguugcagaagcggcuuagcguguguccuaaucuucucucugcguguagguaggccugugccgcaaacaagcuuaccaugagcgccuccaaggagaucaaaucuuuccuguggacccagucacucagaagggaacuuaguggcuacugcagcaacauuaagcugcaaguggucaaagacgcucaggcauuguuacacgggcuggauuuuuccgagguuucuaaugugcagcggcuaaugcgcaaggaacgacgugacgauaacgaccucaaaagacugagggaucuuaaucaggccguaaacaaucugguggaguugaagucgacacaacagaagucaauacuccgggucggaacucugacgagcgacgaucugcucaucuuagcggcugaccuggaaaaacuuaagaguaaagugauucgcaccgagagacccuuguccgccgguguuuauaugggcaaccugucuagccagcagcuagaucaaaggcgggcacuccuguccaugaucgggaugucaggaggcaaucagggugugcgcgccgggaaggacggagucgugcgaguaugggauguuaaaaacgcugagcuucugaauaaccaguucggcacaaugccuaguuugacucucgcaugucugaccaagcagggccaaguggacuuaaaugaugccguccaggcucugacagaccucgggcuuauuuacaccgccaaguauccaaacacuagcgaccuggauagauugacacagucucauccgauccuaaauaugauagacaccaaaaaguccucacugaacaucagcggauacaauuuuagucucggugcggcagugaaagccggcgcuugcaugcuggaugggggaaacaugcuugaaacgauuaaggugucuccccaaacuauggacggcauccugaaauccauuuugaaggucaaaaaggcccucgguauguucaucagcgauaccccuggggagaggaacccauaugaaaauauacuguacaagauuuguuuaucgggagacggcuggcccuauaucgcaucucggacauccauuacuggccgugcuugggagaacaccguuguggaucuggagucagacgggaaaccucagaaggccggaaguaauaacagcaauaaaucccuacagucugcggguuuuacagccggccucaccuacagccagcugaugacgcuuaaggaugcaauguugcaacuggacccaaacacuaaaacauggauggauaucgaagggcgccccgaggacccuguagaaaucgcucucuaccagccaucaaguggaugcuauauucacuucuuuagagagccgaccgaccugaagcaguucaagcaggaugccaaauacucccauggcauagacgugacugaucuuuuugcugcccaacccggucugacaagcgcagucaucgacgccuugccuaggaauauggugauuaccugucaggggucugaugacauccggaagcuccuggaaucacagggccgaaaagauauaaaguuaauugacaucgcucugaacaaaacggauagucgcaaguaugagaaugcgguuugggaccaguacaaggaucuaugccacaugcauaccggaguggucguggagaaaaagaaaagaggcgggaaggaagagaucacaccacacugugcacucauggacugcauuauguucgaugccgcuguaagcggaggucugaacacuuccguucuuagggccguguugccccgggacauggucuuucgcaccucuacaccuagagugguccugugaggacuagucccuguucccagagcccacuuuuuuuucuuuuuuugaaauaaaauagccugucuuucagaucuaaaaaaaaaaaaaaaaaaaaaaaaaaaaaaaaaaaaaaaaaaaaaaaaaaaaaaaaaaaaaaaaugcaucccccccccccccccccccccccccccccccaaaggcucuuuucagagccaccagaauu

SEQ ID NO: 10208 - RNA, 2005 nt, Artificial Sequence
  mRNA product Design a-2 comprising derived and/or modified sequence from LASV(G733-SLE-2010;Clade IV)__AIT17155__NP (opt3)
gggagaguccgcucagccagguugcagaagcggcuuagcguguguccuaaucuucucucugcguguagguaggccugugccgcaaacaagcuuaccaugagcgccuccaaggagaucaaaucuuuccuguggacccagucacucagaagggaacuuaguggcuacugcagcaacauuaagcugcaaguggucaaagacgcucaggcauuguuacacgggcuggauuuuuccgagguuucuaaugugcagcggcuaaugcgcaaggaacgacgugacgauaacgaccucaaaagacugagggaucuuaaucaggccguaaacaaucugguggaguugaagucgacacaacagaagucaguccuccgggugggaacucugacgagcgacgaacugcucguuuuagcggcugaucuggagaaacuuaagaguaaagugauacgcaccgagagacccuuguccgccggugucuauaugggcaaccugucuagccagcagcuagaccaaaggcgggcacuccuguccaugaucgggaugucaggaggcaaucagggugcccgcacagggcgagauggagugguaagaguuugggacgugaagaacgcugaacuucugaauaaccaguucggcacuaugccuaguuugacccucgcaugucugacaaaacagggccaagucgauuuaaaugacgccgugcaggcucugaccgaucucgggcuuauuuacacugccaaguauccaaacacaagcgaccuggacagguugacccagucucauccgauccuaaauaugauugauacgaagaaauccucacugaacaucagcggauacaauuuuagucucggugcggcagugaaggccggcgcuugcaugcuggacgggggaaacaugcuugagacuauaaaagucucuccccaaaccauggauggcauccugaaguccauuuugaaaguuaagaaagcccucgguauguucaucagcgacacaccuggggaacggaacccauaugagaauauucuguacaagaucuguuuaucgggagauggcuggcccuauauagcaucucguacuuccauuaccggccgcgcuugggagaacacagugguagaccuggaaucagaugggaagccucagaaagccggaaguaauaacagcaauaagucccuacagucugcggguuuuaccgccggccucacguacagccagcugaugacucuuaaagacgcaauguugcaacuggauccaaacgcuaagacauggauggacaucgaggggagacccgaagauccuguggagauugcccucuaccagccaucaaguggaugcuauauccacuucuuuagggaaccgaccgaccugaaacaguucaagcaggacgcuaaguacucccauggcaucgaugucacugaccuuuuugccgcacaacccggucugacaagcgccgugauugaugcuuugccucggaauaugguuauaaccugucaggggucugacgauauccgaaaacuccuggagucacagggccgcaaggacauuaaauuaaucgauauagcgcugaguaagauugacagcagaaaauaugagaacgcagugugggaucaguacaaggaccuaugccacaugcauacgggagucgugguagaaaagaaaaagaggggcgggaaagaggaaaucaccccacacugugcccucauggauugcaucauguucgacgcugccguuuccggaggucuuaauucucugguguugcgggcaguccugccccgcgauaugguguuuagaacaucgacuccuagggucgugcucugaggacuagucccuguucccagagcccacuuuuuuuucuuuuuuugaaauaaaauagccugucuuucagaucuaaaaaaaaaaaaaaaaaaaaaaaaaaaaaaaaaaaaaaaaaaaaaaaaaaaaaaaaaaaaaaaaugcaucccccccccccccccccccccccccccccccaaaggcucuuuucagagccaccagaauu

SEQ ID NO: 10209 - RNA, 2005 nt, Artificial Sequence
  mRNA product Design a-2 comprising derived and/or modified sequence from MOPV/LASV reassortant(IGS-1;Clade IV)__AFY05578__NP (opt3)
gggagaguccgcucagccagguugcagaagcggcuuagcguguguccuaaucuucucucugcguguagguaggccugugccgcaaacaagcuuaccaugagcgccuccaaggagaucaaaucuuuccuguggacccagucacucagaagggaacuuaguggcuacugcagcaacauuaagcugcaaguggucaaagacgcucaggcauuguuacacgggcuggauuuuuccgagguuucuaaugugcagcggcuaaugcgcaaggaacgacgugacgauaacgaccucaaaagacugagggaucuuaaucaggccguaaacaaucugguggaguugaagucgacacaacagaagucaauacuccgggucggaacucugacgagcgacgaucugcucaucuuagcggcugaccuggaaaaacuucgcaguaaggugauuagaaccgagaggcccuuguccgccgguguuuauaugggcaaccugucuagccagcagcuagaucaacggcgcgcacuccugaauaugaucgggauguccggaggcaaccagggugcccgagcugggagagacggaguggucagggugugggauguuaaaaaugcagagcuucugucaaaccaguucggcacaaugccuaguuugacucucgccugucugaccaagcagggccaaguagacuuaaaugaugcugugcaggcccugacagaccucgggcuuauuuacaccgcgaaauauccaaacacuagcgaccuggaucgguugacacagucucauccgauccuaaauaugauagacaccaagaaguccucacugaacaucagcggauacaauuuuagucucggugcagccgucaaagcuggcgccugcaugcuggaugggggaaacaugcuugaaacgauuaaggugucuccccaaacuauggacggcauccugaaauccauuuugaaggugaaaaaggcacucgguauguucaucagcgauaccccuggggagcguaacccauaugaaaauauacuguacaaaauuuguuuaucgggagacggcuggcccuauaucgcuucucgcacauccauuacuggcagagccugggagaacaccgucguugaucuggagucagacgggaagccucagaaggcggauaguaauaacagcuccaaaucucuacagagcgccggauuuacagcaggucucaccuacucacagcugaugacgcuuaaggacgcuauguugcaacuggauccaaaugccaaaacuuggauggacaucgaaggcaggcccgaggacccuguggaaaucgcucucuaccagccaaguuccgggugcuauauucacuucuuucgggagccgacagaucugaagcaguucaaacaggacgccaaguacagccauggaauagauguaaccgaccuuuuugcaacucaacccggccugacaucugccgugaucgaugcuuugccucgaaacauggucauuaccugucaggguucagacgauauccgcaagcuccuggaaagucaggggagaaaagacauaaaguuaauugauaucgaccugagcaaaacggauuccaggaaguaugagaaugcggugugggaccaguacaaagaucuaugccacaugcauaccggcguuguggucgagaagaagaaacggggaggcaaggaagagaucacaccacacugugcacucauggacugcauuauguucgacgccgcugugucugggggacugaacacuucgguacuucgcgccguuuugcccagagauaugguguuuaggaccagcacaccucgugucgugcugugaggacuagucccuguucccagagcccacuuuuuuuucuuuuuuugaaauaaaauagccugucuuucagaucuaaaaaaaaaaaaaaaaaaaaaaaaaaaaaaaaaaaaaaaaaaaaaaaaaaaaaaaaaaaaaaaaugcaucccccccccccccccccccccccccccccccaaaggcucuuuucagagccaccagaauu

SEQ ID NO: 10210 - RNA, 2005 nt, Artificial Sequence
  mRNA product Design a-2 comprising derived and/or modified sequence from LASV(LM765-SLE-2012;Clade IV)__AIT17815__NP (opt3)
gggagaguccgcucagccagguugcagaagcggcuuagcguguguccuaaucuucucucugcguguagguaggccugugccgcaaacaagcuuaccaugagcgccuccaaggagaucaaaucuuuccuguggacccagucacucagaagggaacuuaguggcuacugcagcaacauuaagcugcaaguggucaaagacgcucaggcauuguuacacgggcuggauuuuuccgagguuucuaaugugcagcggcuaaugcgcaaggaacgacgugacgauaacgaccucaaaagacugagggaucuuaaucaggccguaaacaaucugguggaguugaagucgacacaacagaagucaauacuccgggucggaacucugacgagcgacgaucugcucaucuuagcggcugaccuggaaaaacuuaagaguaaagugacccgcacagagagacccuuguccgccgguguuuauaugggcaaccugucuagccagcagcuagaucaaaggcgggcacuccuggacaugauugggauguccggaucaaaucagggcgcccgcgcuggucgagaugggguggucagagugugggacguaaagaacgcagagcuucugaauaaccaguucggaacuaugccuaguuugacccucgccugucugacaaaacagggccaaguugauuuaaaugacgcugugcaggcccugaccgaccucggccuuaucuacacugcgaaguauccaaacacaagcgaucuggacagguugacccagucucauccgauucuaaauaugaucgauacgaagaaauccucacugaacauaagcggguacaauuuuagucucggagcagccgucaaggcuggugccugcaugcuggacggcgggaacaugcuugaaacuaucaaagugucuccccaaaccauggauggcauucugaaguccaucuugaaagugaagaaagcacucggaauguucauuagcgacgcuccuggugagcggaacccauaugaaaauauccuguacaagauauguuuaucgggggauggauggcccuauauugccucucguacauccaucacuggccgcgcgugggagaacaccgucguugaccuggagucagauggcaagccucagaaagccgggaguaauggaagcaacaagucccuacagucugcagguuuuacagcuggccucaccuacagccagcugaugacgcuuaaagacgccauguugcaacuggauccaaaugcuaagacuuggauggacauugaagggagacccgaggacccuguggaaaucgcccucuaccagccaucaaguggaugcuauauccacuucuuuagggagccgacagaucugaaacaguucaagcaggacgcaaaguacucccauggcauugauguaaccgaccuuuuugccgcucaacccggucugacuagcgcggugauagaugcauugccucggaacauggucaucacaugucaggggucugacgauauucgaaaacucuucgaaucacagggccgcaaggacaucaaacugauagauauugccuuaaguaagaccgacagcagaaaauaugagaaugcugugugggaucaguacaaggaccugugccacaugcauacgggaaucguuguggagaagaaaaagaggggcgggaaagaagagaucaccccacacugugcccuaauggauugcauuauguuugacgcagccgucuccggaggucucaacacaucugugcugcgggcuguacuuccccgcgacaugguuuucagaacuucgaccccuaggguggucuugugaggacuagucccuguucccagagcccacuuuuuuuucuuuuuuugaaauaaaauagccugucuuucagaucuaaaaaaaaaaaaaaaaaaaaaaaaaaaaaaaaaaaaaaaaaaaaaaaaaaaaaaaaaaaaaaaaugcaucccccccccccccccccccccccccccccccaaaggcucuuuucagagccaccagaauu

SEQ ID NO: 10211 - RNA, 2005 nt, Artificial Sequence
  mRNA product Design a-2 comprising derived and/or modified sequence from LASV(LM776-SLE-2012;Clade IV)__AIT17825__NP (opt3)
gggagaguccgcucagccagguugcagaagcggcuuagcguguguccuaaucuucucucugcguguagguaggccugugccgcaaacaagcuuaccaugagcgccuccaaggagaucaaaucuuuccuguggacccagucacucagaagggaacuuaguagcuacugcuccaacauuaagcugcaaguggucaaagacgcucaggcauuguuacacggccuggauuuuucugagguuucgaaugugcagcggcuaaugcgcaaggaacgacgugacgauaacgaccucaaaagacugagggaucuuaaucaggccguaaacaaucugguggaguugaagucaacacaacagaagaguauacuccgggucgggacucugacgagugacgaucugcucaucuuagcggcugaccuggaaaaacuuaaguccaaagugacccgcacagagagacccuugucugccggaguuuauauggguaaccugagcucccagcagcuagaucaaaggcgggcacuccugucaaugauuggcaugagugggagcaaucagggagcccgcgcuggccgagacgguguggucagagugugggauguaaagaacgcagagcuucugaauaaccaguucgggacuaugccuucuuugacccucgccugucugacaaaacagggacaaguugacuuaaaugaugcugugcaggcccugaccgaccucggccuuaucuacacugcgaaguauccaaacacauccgaccuggauagguugacccagucacauccgauucuaaauaugaucgacacgaagaaaagcagucugaacauaucuggcuacaauuuuucccucggggcagccgucaaggcuggagccugcaugcuggaugguggcaacaugcuugaaacuaucaaagugagcccccaaaccauggacgggauucugaagucgaucuugaaagugaagaaagcacucggaauguucauuucugauacaccuggcgagcggaacccauaugaaaauauccuguacaagauauguuuauccggugacggguggcccuauauugcuucacguacuagcaucaccggacgcgccugggagaacacagucguugaucuggagagcgacggcaagccucagaaagcgggcuccaauaacucuaauaagagccuacagucagccggguuuaccgcaggacucacguacagucagcugaugacucuuaaagaugcuauguugcaacuggacccaaacgccaagacauggauggauauugaagguagacccgaggacccuguggaaguagcucucuaccagccauccagcggcugcuauauccacuucuuuagggagccgaccgaccugaaacaguucaagcaggaugccaaguacucucaugggaucgacgugacugaucuuuuugcagcccaacccggacugacaucagcugucauugacgcguugccucggaauauggugauaaccugucagggcagugaugacauccgaaaacuccuggaaagccagggucgcaaggauauuaaauuaaucgacauagcacuguccaagacggauucuagaaaauaugagaacgccguuugggaccaguacaaggaucuaugccacaugcauaccgggguggucguggagaagaaaaagaggggcggaaaagaagagauuacaccacacugugcucucauggacugcaucauguucgaugccgcaguaucgggcgggcugaauacuagcguucuucgggccguguugccccgcgacauggucuuuagaaccuccacaccuagggugguccugugaggacuagucccuguucccagagcccacuuuuuuuucuuuuuuugaaauaaaauagccugucuuucagaucuaaaaaaaaaaaaaaaaaaaaaaaaaaaaaaaaaaaaaaaaaaaaaaaaaaaaaaaaaaaaaaaaugcaucccccccccccccccccccccccccccccccaaaggcucuuuucagagccaccagaauu

SEQ ID NO: 10212 - RNA, 2005 nt, Artificial Sequence
  mRNA product Design a-2 comprising derived and/or modified sequence from LASV(Mad39;Clade IV)__ANH09723__NP (opt3)
gggagaguccgcucagccagguugcagaagcggcuuagcguguguccuaaucuucucucugcguguagguaggccugugccgcaaacaagcuuaccaugagcgccuccaaggagaucaaaucuuuccuguggacccagucacucagaagggaacuuaguggcuacugcagcaacauuaagcugcaaguggucaaagacgcucaggcauuguuacacgggcuggauuuuuccgagguuucuaaugugcagcggcuaaugcgcaagcagcgacgugacgauaacgaccucaaaagacugagggaucuuaaucaagccguaaacaaucugguggaauugaagucgacacagcagaagucaguccuccgggugggaacucugacgagcgacgaucugcucaccuuagcggcugaccuggagaaacuuaagaguaaaguuacacgcacugaaagacccuugaccgccgguguguauaugggcaaccuguccucucagcaacuagaucagaggcgggcacuccugaauaugauagggaugagcggaggcaaccagggugcccgcacagggcgagacggagucgugagaguaugggauguuaagaaugcugagcuucugaacaaucaguucggcaccaugccuuccuugacucucgcaugucugacaaaacaaggccagguggacuuaaacgaugucgugcaggcccugaccgaccucgggcuuaucuacacggcuaaguauccaaauacuucagaccuggauagguugacccaaagucauccgauucuaaacaugaucgacacaaauaagagcucucugaacauuuccggauacaacuuuucacucggugccgcggugaaagcaggcgccugcaugcuggaugggggaaauaugcuugagacuaucaaggucagcccccagaccauggacggcauacugaaaaguaucuugaagguuaaaaagucucucgguauguucauuuccgauacaccuggggaacggaacccauaugagaauauccuguacaaaauuuguuuaagcggagacggcuggcccuauaucgcuucgcguaccucuauaacgggccgcgccugggaaaacacugugguagaucuggaguccgggggaaagccucagaaggcagguucaaauaacaguaauaaaagccuacaguccgcuggcuuugccgcggggcucacauacucucaacugaugacccuuaaggacgccauguugcagcuggauccaaacgcaaaaacuuggauggacauugagggaagacccgaagauccuguggagaucgcucucuaccagccaauuagcggcugcuauauccacuucuuuagggaaccgacagaccugaagcaguucaaacaagacgccaaguacucacaugguaucgaugucaccgaccuuuuugcugcccagcccgggcugacgagugcagugauugaggccuugccucggaauaugguuauaaccugucagggcuccgaugacauccgaaaacucuucgaaagccagggacgcaaggauauuaagcugaucgacauagcuuuaucuaaaacagauucaagaaaguaugagaacgcggugugggaccaauacaaagaucugugccacaugcauacuggcgucgugguagagaagaagaaaaagggagggaaagaagagauuaccccacacugugcacuaauggacugcaucauguuugaugccgcuguuagugguggccucaauacacuggugcuuagggccgucuugccccgggacaugguguuccgcacuagcaccccuaaggucgugcugugaggacuagucccuguucccagagcccacuuuuuuuucuuuuuuugaaauaaaauagccugucuuucagaucuaaaaaaaaaaaaaaaaaaaaaaaaaaaaaaaaaaaaaaaaaaaaaaaaaaaaaaaaaaaaaaaaugcaucccccccccccccccccccccccccccccccaaaggcucuuuucagagccaccagaauu

SEQ ID NO: 10213 - RNA, 2005 nt, Artificial Sequence
  mRNA product Design a-2 comprising derived and/or modified sequence from LASV(Z0947-SLE-2011;Clade IV)__AIT17841__NP (opt3)
gggagaguccgcucagccagguugcagaagcggcuuagcguguguccuaaucuucucucugcguguagguaggccugugccgcaaacaagcuuaccaugagcgccuccaaggagaucaaaucuuuccuguggacccagucacucagaagggaacuuaguggcuacugcagcaacauuaagcugcaaguggucaaagacgcucaggcauuguuacacgggcuggauuuuuccgagguuucuaaugugcagcggcuaaugcgcaaggaacgacgugacgauaacgaccucaaaagacugagggaucuuaaucaggccguaaacaaucugguggaguugaagucgacacaacagaagucaauacuccgggucggaacucugacgagcgacgaucugcucaucuuagcggcugaccuggaaaaacuuaagaguaaagugacccgcacagagagacccuuguccgccgguguuuauaugggcaaccugucuagccagcagcuagaucaaaggcgggcacuccugaauaugauugggauguccggaucaaaccagggcgcccgcacuggucgagacgggguggucagagugugggauguaaagaaugcugagcuucugaacaaucaguucggaaccaugccuaguuugacacucgcaugucugaccaaacagggccaaguugacuuaaacgaugccgugcaggcucugacugaccucggccuuaucuacacagccaaguauccaaauaccagcgaccuggauagguugacgcagucucauccgauucuaaacaugaucgacacuaagaaauccucacugaauauaagcggguacaacuuuagucucggagcggcagucaaggccggugcuugcaugcuggauggcgggaacaugcuugaaaccaucaaagugucuccccaaacaauggacggcauucugaaguccaucuugaaagugaagaaagcccucggaauguucauuagcgaugcaccuggugagcggaauccauaugaaaacauccuguacaagauauguuuaucgggggacggauggcccuauauugcuucucguacuuccaucaccggccgcgccugggagaauacagucguugaucuggagucagacggcaagccucagaaagcggggaguaacggaagcaauaagucccuacagucugccgguuuuaccgcaggccucacguacagccagcugaugacucuuaaagaugcuauguugcaacuggacccaaacgccaagacauggauggauauugaagggagacccgaggacccuguggaaaucgcucucuaccagccaucaaguggaugcuauauccacuucuuuagggagccgaccgaccugaaacaguucaagcaggaugccaaguacucccauggcauugacguaacugaucuuuuugcagcccaacccggucugacaagcgcugugauagacgcguugccucggaauauggucaucaccugucaggggucugaugacauucgaaaacucuucgaaucacagggccgcaaggauaucaaacugauagacauugcauuaaguaagacggauagcagaaaauaugagaacgccgugugggaccaguacaaggaucugugccacaugcauaccggaaucguuguggagaagaaaaagaggggcgggaaagaagagaucacaccacacugugcucuaauggacugcauuauguuugaugccgcagucuccggaggucucaauacuucugugcugcgggccguacuuccccgcgacaugguuuucagaaccucgacaccuaggguggucuugugaggacuagucccuguucccagagcccacuuuuuuuucuuuuuuugaaauaaaauagccugucuuucagaucuaaaaaaaaaaaaaaaaaaaaaaaaaaaaaaaaaaaaaaaaaaaaaaaaaaaaaaaaaaaaaaaaugcaucccccccccccccccccccccccccccccccaaaggcucuuuucagagccaccagaauu

SEQ ID NO: 10214 - RNA, 2005 nt, Artificial Sequence
  mRNA product Design a-2 comprising derived and/or modified sequence from LASV(Josiah;Clade IV)__NP_694869__NP (opt4)
gggagaguccgcucagccagguugcagaagcggcuuagcguguguccuaaucuucucucugcguguagguaggccugugccgcaaacaagcuuaccaugagcgccagcaaggagaucaagagcuuccuguggacccagagccugagaagagagcugagcggcuacugcagcaacaucaagcugcagguggugaaggacgcccaggcccugcugcacggccuggacuucagcgaggugagcaacgugcagagacugaugagaaaggagagaagagacgacaacgaccugaagagacugagagaccugaaccaggccgugaacaaccugguggagcugaagagcacccagcagaagagcauccugagagugggcacccugaccagcgacgaccugcugauccuggccgccgaccuggagaagcugaagagcaaggugaucagaaccgagagaccccugagcgccggcguguacaugggcaaccugagcagccagcagcuggaccagagaagagcccugcugaacaugaucggcaugagcggcggcaaccagggcgccagagccggcagagacggcguggugagagugugggacgugaagaacgccgagcugcugaacaaccaguucggcaccaugcccagccugacccuggccugccugaccaagcagggccagguggaccugaacgacgccgugcaggcccugaccgaccugggccugaucuacaccgccaaguaccccaacaccagcgaccuggacagacugacccagagccaccccauccugaacaugaucgacaccaagaagagcagccugaacaucagcggcuacaacuucagccugggcgccgccgugaaggccggcgccugcaugcuggacggcggcaacaugcuggagaccaucaaggugagcccccagaccauggacggcauccugaagagcauccugaaggugaagaaggcccugggcauguucaucagcgacacccccggcgagagaaaccccuacgagaacauccuguacaagaucugccugagcggcgacggcuggcccuacaucgccagcagaaccagcaucaccggcagagccugggagaacaccgugguggaccuggagagcgacggcaagccccagaaggccgacagcaacaacagcagcaagagccugcagagcgccggcuucaccgccggccugaccuacagccagcugaugacccugaaggacgccaugcugcagcuggaccccaacgccaagaccuggauggacaucgagggcagacccgaggaccccguggagaucgcccuguaccagcccagcagcggcugcuacauccacuucuucagagagcccaccgaccugaagcaguucaagcaggacgccaaguacagccacggcaucgacgugaccgaccuguucgccacccagcccggccugaccagcgccgugaucgacgcccugcccagaaacauggugaucaccugccagggcagcgacgacaucagaaagcugcuggagagccagggcagaaaggacaucaagcugaucgacaucgcccugagcaagaccgacagcagaaaguacgagaacgccgugugggaccaguacaaggaccugugccacaugcacaccggcguggugguggagaagaagaagagaggcggcaaggaggagaucaccccccacugcgcccugauggacugcaucauguucgacgccgccgugagcggcggccugaacaccagcgugcugagagccgugcugcccagagacaugguguucagaaccagcacccccagaguggugcugugaggacuagucccuguucccagagcccacuuuuuuuucuuuuuuugaaauaaaauagccugucuuucagaucuaaaaaaaaaaaaaaaaaaaaaaaaaaaaaaaaaaaaaaaaaaaaaaaaaaaaaaaaaaaaaaaaugcaucccccccccccccccccccccccccccccccaaaggcucuuuucagagccaccagaauu

SEQ ID NO: 10215 - RNA, 2005 nt, Artificial Sequence
  mRNA product Design a-2 comprising derived and/or modified sequence from LASV(LP;Clade I)__AAF86702__NP (opt4)
gggagaguccgcucagccagguugcagaagcggcuuagcguguguccuaaucuucucucugcguguagguaggccugugccgcaaacaagcuuaccaugagcaacagcaaggagaucaagagcuuccuguggacccagagccugagaagagagcugagcggcuacugcagcaacaucaagcugcagguggugaaggacgcccaggcccugcugcacggccuggacuucagcgaggugagcaacgugcagagacugaugagaaagcagaagagagacgacgccgaccugaagagacugagagaccugaaccaggccgugaacaaccugguggagcugaagagcacccagcagaagaacgugcugagagugggcacccugagcagcgacgaccugaucacccuggccgccgaccuggagaagcugaagagcaaggugaucagaaccgagagaccccugagcagcggcguguacaugggcaaccugagcagccagcagcuggaccagagaagagcccugcugagcaugaucggcaugagcggcggcccccagggcaacagaaccggcggcgacggcguggugagagugugggacgugaagaacgccgagcugcugaacaaccaguucggcaccaugcccagccugacccuggccugccugaccaagcagggccagguggaccugaacgacgccgugcaggcccugaccgaccugggccugaucuacaccgccaaguaccccaacagcagcgaccuggacaugcugacccagagccaccccauccugggcaugguggacaccaagaagagcagccugaacaucagcggcuacaacuucagccugggcgccgccgugaaggccggcgccugcaugcuggacggcggcaacaugcuggagaccaucaaggugagcccccagaccauggacggcauccugaagagcauccugaaggugaagagaagccugggcauguucaucagcgacacccccggcgagagaaaccccuacgagaacauccuguacaagaucugccugagcggcgagggcuggcccuacaucgccagcagaaccagcaucaccggcagagccugggagaacacccugguggaccuggagagcgacaacaagccccccaagcugaacagcgccggcagcaacaagagccugcaggccgccggccugaacgccggccugaccuacagccagcugaugacccugaaggacugcaugcugcagcuggaccccagcagcaagaccuggaucgacaucgagggcagacccgaggaccccguggagaucgcccuguuccagcccagcagcggcugcuacauccacuucuucagagagcccaccgaccugaagcaguucaagcaggacgccaaguacagccacggcaucgacgugaccgaccuguucagcacccagcccggccugaccagcgccgugaucgaggcccugcccagaaacauggugcugaccugccagggcagcgacgacaucaagaagcugcuggagagccagggcagaagagacaucaagcugaucgacaucagccugagcaaggccgacagcagaaaguucgagaacgccgugugggaccaguacaaggaccugugccacaugcacaccggcguggugguggagaagaagaagagaggcggcaaggaggagaucaccccccacugcgcccugcuggacugcaucauguucgacgccgccaccaccggcagccugaacaucaccacccugagagccgugcugcccagagacaugguguucagaaccagcacccccaagguggugcugugaggacuagucccuguucccagagcccacuuuuuuuucuuuuuuugaaauaaaauagccugucuuucagaucuaaaaaaaaaaaaaaaaaaaaaaaaaaaaaaaaaaaaaaaaaaaaaaaaaaaaaaaaaaaaaaaaugcaucccccccccccccccccccccccccccccccaaaggcucuuuucagagccaccagaauu

SEQ ID NO: 10216 - RNA, 2005 nt, Artificial Sequence
  mRNA product Design a-2 comprising derived and/or modified sequence from LASV(803213;Clade II)__AAF86704__NP (opt4)
gggagaguccgcucagccagguugcagaagcggcuuagcguguguccuaaucuucucucugcguguagguaggccugugccgcaaacaagcuuaccaugagcgccagcaaggaggugaagagcuuccuguggacccagagccugagaagagagcugagcggcuacugcagcaacaucaagcugcagguggugaaggacgcccaggcccugcugcacggccuggacuucagcgaggugaacaacgugcagagacugaugagaaagcagaagagagacgacggcgaccugaagagacugagagaccugaaccaggccgugaacaaccugguggagcugaagagcacccagcagaagagcauccugagagugggcacccugaccagcgacgaccugcugacccuggccgccgaccuggagaagcugaagagcaaggugaucagaaccgagagaccccugagcagcggcguguacaugggcaaccugagcacccagcagcuggagcagagaagagcccugcugaacaugaucggcauggugggcggcgcccagggcacccagcccggcagagacggcguggugagagugugggacgugaagaaccccgaccugcugaacaaccaguucggcaccaugcccagccugacccuggccugccugaccaagcagggccagguggaccugaacgacgccgugcuggcccugaccgaccugggccugaucuacaccgccaaguaccccaacagcagcgaccuggacagacugagccagagccaccccauccugaacaugguggacaccaagaagagcagccugaacaucagcggcuacaacuucagccugggcgccgccgugaaggccggcgccugcaugcuggacggcggcaacaugcuggagaccaucaaggugaccccccagaccauggacggcauccugaagagcauccugaaggugaagagaagccugggcauguucgugagcgacacccccggcgagagaaaccccuacgagaacauccuguacaagaucugccugagcggcgacggcuggcccuacaucgccagcagaaccagcaucgugggcagagccugggagaacaccaccguggaccuggagagcgacggcaagccccagaaggugggcaccgccggcagcaacaagagccugcagagcgccggcuuccccaccggccugaccuacagccagcugaugacccugaaggacagcaugaugcagcuggaccccagcgccaagaccuggaucgacaucgagggcagacccgaggaccccguggagaucgcccuguaccagcccaugagcggcugcuacauccacuucuucagagagcccaccgaccugaagcaguucaagcaggacgccaaguacagccacggcaucgacguggccgaccuguuccccgcccagcccggccugaccagcgccgugaucgaggcccugcccagaaacauggugcugaccugccagggcagcgacgacaucaagaagcugcuggacagccagggcagaagagacaucaagcugaucgacaucagccugagcaagguggacagcagaaaguucgagaacgccgugugggaccagugcaaggaccugugccacaugcacaccggcguggugguggagaagaagaagagaggcggcaaggaggagaucaccccccacugcgcccugauggacugcaucauguucgacgccgccgugagcggcggccugaacauccccgugcugagagccgugcugcccagagacaugguguucagaaccagcagccccaagguggugcugugaggacuagucccuguucccagagcccacuuuuuuuucuuuuuuugaaauaaaauagccugucuuucagaucuaaaaaaaaaaaaaaaaaaaaaaaaaaaaaaaaaaaaaaaaaaaaaaaaaaaaaaaaaaaaaaaaugcaucccccccccccccccccccccccccccccccaaaggcucuuuucagagccaccagaauu

SEQ ID NO: 10217 - RNA, 2008 nt, Artificial Sequence
  mRNA product Design a-2 comprising derived and/or modified sequence from LASV(GA391;Clade III)__CAA36646__NP (opt4)
gggagaguccgcucagccagguugcagaagcggcuuagcguguguccuaaucuucucucugcguguagguaggccugugccgcaaacaagcuuaccaugagcgccagcaaggaggugagaagcuuccuguggacccagagccugagaagagagcugagcggcuacugcagcaacaucaagcugcagguggugaaggacgcccaggcccugcugcacggccuggacuucagcgaggugagcaacgugcagagacugaugagaaagcagaagagagacgacggcgaccugaagagacugagagaccugaaccaggccgugaacaaccugguggagcugaagagcacccagcagaagagcgugcugagagugggcacccugagcagcgacgaccugcugauccuggccgccgaccuggagaagcugaagagcaaggugaccagaaccgagagaccccugagcagcggcguguacaugggcaaccugagcagccagcagcuggaccagagaagagcccugcugaacaugaucggcaugaccggcgugagcggcggcggcaagggcgccagcgacggcaucgugagagugugggacgugaagaacgccgagcugcugaacaaccaguucggcaccaugcccagccugacccuggccugccugaccaagcagggccagguggaccugaacgacgccgugcaggcccugaccgaccugggccugaucuacaccgccaaguaccccaacagcagcgaccuggacagacugagccagagccaccccauccugaacaugaucgacaccaagaagagcagccugaacaucagcggcuacaacuucagccugggcgccgccgugaaggccggcgccugcaugcuggacggcggcaacaugcuggagaccaucaaggugagcccccagaccauggacggcauccugaagagcauccugaaggugaagaagagccugggcauguucgugagcgacacccccggcgagagaaaccccuacgagaacauccuguacaagaucugccugagcggcgacggcuggcccuacaucgccagcagaaccagcaucgugggcagagccugggagaacaccgugguggaccuggagcaggacaacaagccccagaagaucggcaacggcggcagcaacaagagccugcagagcgccggcuucgccgccggccugaccuacagccagcugaugacccugaaggacuucaagugcuucaaccugauccccaacgccaagaccuggauggacaucgagggcagacccgaggaccccguggagaucgcccuguaccagcccagcagcggcugcuacgugcacuucuucagagagcccaccgaccugaagcaguucaagcaggacgccaaguacagccacggcaucgacgugaccgaccuguucgccgcccagcccggccugaccagcgccgugaucgaggcccugcccagaaacauggugaucaccugccagggcagcgaggacaucagaaagcugcuggagagccagggcagaagagacaucaagcugaucgacaucacccugagcaaggccgacagcagaaaguucgagaacgccgugugggaccaguucaaggaccugugccacaugcacaccggcguggugguggagaagaagaagagaggcggcaaggaggagaucaccccccacugcgcccugauggacugcaucauguucgacgccgccgugagcggcggccuggacgccaaggugcugagaguggugcugcccagagacaugguguucagaaccagcacccccaagguggugcugugaggacuagucccuguucccagagcccacuuuuuuuucuuuuuuugaaauaaaauagccugucuuucagaucuaaaaaaaaaaaaaaaaaaaaaaaaaaaaaaaaaaaaaaaaaaaaaaaaaaaaaaaaaaaaaaaaugcaucccccccccccccccccccccccccccccccaaaggcucuuuucagagccaccagaauu

SEQ ID NO: 10218 - RNA, 2005 nt, Artificial Sequence
  mRNA product Design a-2 comprising derived and/or modified sequence from LASV(AV;Clade V)__CCA30315__NP (opt4)
gggagaguccgcucagccagguugcagaagcggcuuagcguguguccuaaucuucucucugcguguagguaggccugugccgcaaacaagcuuaccaugagcgccagcaaggaggugaagagcuuccuguggacccagagccugagaagagagcugagcggcuacugcagcaacaucaagcugcagguggugaaggacgcccaggcccugcugcacggccuggacuucagcgaggugagcaacgugcagagacugaugagaaagcagagaagagacgacagcgaccugaagagacugagagaccugaaccaggccgugaacaaccugguggagcugaagagcacccagcagaagagcgugcugagagugggcacccugagcagcgacgaccugcugacccuggccgccgaccuggagaagcugaagagcaaggugaccagaaccgagagaccccugagcagcggcguguacaugggcaaccugagcagccagcagcuggaccagagaagagcccugcugaaccugaucggcaugaccaacggcagccagggcagccaggccggcagagacggcguggugagagugugggacgugaagaacgccgagcugcugaacaaccaguucggcaccaugcccagccugacccuggccugccugaccaagcagggccagguggaccugaacgacguggugcaggcccugaccgaccugggccugaucuacaccgccaaguaccccaacaccagcgaccuggacagacugacccagagccaccccauccugaacaugaucgacaccaagaagagcagccugaacaucagcggcuacaacuucagccugggcgccgccgugaaggccggcgccugcaugcuggacggcggcaacaugcuggagaccaucaaggugagcccccagagcauggacggcauccugaagagcauccugaaggugaagagagcccugggcauguucgugagcgacacccccggcgagagaaaccccuacgagaacauccuguacaagaucugccugagcggcgacggcuggcccuacaucgccagcagaaccagcaucgugggcagagccugggagaacaccgugguggaccuggagaccgacggcaagccccagaagaucggcagcggcaacagcaacaagagccugcagagcgccggcuucagcgccggccugaccuacagccagcugaugacccugaaggacgccaugcugcagcuggaccccaacgccaagaccuggauggacaucgagggcagacccgaggaccccguggagguggcccuguaccagcccaucagcggcugcuacauccacuucuucagagagcccaccgaccugaagcaguucaagcaggacgccaaguacagccacggcaucgacaucgccgaccuguucgccgcccagcccggccugaccagcgccgugaucgaggcccugcccagaaacauggugaucaccugccagggcagcgaggacaucaagaagcugcuggagagccagggcagaaaggacaucaagcugaucgacaucgcccugagcaagaucgacagcagaaaguucgagaacgccgugugggaccaguacaaggaccugugccacaugcacaccggcguggugguggagaagaagaagagaggcggcaaggaggagaucaccccccacugcgcccugauggacugcaucauguucgacgccgccgugagcggcggccugaacacccuggugcugagagccgugcugcccagagacaugguguucagaaccagcacccccagaguggugcugugaggacuagucccuguucccagagcccacuuuuuuuucuuuuuuugaaauaaaauagccugucuuucagaucuaaaaaaaaaaaaaaaaaaaaaaaaaaaaaaaaaaaaaaaaaaaaaaaaaaaaaaaaaaaaaaaaugcaucccccccccccccccccccccccccccccccaaaggcucuuuucagagccaccagaauu

SEQ ID NO: 10219 - RNA, 2005 nt, Artificial Sequence
  mRNA product Design a-2 comprising derived and/or modified sequence from LASV(Togo/2016/7082;Clade VI)__AMR44578__NP (opt4)
gggagaguccgcucagccagguugcagaagcggcuuagcguguguccuaaucuucucucugcguguagguaggccugugccgcaaacaagcuuaccaugagcaacagcaaggaggugaagagcuuccuguggacccagagccugagaagagagcugagcggcuacugcagcaacaucaagcugcagguggugaaggacgcccaggcccugcugcacggccuggacuucagcgaggugagcaacgugcagagacugaugagaaagcagaagagagacgacggcgaccugaagagacugagagaccugaaccaggccgugaacaaccugguggagcugaagagcgugcagcagaagagcauccugagagugggcacccugaccagcgacgaccugcugacccuggccgccgaccuggagaagcugaagagcaaggugaccagaaccgagagaccccugagcagcggcguguacaugggcaaccugagcagccagcagcuggaccagagaagagcccugcugagcaugaucggcaugagcggcggcaaccagaacagccagcccaagggcgacggcguggugagagugugggacgugaagaacgccgaccugcugaacaaccaguucggcaccaugcccagccugacccuggccugccugaccaagcagggccagguggaccugaacgacgccgugcaggcccugaccgaccugggccugaucuacaccgccaaguaccccaacagcagcgaccuggacagacugagccagagccaccccauccugaacaugaucgacaccaagaagagcagccugaacaucagcggcuacaacuucagccugggcgccgccaucaagaccggcgccugcaugcuggacggcggcaacaugcuggagaccaucaaggugaccccccagaccauggacggcauccugaagagcauccugaaggugaagagaagccugggcauguucaucagcgacacccccggcgagagaaaccccuacgagaacauccuguacaagaucugccugagcggcgacggcuggcccuacaucgccagcagaaccgccaucaucggcagagccugggagaacaccgugguggaccuggagagcgacagcaagccccagaagaucggcagcaacggcagcaacaagagccugcagagcgccggcuucgcccccggccugaccuacagccagcugaugacccugaaggacagcaugcugcagcuggaccccaacgccaagaccuggaucgacaucgagggcagacccgaggaccccguggagguggcccuguuccagcccaucagcggcugcuacauccacuucuucagagagcccaccgaccugaagcaguucaagcaggacgccaaguacagccacggcaucgacgugaccgaccuguucgccgcccagcccggccugaccagcgccgugaucgaggcccugcccagaaacauggugcugaccugccagggcagcgacgacaucaagaagcugcuggacagccagggcagaagagacaucaagcugaucgacgugagccugaacaagaucgacagcagaaaguucgagaacgccgugugggaccaguacaaggaccugugccacaugcacaccggcguggugguggagaagaagaagaagggcggcaaggaggagaucaccccccacugcgcccugcuggacugcaucauguucgacgccgccgugagcggcggccugaacgccaccgugcugagagccgugcugcccagagacaugguguucagaaccagcagccccaagguggugcugugaggacuagucccuguucccagagcccacuuuuuuuucuuuuuuugaaauaaaauagccugucuuucagaucuaaaaaaaaaaaaaaaaaaaaaaaaaaaaaaaaaaaaaaaaaaaaaaaaaaaaaaaaaaaaaaaaugcaucccccccccccccccccccccccccccccccaaaggcucuuuucagagccaccagaauu
